United States Patent Application Publication US 2024/0084334 A1 - sequence listing, part 4

SEQ ID NO: 2303 - protein, 2115 aa, synthetic construct
MPAAKRVKLDGGDKKYSIGLDIGTNSVGWAVITDEYKVPSKKFKVLGNTDRHSIKKNLIGALLFDSGETAEATRLKRTARRRYTRRKNRICYLQEIFSNEMAKVDDSFFHRLEESFLVEEDKKHERHPIFGNIVDEVAYHEKYPTIYHLRKKLVDSTDKADLRLIYLALAHMIKFRGHFLIEGDLNPDNSDVDKLFIQLVQTYNQLFEENPINASGVDAKAILSARLSKSRRLENLIAQLPGEKKNGLFGNLIALSLGLTPNFKSNFDLAEDAKLQLSKDTYDDDLDNLLAQIGDQYADLFLAAKNLSDAILLSDILRVNTEITKAPLSASMIKRYDEHHQDLTLLKALVRQQLPEKYKEIFFDQSKNGYAGYIDGGASQEEFYKFIKPILEKMDGTEELLVKLNREDLLRKQRTFDNGSIPHQIHLGELHAILRRQEDFYPFLKDNREKIEKILTFRIPYYVGPLARGNSRFAWMTRKSEETITPWNFEEVVDKGASAQSFIERMTNFDKNLPNEKVLPKHSLLYEYFTVYNELTKVKYVTEGMRKPAFLSGEQKKAIVDLLFKTNRKVTVKQLKEDYFKKIECFDSVEISGVEDRFNASLGTYHDLLKIIKDKDFLDNEENEDILEDIVLTLTLFEDREMIEERLKTYAHLFDDKVMKQLKRRRYTGWGRLSRKLINGIRDKQSGKTILDFLKSDGFANRNFMQLIHDDSLTFKEDIQKAQVSGQGDSLHEHIANLAGSPAIKKGILQTVKVVDELVKVMGRHKPENIVIEMARENQTTQKGQKNSRERMKRIEEGIKELGSQILKEHPVENTQLQNEKLYLYYLQNGRDMYVDQELDINRLSDYDVDHIVPQSFLKDDSIDNKVLTRSDKARGKSDNVPSEEVVKKMKNYWRQLLNAKLITQRKFDNLTKAERGGLSELDKAGFIKRQLVETRQITKHVAQILDSRMNTKYDENDKLIREVKVITLKSKLVSDFRKDFQFYKVREINNYHHAHDAYLNAVVGTALIKKYPKLESEFVYGDYKVYDVRKMIAKSEQEIGKATAKYFFYSNIMNFFKTEITLANGEIRKRPLIETNGETGEIVWDKGRDFATVRKVLSMPQVNIVKKTEVQTGGFSKESILPKRNSDKLIARKKDWDPKKYGGFDSPTVAYSVLVVAKVEKGKSKKLKSVKELLGITIMERSSFEKNPIDFLEAKGYKEVKKDLIIKLPKYSLFELENGRKRMLASAGELQKGNELALPSKYVNFLYLASHYEKLKGSPEDNEQKQLFVEQHKHYLDEIIEQISEFSKRVILADANLDKVLSAYNKHRDKPIREQAENIIHLFTLTNLGAPAAFKYFDTTIDRKRYTSTKEVLDATLIHQSITGLYETRIDLSQLGGDGGGGGGSGGGGSGGGGSGGGGSGGGGSGGGGSGGTLNIEDEYRLHETSKEPDVSLGSTWLSDFPQAWAETGGMGLAVRQAPLIIPLKATSTPVSIKQYPMSQEARLGIKPHIQRLLDQGILVPCQSPWNTPLLPVKKPGTNDYRPVQDLREVNKRVEDIHPTVPNPYNLLSGLPPSHQWYTVLDLKDAFFCLRLHPTSQPLFAFEWRDPEMGISGQLTWTRLPQGFKNSPTLFNEALHRDLAGFRIQHPDLILLQYVDDLLLAATSELDCQQGTRALLQTLGDLGYRASAKKAQICQKQVKYLGYLLKEGQRWLTEARKETVMGQPIPKTPRQLREFLGKAGFCRLFIPGFAEMAAPLYPLTKPGTLFNWGPDQQKAFQEIKQALLTAPALGLPDLTKPFELFVDEKQGYAKGVLTQKLGPWRRPVAYLSKKLDPVAAGWPPCLRMVAAIAVLTKDAGKLTMGQPLVILAPHAVEALVKQPPDRWLSNARMTHYQALLLDTDRVQFGPVVALNPATLLPLPEEGLQHDCLDILAEAHGTRSDLMDQPLPDADHTWYTDGSSFLQEGQRKAGAAVTTETEVIWARALPAGTSAQRAELIALTQALKMAEGKKLNVYTDSRYAFATAHIHGEIYRRRGWLTSEGKEIKNKDEILALLKALFLPKRLSIIHCPGHQKGNSAEARGNRMADQAAREVATRETPETSTLLAGKRTADGSEFEKRTADGSEFESPKKKAKVE

SEQ ID NO: 2304 - protein, 2103 aa, synthetic construct
MPAAKRVKLDGGDKKYSIGLDIGTNSVGWAVITDEYKVPSKKFKVLGNTDRHSIKKNLIGALLFDSGETAEATRLKRTARRRYTRRKNRICYLQEIFSNEMAKVDDSFFHRLEESFLVEEDKKHERHPIFGNIVDEVAYHEKYPTIYHLRKKLVDSTDKADLRLIYLALAHMIKFRGHFLIEGDLNPDNSDVDKLFIQLVQTYNQLFEENPINASGVDAKAILSARLSKSRRLENLIAQLPGEKKNGLFGNLIALSLGLTPNFKSNFDLAEDAKLQLSKDTYDDDLDNLLAQIGDQYADLFLAAKNLSDAILLSDILRVNTEITKAPLSASMIKRYDEHHQDLTLLKALVRQQLPEKYKEIFFDQSKNGYAGYIDGGASQEEFYKFIKPILEKMDGTEELLVKLNREDLLRKQRTFDNGSIPHQIHLGELHAILRRQEDFYPFLKDNREKIEKILTFRIPYYVGPLARGNSRFAWMTRKSEETITPWNFEEVVDKGASAQSFIERMTNFDKNLPNEKVLPKHSLLYEYFTVYNELTKVKYVTEGMRKPAFLSGEQKKAIVDLLFKTNRKVTVKQLKEDYFKKIECFDSVEISGVEDRFNASLGTYHDLLKIIKDKDFLDNEENEDILEDIVLTLTLFEDREMIEERLKTYAHLFDDKVMKQLKRRRYTGWGRLSRKLINGIRDKQSGKTILDFLKSDGFANRNFMQLIHDDSLTFKEDIQKAQVSGQGDSLHEHIANLAGSPAIKKGILQTVKVVDELVKVMGRHKPENIVIEMARENQTTQKGQKNSRERMKRIEEGIKELGSQILKEHPVENTQLQNEKLYLYYLQNGRDMYVDQELDINRLSDYDVDHIVPQSFLKDDSIDNKVLTRSDKARGKSDNVPSEEVVKKMKNYWRQLLNAKLITQRKFDNLTKAERGGLSELDKAGFIKRQLVETRQITKHVAQILDSRMNTKYDENDKLIREVKVITLKSKLVSDFRKDFQFYKVREINNYHHAHDAYLNAVVGTALIKKYPKLESEFVYGDYKVYDVRKMIAKSEQEIGKATAKYFFYSNIMNFFKTEITLANGEIRKRPLIETNGETGEIVWDKGRDFATVRKVLSMPQVNIVKKTEVQTGGFSKESILPKRNSDKLIARKKDWDPKKYGGFDSPTVAYSVLVVAKVEKGKSKKLKSVKELLGITIMERSSFEKNPIDFLEAKGYKEVKKDLIIKLPKYSLFELENGRKRMLASAGELQKGNELALPSKYVNFLYLASHYEKLKGSPEDNEQKQLFVEQHKHYLDEIIEQISEFSKRVILADANLDKVLSAYNKHRDKPIREQAENIIHLFTLTNLGAPAAFKYFDTTIDRKRYTSTKEVLDATLIHQSITGLYETRIDLSQLGGDGGGSSGSSGSSGSSGSSGSSGGTLNIEDEYRLHETSKEPDVSLGSTWLSDFPQAWAETGGMGLAVRQAPLIIPLKATSTPVSIKQYPMSQEARLGIKPHIQRLLDQGILVPCQSPWNTPLLPVKKPGTNDYRPVQDLREVNKRVEDIHPTVPNPYNLLSGLPPSHQWYTVLDLKDAFFCLRLHPTSQPLFAFEWRDPEMGISGQLTWTRLPQGFKNSPTLFNEALHRDLAGFRIQHPDLILLQYVDDLLLAATSELDCQQGTRALLQTLGDLGYRASAKKAQICQKQVKYLGYLLKEGQRWLTEARKETVMGQPIPKTPRQLREFLGKAGFCRLFIPGFAEMAAPLYPLTKPGTLFNWGPDQQKAFQEIKQALLTAPALGLPDLTKPFELFVDEKQGYAKGVLTQKLGPWRRPVAYLSKKLDPVAAGWPPCLRMVAAIAVLTKDAGKLTMGQPLVILAPHAVEALVKQPPDRWLSNARMTHYQALLLDTDRVQFGPVVALNPATLLPLPEEGLQHDCLDILAEAHGTRSDLMDQPLPDADHTWYTDGSSFLQEGQRKAGAAVTTETEVIWARALPAGTSAQRAELIALTQALKMAEGKKLNVYTDSRYAFATAHIHGEIYRRRGWLTSEGKEIKNKDEILALLKALFLPKRLSIIHCPGHQKGNSAEARGNRMADQAAREVATRETPETSTLLAGKRTADGSEFEKRTADGSEFESPKKKAKVE

SEQ ID NO: 2305 - protein, 2100 aa, synthetic construct
MPAAKRVKLDGGDKKYSIGLDIGTNSVGWAVITDEYKVPSKKFKVLGNTDRHSIKKNLIGALLFDSGETAEATRLKRTARRRYTRRKNRICYLQEIFSNEMAKVDDSFFHRLEESFLVEEDKKHERHPIFGNIVDEVAYHEKYPTIYHLRKKLVDSTDKADLRLIYLALAHMIKFRGHFLIEGDLNPDNSDVDKLFIQLVQTYNQLFEENPINASGVDAKAILSARLSKSRRLENLIAQLPGEKKNGLFGNLIALSLGLTPNFKSNFDLAEDAKLQLSKDTYDDDLDNLLAQIGDQYADLFLAAKNLSDAILLSDILRVNTEITKAPLSASMIKRYDEHHQDLTLLKALVRQQLPEKYKEIFFDQSKNGYAGYIDGGASQEEFYKFIKPILEKMDGTEELLVKLNREDLLRKQRTFDNGSIPHQIHLGELHAILRRQEDFYPFLKDNREKIEKILTFRIPYYVGPLARGNSRFAWMTRKSEETITPWNFEEVVDKGASAQSFIERMTNFDKNLPNEKVLPKHSLLYEYFTVYNELTKVKYVTEGMRKPAFLSGEQKKAIVDLLFKTNRKVTVKQLKEDYFKKIECFDSVEISGVEDRFNASLGTYHDLLKIIKDKDFLDNEENEDILEDIVLTLTLFEDREMIEERLKTYAHLFDDKVMKQLKRRRYTGWGRLSRKLINGIRDKQSGKTILDFLKSDGFANRNFMQLIHDDSLTFKEDIQKAQVSGQGDSLHEHIANLAGSPAIKKGILQTVKVVDELVKVMGRHKPENIVIEMARENQTTQKGQKNSRERMKRIEEGIKELGSQILKEHPVENTQLQNEKLYLYYLQNGRDMYVDQELDINRLSDYDVDHIVPQSFLKDDSIDNKVLTRSDKARGKSDNVPSEEVVKKMKNYWRQLLNAKLITQRKFDNLTKAERGGLSELDKAGFIKRQLVETRQITKHVAQILDSRMNTKYDENDKLIREVKVITLKSKLVSDFRKDFQFYKVREINNYHHAHDAYLNAVVGTALIKKYPKLESEFVYGDYKVYDVRKMIAKSEQEIGKATAKYFFYSNIMNFFKTEITLANGEIRKRPLIETNGETGEIVWDKGRDFATVRKVLSMPQVNIVKKTEVQTGGFSKESILPKRNSDKLIARKKDWDPKKYGGFDSPTVAYSVLVVAKVEKGKSKKLKSVKELLGITIMERSSFEKNPIDFLEAKGYKEVKKDLIIKLPKYSLFELENGRKRMLASAGELQKGNELALPSKYVNFLYLASHYEKLKGSPEDNEQKQLFVEQHKHYLDEIIEQISEFSKRVILADANLDKVLSAYNKHRDKPIREQAENIIHLFTLTNLGAPAAFKYFDTTIDRKRYTSTKEVLDATLIHQSITGLYETRIDLSQLGGDGGEAAAKGGGGSEAAAKGGTLNIEDEYRLHETSKEPDVSLGSTWLSDFPQAWAETGGMGLAVRQAPLIIPLKATSTPVSIKQYPMSQEARLGIKPHIQRLLDQGILVPCQSPWNTPLLPVKKPGTNDYRPVQDLREVNKRVEDIHPTVPNPYNLLSGLPPSHQWYTVLDLKDAFFCLRLHPTSQPLFAFEWRDPEMGISGQLTWTRLPQGFKNSPTLFNEALHRDLAGFRIQHPDLILLQYVDDLLLAATSELDCQQGTRALLQTLGDLGYRASAKKAQICQKQVKYLGYLLKEGQRWLTEARKETVMGQPIPKTPRQLREFLGKAGFCRLFIPGFAEMAAPLYPLTKPGTLFNWGPDQQKAFQEIKQALLTAPALGLPDLTKPFELFVDEKQGYAKGVLTQKLGPWRRPVAYLSKKLDPVAAGWPPCLRMVAAIAVLTKDAGKLTMGQPLVILAPHAVEALVKQPPDRWLSNARMTHYQALLLDTDRVQFGPVVALNPATLLPLPEEGLQHDCLDILAEAHGTRSDLMDQPLPDADHTWYTDGSSFLQEGQRKAGAAVTTETEVIWARALPAGTSAQRAELIALTQALKMAEGKKLNVYTDSRYAFATAHIHGEIYRRRGWLTSEGKEIKNKDEILALLKALFLPKRLSIIHCPGHQKGNSAEARGNRMADQAAREVATRETPETSTLLAGKRTADGSEFEKRTADGSEFESPKKKAKVE

SEQ ID NO: 2306 - protein, 2096 aa, synthetic construct
MPAAKRVKLDGGDKKYSIGLDIGTNSVGWAVITDEYKVPSKKFKVLGNTDRHSIKKNLIGALLFDSGETAEATRLKRTARRRYTRRKNRICYLQEIFSNEMAKVDDSFFHRLEESFLVEEDKKHERHPIFGNIVDEVAYHEKYPTIYHLRKKLVDSTDKADLRLIYLALAHMIKFRGHFLIEGDLNPDNSDVDKLFIQLVQTYNQLFEENPINASGVDAKAILSARLSKSRRLENLIAQLPGEKKNGLFGNLIALSLGLTPNFKSNFDLAEDAKLQLSKDTYDDDLDNLLAQIGDQYADLFLAAKNLSDAILLSDILRVNTEITKAPLSASMIKRYDEHHQDLTLLKALVRQQLPEKYKEIFFDQSKNGYAGYIDGGASQEEFYKFIKPILEKMDGTEELLVKLNREDLLRKQRTFDNGSIPHQIHLGELHAILRRQEDFYPFLKDNREKIEKILTFRIPYYVGPLARGNSRFAWMTRKSEETITPWNFEEVVDKGASAQSFIERMTNFDKNLPNEKVLPKHSLLYEYFTVYNELTKVKYVTEGMRKPAFLSGEQKKAIVDLLFKTNRKVTVKQLKEDYFKKIECFDSVEISGVEDRFNASLGTYHDLLKIIKDKDFLDNEENEDILEDIVLTLTLFEDREMIEERLKTYAHLFDDKVMKQLKRRRYTGWGRLSRKLINGIRDKQSGKTILDFLKSDGFANRNFMQLIHDDSLTFKEDIQKAQVSGQGDSLHEHIANLAGSPAIKKGILQTVKVVDELVKVMGRHKPENIVIEMARENQTTQKGQKNSRERMKRIEEGIKELGSQILKEHPVENTQLQNEKLYLYYLQNGRDMYVDQELDINRLSDYDVDHIVPQSFLKDDSIDNKVLTRSDKARGKSDNVPSEEVVKKMKNYWRQLLNAKLITQRKFDNLTKAERGGLSELDKAGFIKRQLVETRQITKHVAQILDSRMNTKYDENDKLIREVKVITLKSKLVSDFRKDFQFYKVREINNYHHAHDAYLNAVVGTALIKKYPKLESEFVYGDYKVYDVRKMIAKSEQEIGKATAKYFFYSNIMNFFKTEITLANGEIRKRPLIETNGETGEIVWDKGRDFATVRKVLSMPQVNIVKKTEVQTGGFSKESILPKRNSDKLIARKKDWDPKKYGGFDSPTVAYSVLVVAKVEKGKSKKLKSVKELLGITIMERSSFEKNPIDFLEAKGYKEVKKDLIIKLPKYSLFELENGRKRMLASAGELQKGNELALPSKYVNFLYLASHYEKLKGSPEDNEQKQLFVEQHKHYLDEIIEQISEFSKRVILADANLDKVLSAYNKHRDKPIREQAENIIHLFTLTNLGAPAAFKYFDTTIDRKRYTSTKEVLDATLIHQSITGLYETRIDLSQLGGDGGGGGEAAAKGGSGGTLNIEDEYRLHETSKEPDVSLGSTWLSDFPQAWAETGGMGLAVRQAPLIIPLKATSTPVSIKQYPMSQEARLGIKPHIQRLLDQGILVPCQSPWNTPLLPVKKPGTNDYRPVQDLREVNKRVEDIHPTVPNPYNLLSGLPPSHQWYTVLDLKDAFFCLRLHPTSQPLFAFEWRDPEMGISGQLTWTRLPQGFKNSPTLFNEALHRDLAGFRIQHPDLILLQYVDDLLLAATSELDCQQGTRALLQTLGDLGYRASAKKAQICQKQVKYLGYLLKEGQRWLTEARKETVMGQPIPKTPRQLREFLGKAGFCRLFIPGFAEMAAPLYPLTKPGTLFNWGPDQQKAFQEIKQALLTAPALGLPDLTKPFELFVDEKQGYAKGVLTQKLGPWRRPVAYLSKKLDPVAAGWPPCLRMVAAIAVLTKDAGKLTMGQPLVILAPHAVEALVKQPPDRWLSNARMTHYQALLLDTDRVQFGPVVALNPATLLPLPEEGLQHDCLDILAEAHGTRSDLMDQPLPDADHTWYTDGSSFLQEGQRKAGAAVTTETEVIWARALPAGTSAQRAELIALTQALKMAEGKKLNVYTDSRYAFATAHIHGEIYRRRGWLTSEGKEIKNKDEILALLKALFLPKRLSIIHCPGHQKGNSAEARGNRMADQAAREVATRETPETSTLLAGKRTADGSEFEKRTADGSEFESPKKKAKVE

SEQ ID NO: 2307 - protein, 2092 aa, synthetic construct
MPAAKRVKLDGGDKKYSIGLDIGTNSVGWAVITDEYKVPSKKFKVLGNTDRHSIKKNLIGALLFDSGETAEATRLKRTARRRYTRRKNRICYLQEIFSNEMAKVDDSFFHRLEESFLVEEDKKHERHPIFGNIVDEVAYHEKYPTIYHLRKKLVDSTDKADLRLIYLALAHMIKFRGHFLIEGDLNPDNSDVDKLFIQLVQTYNQLFEENPINASGVDAKAILSARLSKSRRLENLIAQLPGEKKNGLFGNLIALSLGLTPNFKSNFDLAEDAKLQLSKDTYDDDLDNLLAQIGDQYADLFLAAKNLSDAILLSDILRVNTEITKAPLSASMIKRYDEHHQDLTLLKALVRQQLPEKYKEIFFDQSKNGYAGYIDGGASQEEFYKFIKPILEKMDGTEELLVKLNREDLLRKQRTFDNGSIPHQIHLGELHAILRRQEDFYPFLKDNREKIEKILTFRIPYYVGPLARGNSRFAWMTRKSEETITPWNFEEVVDKGASAQSFIERMTNFDKNLPNEKVLPKHSLLYEYFTVYNELTKVKYVTEGMRKPAFLSGEQKKAIVDLLFKTNRKVTVKQLKEDYFKKIECFDSVEISGVEDRFNASLGTYHDLLKIIKDKDFLDNEENEDILEDIVLTLTLFEDREMIEERLKTYAHLFDDKVMKQLKRRRYTGWGRLSRKLINGIRDKQSGKTILDFLKSDGFANRNFMQLIHDDSLTFKEDIQKAQVSGQGDSLHEHIANLAGSPAIKKGILQTVKVVDELVKVMGRHKPENIVIEMARENQTTQKGQKNSRERMKRIEEGIKELGSQILKEHPVENTQLQNEKLYLYYLQNGRDMYVDQELDINRLSDYDVDHIVPQSFLKDDSIDNKVLTRSDKARGKSDNVPSEEVVKKMKNYWRQLLNAKLITQRKFDNLTKAERGGLSELDKAGFIKRQLVETRQITKHVAQILDSRMNTKYDENDKLIREVKVITLKSKLVSDFRKDFQFYKVREINNYHHAHDAYLNAVVGTALIKKYPKLESEFVYGDYKVYDVRKMIAKSEQEIGKATAKYFFYSNIMNFFKTEITLANGEIRKRPLIETNGETGEIVWDKGRDFATVRKVLSMPQVNIVKKTEVQTGGFSKESILPKRNSDKLIARKKDWDPKKYGGFDSPTVAYSVLVVAKVEKGKSKKLKSVKELLGITIMERSSFEKNPIDFLEAKGYKEVKKDLIIKLPKYSLFELENGRKRMLASAGELQKGNELALPSKYVNFLYLASHYEKLKGSPEDNEQKQLFVEQHKHYLDEIIEQISEFSKRVILADANLDKVLSAYNKHRDKPIREQAENIIHLFTLTNLGAPAAFKYFDTTIDRKRYTSTKEVLDATLIHQSITGLYETRIDLSQLGGDGGGGGGGGGGGTLNIEDEYRLHETSKEPDVSLGSTWLSDFPQAWAETGGMGLAVRQAPLIIPLKATSTPVSIKQYPMSQEARLGIKPHIQRLLDQGILVPCQSPWNTPLLPVKKPGTNDYRPVQDLREVNKRVEDIHPTVPNPYNLLSGLPPSHQWYTVLDLKDAFFCLRLHPTSQPLFAFEWRDPEMGISGQLTWTRLPQGFKNSPTLFNEALHRDLAGFRIQHPDLILLQYVDDLLLAATSELDCQQGTRALLQTLGDLGYRASAKKAQICQKQVKYLGYLLKEGQRWLTEARKETVMGQPIPKTPRQLREFLGKAGFCRLFIPGFAEMAAPLYPLTKPGTLFNWGPDQQKAFQEIKQALLTAPALGLPDLTKPFELFVDEKQGYAKGVLTQKLGPWRRPVAYLSKKLDPVAAGWPPCLRMVAAIAVLTKDAGKLTMGQPLVILAPHAVEALVKQPPDRWLSNARMTHYQALLLDTDRVQFGPVVALNPATLLPLPEEGLQHDCLDILAEAHGTRSDLMDQPLPDADHTWYTDGSSFLQEGQRKAGAAVTTETEVIWARALPAGTSAQRAELIALTQALKMAEGKKLNVYTDSRYAFATAHIHGEIYRRRGWLTSEGKEIKNKDEILALLKALFLPKRLSIIHCPGHQKGNSAEARGNRMADQAAREVATRETPETSTLLAGKRTADGSEFEKRTADGSEFESPKKKAKVE

SEQ ID NO: 2308 - protein, 2094 aa, synthetic construct
MPAAKRVKLDGGDKKYSIGLDIGTNSVGWAVITDEYKVPSKKFKVLGNTDRHSIKKNLIGALLFDSGETAEATRLKRTARRRYTRRKNRICYLQEIFSNEMAKVDDSFFHRLEESFLVEEDKKHERHPIFGNIVDEVAYHEKYPTIYHLRKKLVDSTDKADLRLIYLALAHMIKFRGHFLIEGDLNPDNSDVDKLFIQLVQTYNQLFEENPINASGVDAKAILSARLSKSRRLENLIAQLPGEKKNGLFGNLIALSLGLTPNFKSNFDLAEDAKLQLSKDTYDDDLDNLLAQIGDQYADLFLAAKNLSDAILLSDILRVNTEITKAPLSASMIKRYDEHHQDLTLLKALVRQQLPEKYKEIFFDQSKNGYAGYIDGGASQEEFYKFIKPILEKMDGTEELLVKLNREDLLRKQRTFDNGSIPHQIHLGELHAILRRQEDFYPFLKDNREKIEKILTFRIPYYVGPLARGNSRFAWMTRKSEETITPWNFEEVVDKGASAQSFIERMTNFDKNLPNEKVLPKHSLLYEYFTVYNELTKVKYVTEGMRKPAFLSGEQKKAIVDLLFKTNRKVTVKQLKEDYFKKIECFDSVEISGVEDRFNASLGTYHDLLKIIKDKDFLDNEENEDILEDIVLTLTLFEDREMIEERLKTYAHLFDDKVMKQLKRRRYTGWGRLSRKLINGIRDKQSGKTILDFLKSDGFANRNFMQLIHDDSLTFKEDIQKAQVSGQGDSLHEHIANLAGSPAIKKGILQTVKVVDELVKVMGRHKPENIVIEMARENQTTQKGQKNSRERMKRIEEGIKELGSQILKEHPVENTQLQNEKLYLYYLQNGRDMYVDQELDINRLSDYDVDHIVPQSFLKDDSIDNKVLTRSDKARGKSDNVPSEEVVKKMKNYWRQLLNAKLITQRKFDNLTKAERGGLSELDKAGFIKRQLVETRQITKHVAQILDSRMNTKYDENDKLIREVKVITLKSKLVSDFRKDFQFYKVREINNYHHAHDAYLNAVVGTALIKKYPKLESEFVYGDYKVYDVRKMIAKSEQEIGKATAKYFFYSNIMNFFKTEITLANGEIRKRPLIETNGETGEIVWDKGRDFATVRKVLSMPQVNIVKKTEVQTGGFSKESILPKRNSDKLIARKKDWDPKKYGGFDSPTVAYSVLVVAKVEKGKSKKLKSVKELLGITIMERSSFEKNPIDFLEAKGYKEVKKDLIIKLPKYSLFELENGRKRMLASAGELQKGNELALPSKYVNFLYLASHYEKLKGSPEDNEQKQLFVEQHKHYLDEIIEQISEFSKRVILADANLDKVLSAYNKHRDKPIREQAENIIHLFTLTNLGAPAAFKYFDTTIDRKRYTSTKEVLDATLIHQSITGLYETRIDLSQLGGDGGPAPGGGGSSGGTLNIEDEYRLHETSKEPDVSLGSTWLSDFPQAWAETGGMGLAVRQAPLIIPLKATSTPVSIKQYPMSQEARLGIKPHIQRLLDQGILVPCQSPWNTPLLPVKKPGTNDYRPVQDLREVNKRVEDIHPTVPNPYNLLSGLPPSHQWYTVLDLKDAFFCLRLHPTSQPLFAFEWRDPEMGISGQLTWTRLPQGFKNSPTLFNEALHRDLAGFRIQHPDLILLQYVDDLLLAATSELDCQQGTRALLQTLGDLGYRASAKKAQICQKQVKYLGYLLKEGQRWLTEARKETVMGQPIPKTPRQLREFLGKAGFCRLFIPGFAEMAAPLYPLTKPGTLFNWGPDQQKAFQEIKQALLTAPALGLPDLTKPFELFVDEKQGYAKGVLTQKLGPWRRPVAYLSKKLDPVAAGWPPCLRMVAAIAVLTKDAGKLTMGQPLVILAPHAVEALVKQPPDRWLSNARMTHYQALLLDTDRVQFGPVVALNPATLLPLPEEGLQHDCLDILAEAHGTRSDLMDQPLPDADHTWYTDGSSFLQEGQRKAGAAVTTETEVIWARALPAGTSAQRAELIALTQALKMAEGKKLNVYTDSRYAFATAHIHGEIYRRRGWLTSEGKEIKNKDEILALLKALFLPKRLSIIHCPGHQKGNSAEARGNRMADQAAREVATRETPETSTLLAGKRTADGSEFEKRTADGSEFESPKKKAKVE

SEQ ID NO: 2309 - protein, 2098 aa, synthetic construct
MPAAKRVKLDGGDKKYSIGLDIGTNSVGWAVITDEYKVPSKKFKVLGNTDRHSIKKNLIGALLFDSGETAEATRLKRTARRRYTRRKNRICYLQEIFSNEMAKVDDSFFHRLEESFLVEEDKKHERHPIFGNIVDEVAYHEKYPTIYHLRKKLVDSTDKADLRLIYLALAHMIKFRGHFLIEGDLNPDNSDVDKLFIQLVQTYNQLFEENPINASGVDAKAILSARLSKSRRLENLIAQLPGEKKNGLFGNLIALSLGLTPNFKSNFDLAEDAKLQLSKDTYDDDLDNLLAQIGDQYADLFLAAKNLSDAILLSDILRVNTEITKAPLSASMIKRYDEHHQDLTLLKALVRQQLPEKYKEIFFDQSKNGYAGYIDGGASQEEFYKFIKPILEKMDGTEELLVKLNREDLLRKQRTFDNGSIPHQIHLGELHAILRRQEDFYPFLKDNREKIEKILTFRIPYYVGPLARGNSRFAWMTRKSEETITPWNFEEVVDKGASAQSFIERMTNFDKNLPNEKVLPKHSLLYEYFTVYNELTKVKYVTEGMRKPAFLSGEQKKAIVDLLFKTNRKVTVKQLKEDYFKKIECFDSVEISGVEDRFNASLGTYHDLLKIIKDKDFLDNEENEDILEDIVLTLTLFEDREMIEERLKTYAHLFDDKVMKQLKRRRYTGWGRLSRKLINGIRDKQSGKTILDFLKSDGFANRNFMQLIHDDSLTFKEDIQKAQVSGQGDSLHEHIANLAGSPAIKKGILQTVKVVDELVKVMGRHKPENIVIEMARENQTTQKGQKNSRERMKRIEEGIKELGSQILKEHPVENTQLQNEKLYLYYLQNGRDMYVDQELDINRLSDYDVDHIVPQSFLKDDSIDNKVLTRSDKARGKSDNVPSEEVVKKMKNYWRQLLNAKLITQRKFDNLTKAERGGLSELDKAGFIKRQLVETRQITKHVAQILDSRMNTKYDENDKLIREVKVITLKSKLVSDFRKDFQFYKVREINNYHHAHDAYLNAVVGTALIKKYPKLESEFVYGDYKVYDVRKMIAKSEQEIGKATAKYFFYSNIMNFFKTEITLANGEIRKRPLIETNGETGEIVWDKGRDFATVRKVLSMPQVNIVKKTEVQTGGFSKESILPKRNSDKLIARKKDWDPKKYGGFDSPTVAYSVLVVAKVEKGKSKKLKSVKELLGITIMERSSFEKNPIDFLEAKGYKEVKKDLIIKLPKYSLFELENGRKRMLASAGELQKGNELALPSKYVNFLYLASHYEKLKGSPEDNEQKQLFVEQHKHYLDEIIEQISEFSKRVILADANLDKVLSAYNKHRDKPIREQAENIIHLFTLTNLGAPAAFKYFDTTIDRKRYTSTKEVLDATLIHQSITGLYETRIDLSQLGGDGGPAPAPAPAPAPAPGGTLNIEDEYRLHETSKEPDVSLGSTWLSDFPQAWAETGGMGLAVRQAPLIIPLKATSTPVSIKQYPMSQEARLGIKPHIQRLLDQGILVPCQSPWNTPLLPVKKPGTNDYRPVQDLREVNKRVEDIHPTVPNPYNLLSGLPPSHQWYTVLDLKDAFFCLRLHPTSQPLFAFEWRDPEMGISGQLTWTRLPQGFKNSPTLFNEALHRDLAGFRIQHPDLILLQYVDDLLLAATSELDCQQGTRALLQTLGDLGYRASAKKAQICQKQVKYLGYLLKEGQRWLTEARKETVMGQPIPKTPRQLREFLGKAGFCRLFIPGFAEMAAPLYPLTKPGTLFNWGPDQQKAFQEIKQALLTAPALGLPDLTKPFELFVDEKQGYAKGVLTQKLGPWRRPVAYLSKKLDPVAAGWPPCLRMVAAIAVLTKDAGKLTMGQPLVILAPHAVEALVKQPPDRWLSNARMTHYQALLLDTDRVQFGPVVALNPATLLPLPEEGLQHDCLDILAEAHGTRSDLMDQPLPDADHTWYTDGSSFLQEGQRKAGAAVTTETEVIWARALPAGTSAQRAELIALTQALKMAEGKKLNVYTDSRYAFATAHIHGEIYRRRGWLTSEGKEIKNKDEILALLKALFLPKRLSIIHCPGHQKGNSAEARGNRMADQAAREVATRETPETSTLLAGKRTADGSEFEKRTADGSEFESPKKKAKVE

SEQ ID NO: 2310 - protein, 2100 aa, synthetic construct
MPAAKRVKLDGGDKKYSIGLDIGTNSVGWAVITDEYKVPSKKFKVLGNTDRHSIKKNLIGALLFDSGETAEATRLKRTARRRYTRRKNRICYLQEIFSNEMAKVDDSFFHRLEESFLVEEDKKHERHPIFGNIVDEVAYHEKYPTIYHLRKKLVDSTDKADLRLIYLALAHMIKFRGHFLIEGDLNPDNSDVDKLFIQLVQTYNQLFEENPINASGVDAKAILSARLSKSRRLENLIAQLPGEKKNGLFGNLIALSLGLTPNFKSNFDLAEDAKLQLSKDTYDDDLDNLLAQIGDQYADLFLAAKNLSDAILLSDILRVNTEITKAPLSASMIKRYDEHHQDLTLLKALVRQQLPEKYKEIFFDQSKNGYAGYIDGGASQEEFYKFIKPILEKMDGTEELLVKLNREDLLRKQRTFDNGSIPHQIHLGELHAILRRQEDFYPFLKDNREKIEKILTFRIPYYVGPLARGNSRFAWMTRKSEETITPWNFEEVVDKGASAQSFIERMTNFDKNLPNEKVLPKHSLLYEYFTVYNELTKVKYVTEGMRKPAFLSGEQKKAIVDLLFKTNRKVTVKQLKEDYFKKIECFDSVEISGVEDRFNASLGTYHDLLKIIKDKDFLDNEENEDILEDIVLTLTLFEDREMIEERLKTYAHLFDDKVMKQLKRRRYTGWGRLSRKLINGIRDKQSGKTILDFLKSDGFANRNFMQLIHDDSLTFKEDIQKAQVSGQGDSLHEHIANLAGSPAIKKGILQTVKVVDELVKVMGRHKPENIVIEMARENQTTQKGQKNSRERMKRIEEGIKELGSQILKEHPVENTQLQNEKLYLYYLQNGRDMYVDQELDINRLSDYDVDHIVPQSFLKDDSIDNKVLTRSDKARGKSDNVPSEEVVKKMKNYWRQLLNAKLITQRKFDNLTKAERGGLSELDKAGFIKRQLVETRQITKHVAQILDSRMNTKYDENDKLIREVKVITLKSKLVSDFRKDFQFYKVREINNYHHAHDAYLNAVVGTALIKKYPKLESEFVYGDYKVYDVRKMIAKSEQEIGKATAKYFFYSNIMNFFKTEITLANGEIRKRPLIETNGETGEIVWDKGRDFATVRKVLSMPQVNIVKKTEVQTGGFSKESILPKRNSDKLIARKKDWDPKKYGGFDSPTVAYSVLVVAKVEKGKSKKLKSVKELLGITIMERSSFEKNPIDFLEAKGYKEVKKDLIIKLPKYSLFELENGRKRMLASAGELQKGNELALPSKYVNFLYLASHYEKLKGSPEDNEQKQLFVEQHKHYLDEIIEQISEFSKRVILADANLDKVLSAYNKHRDKPIREQAENIIHLFTLTNLGAPAAFKYFDTTIDRKRYTSTKEVLDATLIHQSITGLYETRIDLSQLGGDGGGGSGGSGGSGGSGGSGGTLNIEDEYRLHETSKEPDVSLGSTWLSDFPQAWAETGGMGLAVRQAPLIIPLKATSTPVSIKQYPMSQEARLGIKPHIQRLLDQGILVPCQSPWNTPLLPVKKPGTNDYRPVQDLREVNKRVEDIHPTVPNPYNLLSGLPPSHQWYTVLDLKDAFFCLRLHPTSQPLFAFEWRDPEMGISGQLTWTRLPQGFKNSPTLFNEALHRDLAGFRIQHPDLILLQYVDDLLLAATSELDCQQGTRALLQTLGDLGYRASAKKAQICQKQVKYLGYLLKEGQRWLTEARKETVMGQPIPKTPRQLREFLGKAGFCRLFIPGFAEMAAPLYPLTKPGTLFNWGPDQQKAFQEIKQALLTAPALGLPDLTKPFELFVDEKQGYAKGVLTQKLGPWRRPVAYLSKKLDPVAAGWPPCLRMVAAIAVLTKDAGKLTMGQPLVILAPHAVEALVKQPPDRWLSNARMTHYQALLLDTDRVQFGPVVALNPATLLPLPEEGLQHDCLDILAEAHGTRSDLMDQPLPDADHTWYTDGSSFLQEGQRKAGAAVTTETEVIWARALPAGTSAQRAELIALTQALKMAEGKKLNVYTDSRYAFATAHIHGEIYRRRGWLTSEGKEIKNKDEILALLKALFLPKRLSIIHCPGHQKGNSAEARGNRMADQAAREVATRETPETSTLLAGKRTADGSEFEKRTADGSEFESPKKKAKVE

SEQ ID NO: 2311 - protein, 2105 aa, synthetic construct
MPAAKRVKLDGGDKKYSIGLDIGTNSVGWAVITDEYKVPSKKFKVLGNTDRHSIKKNLIGALLFDSGETAEATRLKRTARRRYTRRKNRICYLQEIFSNEMAKVDDSFFHRLEESFLVEEDKKHERHPIFGNIVDEVAYHEKYPTIYHLRKKLVDSTDKADLRLIYLALAHMIKFRGHFLIEGDLNPDNSDVDKLFIQLVQTYNQLFEENPINASGVDAKAILSARLSKSRRLENLIAQLPGEKKNGLFGNLIALSLGLTPNFKSNFDLAEDAKLQLSKDTYDDDLDNLLAQIGDQYADLFLAAKNLSDAILLSDILRVNTEITKAPLSASMIKRYDEHHQDLTLLKALVRQQLPEKYKEIFFDQSKNGYAGYIDGGASQEEFYKFIKPILEKMDGTEELLVKLNREDLLRKQRTFDNGSIPHQIHLGELHAILRRQEDFYPFLKDNREKIEKILTFRIPYYVGPLARGNSRFAWMTRKSEETITPWNFEEVVDKGASAQSFIERMTNFDKNLPNEKVLPKHSLLYEYFTVYNELTKVKYVTEGMRKPAFLSGEQKKAIVDLLFKTNRKVTVKQLKEDYFKKIECFDSVEISGVEDRFNASLGTYHDLLKIIKDKDFLDNEENEDILEDIVLTLTLFEDREMIEERLKTYAHLFDDKVMKQLKRRRYTGWGRLSRKLINGIRDKQSGKTILDFLKSDGFANRNFMQLIHDDSLTFKEDIQKAQVSGQGDSLHEHIANLAGSPAIKKGILQTVKVVDELVKVMGRHKPENIVIEMARENQTTQKGQKNSRERMKRIEEGIKELGSQILKEHPVENTQLQNEKLYLYYLQNGRDMYVDQELDINRLSDYDVDHIVPQSFLKDDSIDNKVLTRSDKARGKSDNVPSEEVVKKMKNYWRQLLNAKLITQRKFDNLTKAERGGLSELDKAGFIKRQLVETRQITKHVAQILDSRMNTKYDENDKLIREVKVITLKSKLVSDFRKDFQFYKVREINNYHHAHDAYLNAVVGTALIKKYPKLESEFVYGDYKVYDVRKMIAKSEQEIGKATAKYFFYSNIMNFFKTEITLANGEIRKRPLIETNGETGEIVWDKGRDFATVRKVLSMPQVNIVKKTEVQTGGFSKESILPKRNSDKLIARKKDWDPKKYGGFDSPTVAYSVLVVAKVEKGKSKKLKSVKELLGITIMERSSFEKNPIDFLEAKGYKEVKKDLIIKLPKYSLFELENGRKRMLASAGELQKGNELALPSKYVNFLYLASHYEKLKGSPEDNEQKQLFVEQHKHYLDEIIEQISEFSKRVILADANLDKVLSAYNKHRDKPIREQAENIIHLFTLTNLGAPAAFKYFDTTIDRKRYTSTKEVLDATLIHQSITGLYETRIDLSQLGGDGGGGGGSGGGGSGGGGSGGGGSGGTLNIEDEYRLHETSKEPDVSLGSTWLSDFPQAWAETGGMGLAVRQAPLIIPLKATSTPVSIKQYPMSQEARLGIKPHIQRLLDQGILVPCQSPWNTPLLPVKKPGTNDYRPVQDLREVNKRVEDIHPTVPNPYNLLSGLPPSHQWYTVLDLKDAFFCLRLHPTSQPLFAFEWRDPEMGISGQLTWTRLPQGFKNSPTLFNEALHRDLAGFRIQHPDLILLQYVDDLLLAATSELDCQQGTRALLQTLGDLGYRASAKKAQICQKQVKYLGYLLKEGQRWLTEARKETVMGQPIPKTPRQLREFLGKAGFCRLFIPGFAEMAAPLYPLTKPGTLFNWGPDQQKAFQEIKQALLTAPALGLPDLTKPFELFVDEKQGYAKGVLTQKLGPWRRPVAYLSKKLDPVAAGWPPCLRMVAAIAVLTKDAGKLTMGQPLVILAPHAVEALVKQPPDRWLSNARMTHYQALLLDTDRVQFGPVVALNPATLLPLPEEGLQHDCLDILAEAHGTRSDLMDQPLPDADHTWYTDGSSFLQEGQRKAGAAVTTETEVIWARALPAGTSAQRAELIALTQALKMAEGKKLNVYTDSRYAFATAHIHGEIYRRRGWLTSEGKEIKNKDEILALLKALFLPKRLSIIHCPGHQKGNSAEARGNRMADQAAREVATRETPETSTLLAGKRTADGSEFEKRTADGSEFESPKKKAKVE

SEQ ID NO: 2312 - protein, 2094 aa, synthetic construct
MPAAKRVKLDGGDKKYSIGLDIGTNSVGWAVITDEYKVPSKKFKVLGNTDRHSIKKNLIGALLFDSGETAEATRLKRTARRRYTRRKNRICYLQEIFSNEMAKVDDSFFHRLEESFLVEEDKKHERHPIFGNIVDEVAYHEKYPTIYHLRKKLVDSTDKADLRLIYLALAHMIKFRGHFLIEGDLNPDNSDVDKLFIQLVQTYNQLFEENPINASGVDAKAILSARLSKSRRLENLIAQLPGEKKNGLFGNLIALSLGLTPNFKSNFDLAEDAKLQLSKDTYDDDLDNLLAQIGDQYADLFLAAKNLSDAILLSDILRVNTEITKAPLSASMIKRYDEHHQDLTLLKALVRQQLPEKYKEIFFDQSKNGYAGYIDGGASQEEFYKFIKPILEKMDGTEELLVKLNREDLLRKQRTFDNGSIPHQIHLGELHAILRRQEDFYPFLKDNREKIEKILTFRIPYYVGPLARGNSRFAWMTRKSEETITPWNFEEVVDKGASAQSFIERMTNFDKNLPNEKVLPKHSLLYEYFTVYNELTKVKYVTEGMRKPAFLSGEQKKAIVDLLFKTNRKVTVKQLKEDYFKKIECFDSVEISGVEDRFNASLGTYHDLLKIIKDKDFLDNEENEDILEDIVLTLTLFEDREMIEERLKTYAHLFDDKVMKQLKRRRYTGWGRLSRKLINGIRDKQSGKTILDFLKSDGFANRNFMQLIHDDSLTFKEDIQKAQVSGQGDSLHEHIANLAGSPAIKKGILQTVKVVDELVKVMGRHKPENIVIEMARENQTTQKGQKNSRERMKRIEEGIKELGSQILKEHPVENTQLQNEKLYLYYLQNGRDMYVDQELDINRLSDYDVDHIVPQSFLKDDSIDNKVLTRSDKARGKSDNVPSEEVVKKMKNYWRQLLNAKLITQRKFDNLTKAERGGLSELDKAGFIKRQLVETRQITKHVAQILDSRMNTKYDENDKLIREVKVITLKSKLVSDFRKDFQFYKVREINNYHHAHDAYLNAVVGTALIKKYPKLESEFVYGDYKVYDVRKMIAKSEQEIGKATAKYFFYSNIMNFFKTEITLANGEIRKRPLIETNGETGEIVWDKGRDFATVRKVLSMPQVNIVKKTEVQTGGFSKESILPKRNSDKLIARKKDWDPKKYGGFDSPTVAYSVLVVAKVEKGKSKKLKSVKELLGITIMERSSFEKNPIDFLEAKGYKEVKKDLIIKLPKYSLFELENGRKRMLASAGELQKGNELALPSKYVNFLYLASHYEKLKGSPEDNEQKQLFVEQHKHYLDEIIEQISEFSKRVILADANLDKVLSAYNKHRDKPIREQAENIIHLFTLTNLGAPAAFKYFDTTIDRKRYTSTKEVLDATLIHQSITGLYETRIDLSQLGGDGGGGGGGSGSSGGTLNIEDEYRLHETSKEPDVSLGSTWLSDFPQAWAETGGMGLAVRQAPLIIPLKATSTPVSIKQYPMSQEARLGIKPHIQRLLDQGILVPCQSPWNTPLLPVKKPGTNDYRPVQDLREVNKRVEDIHPTVPNPYNLLSGLPPSHQWYTVLDLKDAFFCLRLHPTSQPLFAFEWRDPEMGISGQLTWTRLPQGFKNSPTLFNEALHRDLAGFRIQHPDLILLQYVDDLLLAATSELDCQQGTRALLQTLGDLGYRASAKKAQICQKQVKYLGYLLKEGQRWLTEARKETVMGQPIPKTPRQLREFLGKAGFCRLFIPGFAEMAAPLYPLTKPGTLFNWGPDQQKAFQEIKQALLTAPALGLPDLTKPFELFVDEKQGYAKGVLTQKLGPWRRPVAYLSKKLDPVAAGWPPCLRMVAAIAVLTKDAGKLTMGQPLVILAPHAVEALVKQPPDRWLSNARMTHYQALLLDTDRVQFGPVVALNPATLLPLPEEGLQHDCLDILAEAHGTRSDLMDQPLPDADHTWYTDGSSFLQEGQRKAGAAVTTETEVIWARALPAGTSAQRAELIALTQALKMAEGKKLNVYTDSRYAFATAHIHGEIYRRRGWLTSEGKEIKNKDEILALLKALFLPKRLSIIHCPGHQKGNSAEARGNRMADQAAREVATRETPETSTLLAGKRTADGSEFEKRTADGSEFESPKKKAKVE

SEQ ID NO: 2313 - protein, 2097 aa, synthetic construct
MPAAKRVKLDGGDKKYSIGLDIGTNSVGWAVITDEYKVPSKKFKVLGNTDRHSIKKNLIGALLFDSGETAEATRLKRTARRRYTRRKNRICYLQEIFSNEMAKVDDSFFHRLEESFLVEEDKKHERHPIFGNIVDEVAYHEKYPTIYHLRKKLVDSTDKADLRLIYLALAHMIKFRGHFLIEGDLNPDNSDVDKLFIQLVQTYNQLFEENPINASGVDAKAILSARLSKSRRLENLIAQLPGEKKNGLFGNLIALSLGLTPNFKSNFDLAEDAKLQLSKDTYDDDLDNLLAQIGDQYADLFLAAKNLSDAILLSDILRVNTEITKAPLSASMIKRYDEHHQDLTLLKALVRQQLPEKYKEIFFDQSKNGYAGYIDGGASQEEFYKFIKPILEKMDGTEELLVKLNREDLLRKQRTFDNGSIPHQIHLGELHAILRRQEDFYPFLKDNREKIEKILTFRIPYYVGPLARGNSRFAWMTRKSEETITPWNFEEVVDKGASAQSFIERMTNFDKNLPNEKVLPKHSLLYEYFTVYNELTKVKYVTEGMRKPAFLSGEQKKAIVDLLFKTNRKVTVKQLKEDYFKKIECFDSVEISGVEDRFNASLGTYHDLLKIIKDKDFLDNEENEDILEDIVLTLTLFEDREMIEERLKTYAHLFDDKVMKQLKRRRYTGWGRLSRKLINGIRDKQSGKTILDFLKSDGFANRNFMQLIHDDSLTFKEDIQKAQVSGQGDSLHEHIANLAGSPAIKKGILQTVKVVDELVKVMGRHKPENIVIEMARENQTTQKGQKNSRERMKRIEEGIKELGSQILKEHPVENTQLQNEKLYLYYLQNGRDMYVDQELDINRLSDYDVDHIVPQSFLKDDSIDNKVLTRSDKARGKSDNVPSEEVVKKMKNYWRQLLNAKLITQRKFDNLTKAERGGLSELDKAGFIKRQLVETRQITKHVAQILDSRMNTKYDENDKLIREVKVITLKSKLVSDFRKDFQFYKVREINNYHHAHDAYLNAVVGTALIKKYPKLESEFVYGDYKVYDVRKMIAKSEQEIGKATAKYFFYSNIMNFFKTEITLANGEIRKRPLIETNGETGEIVWDKGRDFATVRKVLSMPQVNIVKKTEVQTGGFSKESILPKRNSDKLIARKKDWDPKKYGGFDSPTVAYSVLVVAKVEKGKSKKLKSVKELLGITIMERSSFEKNPIDFLEAKGYKEVKKDLIIKLPKYSLFELENGRKRMLASAGELQKGNELALPSKYVNFLYLASHYEKLKGSPEDNEQKQLFVEQHKHYLDEIIEQISEFSKRVILADANLDKVLSAYNKHRDKPIREQAENIIHLFTLTNLGAPAAFKYFDTTIDRKRYTSTKEVLDATLIHQSITGLYETRIDLSQLGGDGGGSAGSAAGSGEFGGTLNIEDEYRLHETSKEPDVSLGSTWLSDFPQAWAETGGMGLAVRQAPLIIPLKATSTPVSIKQYPMSQEARLGIKPHIQRLLDQGILVPCQSPWNTPLLPVKKPGTNDYRPVQDLREVNKRVEDIHPTVPNPYNLLSGLPPSHQWYTVLDLKDAFFCLRLHPTSQPLFAFEWRDPEMGISGQLTWTRLPQGFKNSPTLFNEALHRDLAGFRIQHPDLILLQYVDDLLLAATSELDCQQGTRALLQTLGDLGYRASAKKAQICQKQVKYLGYLLKEGQRWLTEARKETVMGQPIPKTPRQLREFLGKAGFCRLFIPGFAEMAAPLYPLTKPGTLFNWGPDQQKAFQEIKQALLTAPALGLPDLTKPFELFVDEKQGYAKGVLTQKLGPWRRPVAYLSKKLDPVAAGWPPCLRMVAAIAVLTKDAGKLTMGQPLVILAPHAVEALVKQPPDRWLSNARMTHYQALLLDTDRVQFGPVVALNPATLLPLPEEGLQHDCLDILAEAHGTRSDLMDQPLPDADHTWYTDGSSFLQEGQRKAGAAVTTETEVIWARALPAGTSAQRAELIALTQALKMAEGKKLNVYTDSRYAFATAHIHGEIYRRRGWLTSEGKEIKNKDEILALLKALFLPKRLSIIHCPGHQKGNSAEARGNRMADQAAREVATRETPETSTLLAGKRTADGSEFEKRTADGSEFESPKKKAKVE

SEQ ID NO: 2314 - protein, 2096 aa, synthetic construct
MPAAKRVKLDGGDKKYSIGLDIGTNSVGWAVITDEYKVPSKKFKVLGNTDRHSIKKNLIGALLFDSGETAEATRLKRTARRRYTRRKNRICYLQEIFSNEMAKVDDSFFHRLEESFLVEEDKKHERHPIFGNIVDEVAYHEKYPTIYHLRKKLVDSTDKADLRLIYLALAHMIKFRGHFLIEGDLNPDNSDVDKLFIQLVQTYNQLFEENPINASGVDAKAILSARLSKSRRLENLIAQLPGEKKNGLFGNLIALSLGLTPNFKSNFDLAEDAKLQLSKDTYDDDLDNLLAQIGDQYADLFLAAKNLSDAILLSDILRVNTEITKAPLSASMIKRYDEHHQDLTLLKALVRQQLPEKYKEIFFDQSKNGYAGYIDGGASQEEFYKFIKPILEKMDGTEELLVKLNREDLLRKQRTFDNGSIPHQIHLGELHAILRRQEDFYPFLKDNREKIEKILTFRIPYYVGPLARGNSRFAWMTRKSEETITPWNFEEVVDKGASAQSFIERMTNFDKNLPNEKVLPKHSLLYEYFTVYNELTKVKYVTEGMRKPAFLSGEQKKAIVDLLFKTNRKVTVKQLKEDYFKKIECFDSVEISGVEDRFNASLGTYHDLLKIIKDKDFLDNEENEDILEDIVLTLTLFEDREMIEERLKTYAHLFDDKVMKQLKRRRYTGWGRLSRKLINGIRDKQSGKTILDFLKSDGFANRNFMQLIHDDSLTFKEDIQKAQVSGQGDSLHEHIANLAGSPAIKKGILQTVKVVDELVKVMGRHKPENIVIEMARENQTTQKGQKNSRERMKRIEEGIKELGSQILKEHPVENTQLQNEKLYLYYLQNGRDMYVDQELDINRLSDYDVDHIVPQSFLKDDSIDNKVLTRSDKARGKSDNVPSEEVVKKMKNYWRQLLNAKLITQRKFDNLTKAERGGLSELDKAGFIKRQLVETRQITKHVAQILDSRMNTKYDENDKLIREVKVITLKSKLVSDFRKDFQFYKVREINNYHHAHDAYLNAVVGTALIKKYPKLESEFVYGDYKVYDVRKMIAKSEQEIGKATAKYFFYSNIMNFFKTEITLANGEIRKRPLIETNGETGEIVWDKGRDFATVRKVLSMPQVNIVKKTEVQTGGFSKESILPKRNSDKLIARKKDWDPKKYGGFDSPTVAYSVLVVAKVEKGKSKKLKSVKELLGITIMERSSFEKNPIDFLEAKGYKEVKKDLIIKLPKYSLFELENGRKRMLASAGELQKGNELALPSKYVNFLYLASHYEKLKGSPEDNEQKQLFVEQHKHYLDEIIEQISEFSKRVILADANLDKVLSAYNKHRDKPIREQAENIIHLFTLTNLGAPAAFKYFDTTIDRKRYTSTKEVLDATLIHQSITGLYETRIDLSQLGGDGGPAPEAAAKGGSGGTLNIEDEYRLHETSKEPDVSLGSTWLSDFPQAWAETGGMGLAVRQAPLIIPLKATSTPVSIKQYPMSQEARLGIKPHIQRLLDQGILVPCQSPWNTPLLPVKKPGTNDYRPVQDLREVNKRVEDIHPTVPNPYNLLSGLPPSHQWYTVLDLKDAFFCLRLHPTSQPLFAFEWRDPEMGISGQLTWTRLPQGFKNSPTLFNEALHRDLAGFRIQHPDLILLQYVDDLLLAATSELDCQQGTRALLQTLGDLGYRASAKKAQICQKQVKYLGYLLKEGQRWLTEARKETVMGQPIPKTPRQLREFLGKAGFCRLFIPGFAEMAAPLYPLTKPGTLFNWGPDQQKAFQEIKQALLTAPALGLPDLTKPFELFVDEKQGYAKGVLTQKLGPWRRPVAYLSKKLDPVAAGWPPCLRMVAAIAVLTKDAGKLTMGQPLVILAPHAVEALVKQPPDRWLSNARMTHYQALLLDTDRVQFGPVVALNPATLLPLPEEGLQHDCLDILAEAHGTRSDLMDQPLPDADHTWYTDGSSFLQEGQRKAGAAVTTETEVIWARALPAGTSAQRAELIALTQALKMAEGKKLNVYTDSRYAFATAHIHGEIYRRRGWLTSEGKEIKNKDEILALLKALFLPKRLSIIHCPGHQKGNSAEARGNRMADQAAREVATRETPETSTLLAGKRTADGSEFEKRTADGSEFESPKKKAKVE

SEQ ID NO: 2315 - protein, 2096 aa, synthetic construct
MPAAKRVKLDGGDKKYSIGLDIGTNSVGWAVITDEYKVPSKKFKVLGNTDRHSIKKNLIGALLFDSGETAEATRLKRTARRRYTRRKNRICYLQEIFSNEMAKVDDSFFHRLEESFLVEEDKKHERHPIFGNIVDEVAYHEKYPTIYHLRKKLVDSTDKADLRLIYLALAHMIKFRGHFLIEGDLNPDNSDVDKLFIQLVQTYNQLFEENPINASGVDAKAILSARLSKSRRLENLIAQLPGEKKNGLFGNLIALSLGLTPNFKSNFDLAEDAKLQLSKDTYDDDLDNLLAQIGDQYADLFLAAKNLSDAILLSDILRVNTEITKAPLSASMIKRYDEHHQDLTLLKALVRQQLPEKYKEIFFDQSKNGYAGYIDGGASQEEFYKFIKPILEKMDGTEELLVKLNREDLLRKQRTFDNGSIPHQIHLGELHAILRRQEDFYPFLKDNREKIEKILTFRIPYYVGPLARGNSRFAWMTRKSEETITPWNFEEVVDKGASAQSFIERMTNFDKNLPNEKVLPKHSLLYEYFTVYNELTKVKYVTEGMRKPAFLSGEQKKAIVDLLFKTNRKVTVKQLKEDYFKKIECFDSVEISGVEDRFNASLGTYHDLLKIIKDKDFLDNEENEDILEDIVLTLTLFEDREMIEERLKTYAHLFDDKVMKQLKRRRYTGWGRLSRKLINGIRDKQSGKTILDFLKSDGFANRNFMQLIHDDSLTFKEDIQKAQVSGQGDSLHEHIANLAGSPAIKKGILQTVKVVDELVKVMGRHKPENIVIEMARENQTTQKGQKNSRERMKRIEEGIKELGSQILKEHPVENTQLQNEKLYLYYLQNGRDMYVDQELDINRLSDYDVDHIVPQSFLKDDSIDNKVLTRSDKARGKSDNVPSEEVVKKMKNYWRQLLNAKLITQRKFDNLTKAERGGLSELDKAGFIKRQLVETRQITKHVAQILDSRMNTKYDENDKLIREVKVITLKSKLVSDFRKDFQFYKVREINNYHHAHDAYLNAVVGTALIKKYPKLESEFVYGDYKVYDVRKMIAKSEQEIGKATAKYFFYSNIMNFFKTEITLANGEIRKRPLIETNGETGEIVWDKGRDFATVRKVLSMPQVNIVKKTEVQTGGFSKESILPKRNSDKLIARKKDWDPKKYGGFDSPTVAYSVLVVAKVEKGKSKKLKSVKELLGITIMERSSFEKNPIDFLEAKGYKEVKKDLIIKLPKYSLFELENGRKRMLASAGELQKGNELALPSKYVNFLYLASHYEKLKGSPEDNEQKQLFVEQHKHYLDEIIEQISEFSKRVILADANLDKVLSAYNKHRDKPIREQAENIIHLFTLTNLGAPAAFKYFDTTIDRKRYTSTKEVLDATLIHQSITGLYETRIDLSQLGGDGGEAAAKPAPGGSGGTLNIEDEYRLHETSKEPDVSLGSTWLSDFPQAWAETGGMGLAVRQAPLIIPLKATSTPVSIKQYPMSQEARLGIKPHIQRLLDQGILVPCQSPWNTPLLPVKKPGTNDYRPVQDLREVNKRVEDIHPTVPNPYNLLSGLPPSHQWYTVLDLKDAFFCLRLHPTSQPLFAFEWRDPEMGISGQLTWTRLPQGFKNSPTLFNEALHRDLAGFRIQHPDLILLQYVDDLLLAATSELDCQQGTRALLQTLGDLGYRASAKKAQICQKQVKYLGYLLKEGQRWLTEARKETVMGQPIPKTPRQLREFLGKAGFCRLFIPGFAEMAAPLYPLTKPGTLFNWGPDQQKAFQEIKQALLTAPALGLPDLTKPFELFVDEKQGYAKGVLTQKLGPWRRPVAYLSKKLDPVAAGWPPCLRMVAAIAVLTKDAGKLTMGQPLVILAPHAVEALVKQPPDRWLSNARMTHYQALLLDTDRVQFGPVVALNPATLLPLPEEGLQHDCLDILAEAHGTRSDLMDQPLPDADHTWYTDGSSFLQEGQRKAGAAVTTETEVIWARALPAGTSAQRAELIALTQALKMAEGKKLNVYTDSRYAFATAHIHGEIYRRRGWLTSEGKEIKNKDEILALLKALFLPKRLSIIHCPGHQKGNSAEARGNRMADQAAREVATRETPETSTLLAGKRTADGSEFEKRTADGSEFESPKKKAKVE

SEQ ID NO: 2316 - protein, 2096 aa, synthetic construct
MPAAKRVKLDGGDKKYSIGLDIGTNSVGWAVITDEYKVPSKKFKVLGNTDRHSIKKNLIGALLFDSGETAEATRLKRTARRRYTRRKNRICYLQEIFSNEMAKVDDSFFHRLEESFLVEEDKKHERHPIFGNIVDEVAYHEKYPTIYHLRKKLVDSTDKADLRLIYLALAHMIKFRGHFLIEGDLNPDNSDVDKLFIQLVQTYNQLFEENPINASGVDAKAILSARLSKSRRLENLIAQLPGEKKNGLFGNLIALSLGLTPNFKSNFDLAEDAKLQLSKDTYDDDLDNLLAQIGDQYADLFLAAKNLSDAILLSDILRVNTEITKAPLSASMIKRYDEHHQDLTLLKALVRQQLPEKYKEIFFDQSKNGYAGYIDGGASQEEFYKFIKPILEKMDGTEELLVKLNREDLLRKQRTFDNGSIPHQIHLGELHAILRRQEDFYPFLKDNREKIEKILTFRIPYYVGPLARGNSRFAWMTRKSEETITPWNFEEVVDKGASAQSFIERMTNFDKNLPNEKVLPKHSLLYEYFTVYNELTKVKYVTEGMRKPAFLSGEQKKAIVDLLFKTNRKVTVKQLKEDYFKKIECFDSVEISGVEDRFNASLGTYHDLLKIIKDKDFLDNEENEDILEDIVLTLTLFEDREMIEERLKTYAHLFDDKVMKQLKRRRYTGWGRLSRKLINGIRDKQSGKTILDFLKSDGFANRNFMQLIHDDSLTFKEDIQKAQVSGQGDSLHEHIANLAGSPAIKKGILQTVKVVDELVKVMGRHKPENIVIEMARENQTTQKGQKNSRERMKRIEEGIKELGSQILKEHPVENTQLQNEKLYLYYLQNGRDMYVDQELDINRLSDYDVDHIVPQSFLKDDSIDNKVLTRSDKARGKSDNVPSEEVVKKMKNYWRQLLNAKLITQRKFDNLTKAERGGLSELDKAGFIKRQLVETRQITKHVAQILDSRMNTKYDENDKLIREVKVITLKSKLVSDFRKDFQFYKVREINNYHHAHDAYLNAVVGTALIKKYPKLESEFVYGDYKVYDVRKMIAKSEQEIGKATAKYFFYSNIMNFFKTEITLANGEIRKRPLIETNGETGEIVWDKGRDFATVRKVLSMPQVNIVKKTEVQTGGFSKESILPKRNSDKLIARKKDWDPKKYGGFDSPTVAYSVLVVAKVEKGKSKKLKSVKELLGITIMERSSFEKNPIDFLEAKGYKEVKKDLIIKLPKYSLFELENGRKRMLASAGELQKGNELALPSKYVNFLYLASHYEKLKGSPEDNEQKQLFVEQHKHYLDEIIEQISEFSKRVILADANLDKVLSAYNKHRDKPIREQAENIIHLFTLTNLGAPAAFKYFDTTIDRKRYTSTKEVLDATLIHQSITGLYETRIDLSQLGGDGGGGGEAAAKGSSGGTLNIEDEYRLHETSKEPDVSLGSTWLSDFPQAWAETGGMGLAVRQAPLIIPLKATSTPVSIKQYPMSQEARLGIKPHIQRLLDQGILVPCQSPWNTPLLPVKKPGTNDYRPVQDLREVNKRVEDIHPTVPNPYNLLSGLPPSHQWYTVLDLKDAFFCLRLHPTSQPLFAFEWRDPEMGISGQLTWTRLPQGFKNSPTLFNEALHRDLAGFRIQHPDLILLQYVDDLLLAATSELDCQQGTRALLQTLGDLGYRASAKKAQICQKQVKYLGYLLKEGQRWLTEARKETVMGQPIPKTPRQLREFLGKAGFCRLFIPGFAEMAAPLYPLTKPGTLFNWGPDQQKAFQEIKQALLTAPALGLPDLTKPFELFVDEKQGYAKGVLTQKLGPWRRPVAYLSKKLDPVAAGWPPCLRMVAAIAVLTKDAGKLTMGQPLVILAPHAVEALVKQPPDRWLSNARMTHYQALLLDTDRVQFGPVVALNPATLLPLPEEGLQHDCLDILAEAHGTRSDLMDQPLPDADHTWYTDGSSFLQEGQRKAGAAVTTETEVIWARALPAGTSAQRAELIALTQALKMAEGKKLNVYTDSRYAFATAHIHGEIYRRRGWLTSEGKEIKNKDEILALLKALFLPKRLSIIHCPGHQKGNSAEARGNRMADQAAREVATRETPETSTLLAGKRTADGSEFEKRTADGSEFESPKKKAKVE

SEQ ID NO: 2317 - protein, 2094 aa, synthetic construct
MPAAKRVKLDGGDKKYSIGLDIGTNSVGWAVITDEYKVPSKKFKVLGNTDRHSIKKNLIGALLFDSGETAEATRLKRTARRRYTRRKNRICYLQEIFSNEMAKVDDSFFHRLEESFLVEEDKKHERHPIFGNIVDEVAYHEKYPTIYHLRKKLVDSTDKADLRLIYLALAHMIKFRGHFLIEGDLNPDNSDVDKLFIQLVQTYNQLFEENPINASGVDAKAILSARLSKSRRLENLIAQLPGEKKNGLFGNLIALSLGLTPNFKSNFDLAEDAKLQLSKDTYDDDLDNLLAQIGDQYADLFLAAKNLSDAILLSDILRVNTEITKAPLSASMIKRYDEHHQDLTLLKALVRQQLPEKYKEIFFDQSKNGYAGYIDGGASQEEFYKFIKPILEKMDGTEELLVKLNREDLLRKQRTFDNGSIPHQIHLGELHAILRRQEDFYPFLKDNREKIEKILTFRIPYYVGPLARGNSRFAWMTRKSEETITPWNFEEVVDKGASAQSFIERMTNFDKNLPNEKVLPKHSLLYEYFTVYNELTKVKYVTEGMRKPAFLSGEQKKAIVDLLFKTNRKVTVKQLKEDYFKKIECFDSVEISGVEDRFNASLGTYHDLLKIIKDKDFLDNEENEDILEDIVLTLTLFEDREMIEERLKTYAHLFDDKVMKQLKRRRYTGWGRLSRKLINGIRDKQSGKTILDFLKSDGFANRNFMQLIHDDSLTFKEDIQKAQVSGQGDSLHEHIANLAGSPAIKKGILQTVKVVDELVKVMGRHKPENIVIEMARENQTTQKGQKNSRERMKRIEEGIKELGSQILKEHPVENTQLQNEKLYLYYLQNGRDMYVDQELDINRLSDYDVDHIVPQSFLKDDSIDNKVLTRSDKARGKSDNVPSEEVVKKMKNYWRQLLNAKLITQRKFDNLTKAERGGLSELDKAGFIKRQLVETRQITKHVAQILDSRMNTKYDENDKLIREVKVITLKSKLVSDFRKDFQFYKVREINNYHHAHDAYLNAVVGTALIKKYPKLESEFVYGDYKVYDVRKMIAKSEQEIGKATAKYFFYSNIMNFFKTEITLANGEIRKRPLIETNGETGEIVWDKGRDFATVRKVLSMPQVNIVKKTEVQTGGFSKESILPKRNSDKLIARKKDWDPKKYGGFDSPTVAYSVLVVAKVEKGKSKKLKSVKELLGITIMERSSFEKNPIDFLEAKGYKEVKKDLIIKLPKYSLFELENGRKRMLASAGELQKGNELALPSKYVNFLYLASHYEKLKGSPEDNEQKQLFVEQHKHYLDEIIEQISEFSKRVILADANLDKVLSAYNKHRDKPIREQAENIIHLFTLTNLGAPAAFKYFDTTIDRKRYTSTKEVLDATLIHQSITGLYETRIDLSQLGGDGGGGSGGGPAPGGTLNIEDEYRLHETSKEPDVSLGSTWLSDFPQAWAETGGMGLAVRQAPLIIPLKATSTPVSIKQYPMSQEARLGIKPHIQRLLDQGILVPCQSPWNTPLLPVKKPGTNDYRPVQDLREVNKRVEDIHPTVPNPYNLLSGLPPSHQWYTVLDLKDAFFCLRLHPTSQPLFAFEWRDPEMGISGQLTWTRLPQGFKNSPTLFNEALHRDLAGFRIQHPDLILLQYVDDLLLAATSELDCQQGTRALLQTLGDLGYRASAKKAQICQKQVKYLGYLLKEGQRWLTEARKETVMGQPIPKTPRQLREFLGKAGFCRLFIPGFAEMAAPLYPLTKPGTLFNWGPDQQKAFQEIKQALLTAPALGLPDLTKPFELFVDEKQGYAKGVLTQKLGPWRRPVAYLSKKLDPVAAGWPPCLRMVAAIAVLTKDAGKLTMGQPLVILAPHAVEALVKQPPDRWLSNARMTHYQALLLDTDRVQFGPVVALNPATLLPLPEEGLQHDCLDILAEAHGTRSDLMDQPLPDADHTWYTDGSSFLQEGQRKAGAAVTTETEVIWARALPAGTSAQRAELIALTQALKMAEGKKLNVYTDSRYAFATAHIHGEIYRRRGWLTSEGKEIKNKDEILALLKALFLPKRLSIIHCPGHQKGNSAEARGNRMADQAAREVATRETPETSTLLAGKRTADGSEFEKRTADGSEFESPKKKAKVE

SEQ ID NO: 2318 - protein, 2094 aa, synthetic construct
MPAAKRVKLDGGDKKYSIGLDIGTNSVGWAVITDEYKVPSKKFKVLGNTDRHSIKKNLIGALLFDSGETAEATRLKRTARRRYTRRKNRICYLQEIFSNEMAKVDDSFFHRLEESFLVEEDKKHERHPIFGNIVDEVAYHEKYPTIYHLRKKLVDSTDKADLRLIYLALAHMIKFRGHFLIEGDLNPDNSDVDKLFIQLVQTYNQLFEENPINASGVDAKAILSARLSKSRRLENLIAQLPGEKKNGLFGNLIALSLGLTPNFKSNFDLAEDAKLQLSKDTYDDDLDNLLAQIGDQYADLFLAAKNLSDAILLSDILRVNTEITKAPLSASMIKRYDEHHQDLTLLKALVRQQLPEKYKEIFFDQSKNGYAGYIDGGASQEEFYKFIKPILEKMDGTEELLVKLNREDLLRKQRTFDNGSIPHQIHLGELHAILRRQEDFYPFLKDNREKIEKILTFRIPYYVGPLARGNSRFAWMTRKSEETITPWNFEEVVDKGASAQSFIERMTNFDKNLPNEKVLPKHSLLYEYFTVYNELTKVKYVTEGMRKPAFLSGEQKKAIVDLLFKTNRKVTVKQLKEDYFKKIECFDSVEISGVEDRFNASLGTYHDLLKIIKDKDFLDNEENEDILEDIVLTLTLFEDREMIEERLKTYAHLFDDKVMKQLKRRRYTGWGRLSRKLINGIRDKQSGKTILDFLKSDGFANRNFMQLIHDDSLTFKEDIQKAQVSGQGDSLHEHIANLAGSPAIKKGILQTVKVVDELVKVMGRHKPENIVIEMARENQTTQKGQKNSRERMKRIEEGIKELGSQILKEHPVENTQLQNEKLYLYYLQNGRDMYVDQELDINRLSDYDVDHIVPQSFLKDDSIDNKVLTRSDKARGKSDNVPSEEVVKKMKNYWRQLLNAKLITQRKFDNLTKAERGGLSELDKAGFIKRQLVETRQITKHVAQILDSRMNTKYDENDKLIREVKVITLKSKLVSDFRKDFQFYKVREINNYHHAHDAYLNAVVGTALIKKYPKLESEFVYGDYKVYDVRKMIAKSEQEIGKATAKYFFYSNIMNFFKTEITLANGEIRKRPLIETNGETGEIVWDKGRDFATVRKVLSMPQVNIVKKTEVQTGGFSKESILPKRNSDKLIARKKDWDPKKYGGFDSPTVAYSVLVVAKVEKGKSKKLKSVKELLGITIMERSSFEKNPIDFLEAKGYKEVKKDLIIKLPKYSLFELENGRKRMLASAGELQKGNELALPSKYVNFLYLASHYEKLKGSPEDNEQKQLFVEQHKHYLDEIIEQISEFSKRVILADANLDKVLSAYNKHRDKPIREQAENIIHLFTLTNLGAPAAFKYFDTTIDRKRYTSTKEVLDATLIHQSITGLYETRIDLSQLGGDGGPAPAPAPAPGGTLNIEDEYRLHETSKEPDVSLGSTWLSDFPQAWAETGGMGLAVRQAPLIIPLKATSTPVSIKQYPMSQEARLGIKPHIQRLLDQGILVPCQSPWNTPLLPVKKPGTNDYRPVQDLREVNKRVEDIHPTVPNPYNLLSGLPPSHQWYTVLDLKDAFFCLRLHPTSQPLFAFEWRDPEMGISGQLTWTRLPQGFKNSPTLFNEALHRDLAGFRIQHPDLILLQYVDDLLLAATSELDCQQGTRALLQTLGDLGYRASAKKAQICQKQVKYLGYLLKEGQRWLTEARKETVMGQPIPKTPRQLREFLGKAGFCRLFIPGFAEMAAPLYPLTKPGTLFNWGPDQQKAFQEIKQALLTAPALGLPDLTKPFELFVDEKQGYAKGVLTQKLGPWRRPVAYLSKKLDPVAAGWPPCLRMVAAIAVLTKDAGKLTMGQPLVILAPHAVEALVKQPPDRWLSNARMTHYQALLLDTDRVQFGPVVALNPATLLPLPEEGLQHDCLDILAEAHGTRSDLMDQPLPDADHTWYTDGSSFLQEGQRKAGAAVTTETEVIWARALPAGTSAQRAELIALTQALKMAEGKKLNVYTDSRYAFATAHIHGEIYRRRGWLTSEGKEIKNKDEILALLKALFLPKRLSIIHCPGHQKGNSAEARGNRMADQAAREVATRETPETSTLLAGKRTADGSEFEKRTADGSEFESPKKKAKVE

SEQ ID NO: 2319 - protein, 2097 aa, synthetic construct
MPAAKRVKLDGGDKKYSIGLDIGTNSVGWAVITDEYKVPSKKFKVLGNTDRHSIKKNLIGALLFDSGETAEATRLKRTARRRYTRRKNRICYLQEIFSNEMAKVDDSFFHRLEESFLVEEDKKHERHPIFGNIVDEVAYHEKYPTIYHLRKKLVDSTDKADLRLIYLALAHMIKFRGHFLIEGDLNPDNSDVDKLFIQLVQTYNQLFEENPINASGVDAKAILSARLSKSRRLENLIAQLPGEKKNGLFGNLIALSLGLTPNFKSNFDLAEDAKLQLSKDTYDDDLDNLLAQIGDQYADLFLAAKNLSDAILLSDILRVNTEITKAPLSASMIKRYDEHHQDLTLLKALVRQQLPEKYKEIFFDQSKNGYAGYIDGGASQEEFYKFIKPILEKMDGTEELLVKLNREDLLRKQRTFDNGSIPHQIHLGELHAILRRQEDFYPFLKDNREKIEKILTFRIPYYVGPLARGNSRFAWMTRKSEETITPWNFEEVVDKGASAQSFIERMTNFDKNLPNEKVLPKHSLLYEYFTVYNELTKVKYVTEGMRKPAFLSGEQKKAIVDLLFKTNRKVTVKQLKEDYFKKIECFDSVEISGVEDRFNASLGTYHDLLKIIKDKDFLDNEENEDILEDIVLTLTLFEDREMIEERLKTYAHLFDDKVMKQLKRRRYTGWGRLSRKLINGIRDKQSGKTILDFLKSDGFANRNFMQLIHDDSLTFKEDIQKAQVSGQGDSLHEHIANLAGSPAIKKGILQTVKVVDELVKVMGRHKPENIVIEMARENQTTQKGQKNSRERMKRIEEGIKELGSQILKEHPVENTQLQNEKLYLYYLQNGRDMYVDQELDINRLSDYDVDHIVPQSFLKDDSIDNKVLTRSDKARGKSDNVPSEEVVKKMKNYWRQLLNAKLITQRKFDNLTKAERGGLSELDKAGFIKRQLVETRQITKHVAQILDSRMNTKYDENDKLIREVKVITLKSKLVSDFRKDFQFYKVREINNYHHAHDAYLNAVVGTALIKKYPKLESEFVYGDYKVYDVRKMIAKSEQEIGKATAKYFFYSNIMNFFKTEITLANGEIRKRPLIETNGETGEIVWDKGRDFATVRKVLSMPQVNIVKKTEVQTGGFSKESILPKRNSDKLIARKKDWDPKKYGGFDSPTVAYSVLVVAKVEKGKSKKLKSVKELLGITIMERSSFEKNPIDFLEAKGYKEVKKDLIIKLPKYSLFELENGRKRMLASAGELQKGNELALPSKYVNFLYLASHYEKLKGSPEDNEQKQLFVEQHKHYLDEIIEQISEFSKRVILADANLDKVLSAYNKHRDKPIREQAENIIHLFTLTNLGAPAAFKYFDTTIDRKRYTSTKEVLDATLIHQSITGLYETRIDLSQLGGDGGGGSGGSGGSGGSGGTLNIEDEYRLHETSKEPDVSLGSTWLSDFPQAWAETGGMGLAVRQAPLIIPLKATSTPVSIKQYPMSQEARLGIKPHIQRLLDQGILVPCQSPWNTPLLPVKKPGTNDYRPVQDLREVNKRVEDIHPTVPNPYNLLSGLPPSHQWYTVLDLKDAFFCLRLHPTSQPLFAFEWRDPEMGISGQLTWTRLPQGFKNSPTLFNEALHRDLAGFRIQHPDLILLQYVDDLLLAATSELDCQQGTRALLQTLGDLGYRASAKKAQICQKQVKYLGYLLKEGQRWLTEARKETVMGQPIPKTPRQLREFLGKAGFCRLFIPGFAEMAAPLYPLTKPGTLFNWGPDQQKAFQEIKQALLTAPALGLPDLTKPFELFVDEKQGYAKGVLTQKLGPWRRPVAYLSKKLDPVAAGWPPCLRMVAAIAVLTKDAGKLTMGQPLVILAPHAVEALVKQPPDRWLSNARMTHYQALLLDTDRVQFGPVVALNPATLLPLPEEGLQHDCLDILAEAHGTRSDLMDQPLPDADHTWYTDGSSFLQEGQRKAGAAVTTETEVIWARALPAGTSAQRAELIALTQALKMAEGKKLNVYTDSRYAFATAHIHGEIYRRRGWLTSEGKEIKNKDEILALLKALFLPKRLSIIHCPGHQKGNSAEARGNRMADQAAREVATRETPETSTLLAGKRTADGSEFEKRTADGSEFESPKKKAKVE

SEQ ID NO: 2320 - protein, 2094 aa, synthetic construct
MPAAKRVKLDGGDKKYSIGLDIGTNSVGWAVITDEYKVPSKKFKVLGNTDRHSIKKNLIGALLFDSGETAEATRLKRTARRRYTRRKNRICYLQEIFSNEMAKVDDSFFHRLEESFLVEEDKKHERHPIFGNIVDEVAYHEKYPTIYHLRKKLVDSTDKADLRLIYLALAHMIKFRGHFLIEGDLNPDNSDVDKLFIQLVQTYNQLFEENPINASGVDAKAILSARLSKSRRLENLIAQLPGEKKNGLFGNLIALSLGLTPNFKSNFDLAEDAKLQLSKDTYDDDLDNLLAQIGDQYADLFLAAKNLSDAILLSDILRVNTEITKAPLSASMIKRYDEHHQDLTLLKALVRQQLPEKYKEIFFDQSKNGYAGYIDGGASQEEFYKFIKPILEKMDGTEELLVKLNREDLLRKQRTFDNGSIPHQIHLGELHAILRRQEDFYPFLKDNREKIEKILTFRIPYYVGPLARGNSRFAWMTRKSEETITPWNFEEVVDKGASAQSFIERMTNFDKNLPNEKVLPKHSLLYEYFTVYNELTKVKYVTEGMRKPAFLSGEQKKAIVDLLFKTNRKVTVKQLKEDYFKKIECFDSVEISGVEDRFNASLGTYHDLLKIIKDKDFLDNEENEDILEDIVLTLTLFEDREMIEERLKTYAHLFDDKVMKQLKRRRYTGWGRLSRKLINGIRDKQSGKTILDFLKSDGFANRNFMQLIHDDSLTFKEDIQKAQVSGQGDSLHEHIANLAGSPAIKKGILQTVKVVDELVKVMGRHKPENIVIEMARENQTTQKGQKNSRERMKRIEEGIKELGSQILKEHPVENTQLQNEKLYLYYLQNGRDMYVDQELDINRLSDYDVDHIVPQSFLKDDSIDNKVLTRSDKARGKSDNVPSEEVVKKMKNYWRQLLNAKLITQRKFDNLTKAERGGLSELDKAGFIKRQLVETRQITKHVAQILDSRMNTKYDENDKLIREVKVITLKSKLVSDFRKDFQFYKVREINNYHHAHDAYLNAVVGTALIKKYPKLESEFVYGDYKVYDVRKMIAKSEQEIGKATAKYFFYSNIMNFFKTEITLANGEIRKRPLIETNGETGEIVWDKGRDFATVRKVLSMPQVNIVKKTEVQTGGFSKESILPKRNSDKLIARKKDWDPKKYGGFDSPTVAYSVLVVAKVEKGKSKKLKSVKELLGITIMERSSFEKNPIDFLEAKGYKEVKKDLIIKLPKYSLFELENGRKRMLASAGELQKGNELALPSKYVNFLYLASHYEKLKGSPEDNEQKQLFVEQHKHYLDEIIEQISEFSKRVILADANLDKVLSAYNKHRDKPIREQAENIIHLFTLTNLGAPAAFKYFDTTIDRKRYTSTKEVLDATLIHQSITGLYETRIDLSQLGGDGGGGGPAPGGSGGTLNIEDEYRLHETSKEPDVSLGSTWLSDFPQAWAETGGMGLAVRQAPLIIPLKATSTPVSIKQYPMSQEARLGIKPHIQRLLDQGILVPCQSPWNTPLLPVKKPGTNDYRPVQDLREVNKRVEDIHPTVPNPYNLLSGLPPSHQWYTVLDLKDAFFCLRLHPTSQPLFAFEWRDPEMGISGQLTWTRLPQGFKNSPTLFNEALHRDLAGFRIQHPDLILLQYVDDLLLAATSELDCQQGTRALLQTLGDLGYRASAKKAQICQKQVKYLGYLLKEGQRWLTEARKETVMGQPIPKTPRQLREFLGKAGFCRLFIPGFAEMAAPLYPLTKPGTLFNWGPDQQKAFQEIKQALLTAPALGLPDLTKPFELFVDEKQGYAKGVLTQKLGPWRRPVAYLSKKLDPVAAGWPPCLRMVAAIAVLTKDAGKLTMGQPLVILAPHAVEALVKQPPDRWLSNARMTHYQALLLDTDRVQFGPVVALNPATLLPLPEEGLQHDCLDILAEAHGTRSDLMDQPLPDADHTWYTDGSSFLQEGQRKAGAAVTTETEVIWARALPAGTSAQRAELIALTQALKMAEGKKLNVYTDSRYAFATAHIHGEIYRRRGWLTSEGKEIKNKDEILALLKALFLPKRLSIIHCPGHQKGNSAEARGNRMADQAAREVATRETPETSTLLAGKRTADGSEFEKRTADGSEFESPKKKAKVE

SEQ ID NO: 2321 - protein, 2094 aa, synthetic construct
MPAAKRVKLDGGDKKYSIGLDIGTNSVGWAVITDEYKVPSKKFKVLGNTDRHSIKKNLIGALLFDSGETAEATRLKRTARRRYTRRKNRICYLQEIFSNEMAKVDDSFFHRLEESFLVEEDKKHERHPIFGNIVDEVAYHEKYPTIYHLRKKLVDSTDKADLRLIYLALAHMIKFRGHFLIEGDLNPDNSDVDKLFIQLVQTYNQLFEENPINASGVDAKAILSARLSKSRRLENLIAQLPGEKKNGLFGNLIALSLGLTPNFKSNFDLAEDAKLQLSKDTYDDDLDNLLAQIGDQYADLFLAAKNLSDAILLSDILRVNTEITKAPLSASMIKRYDEHHQDLTLLKALVRQQLPEKYKEIFFDQSKNGYAGYIDGGASQEEFYKFIKPILEKMDGTEELLVKLNREDLLRKQRTFDNGSIPHQIHLGELHAILRRQEDFYPFLKDNREKIEKILTFRIPYYVGPLARGNSRFAWMTRKSEETITPWNFEEVVDKGASAQSFIERMTNFDKNLPNEKVLPKHSLLYEYFTVYNELTKVKYVTEGMRKPAFLSGEQKKAIVDLLFKTNRKVTVKQLKEDYFKKIECFDSVEISGVEDRFNASLGTYHDLLKIIKDKDFLDNEENEDILEDIVLTLTLFEDREMIEERLKTYAHLFDDKVMKQLKRRRYTGWGRLSRKLINGIRDKQSGKTILDFLKSDGFANRNFMQLIHDDSLTFKEDIQKAQVSGQGDSLHEHIANLAGSPAIKKGILQTVKVVDELVKVMGRHKPENIVIEMARENQTTQKGQKNSRERMKRIEEGIKELGSQILKEHPVENTQLQNEKLYLYYLQNGRDMYVDQELDINRLSDYDVDHIVPQSFLKDDSIDNKVLTRSDKARGKSDNVPSEEVVKKMKNYWRQLLNAKLITQRKFDNLTKAERGGLSELDKAGFIKRQLVETRQITKHVAQILDSRMNTKYDENDKLIREVKVITLKSKLVSDFRKDFQFYKVREINNYHHAHDAYLNAVVGTALIKKYPKLESEFVYGDYKVYDVRKMIAKSEQEIGKATAKYFFYSNIMNFFKTEITLANGEIRKRPLIETNGETGEIVWDKGRDFATVRKVLSMPQVNIVKKTEVQTGGFSKESILPKRNSDKLIARKKDWDPKKYGGFDSPTVAYSVLVVAKVEKGKSKKLKSVKELLGITIMERSSFEKNPIDFLEAKGYKEVKKDLIIKLPKYSLFELENGRKRMLASAGELQKGNELALPSKYVNFLYLASHYEKLKGSPEDNEQKQLFVEQHKHYLDEIIEQISEFSKRVILADANLDKVLSAYNKHRDKPIREQAENIIHLFTLTNLGAPAAFKYFDTTIDRKRYTSTKEVLDATLIHQSITGLYETRIDLSQLGGDGGPAPGGSGSSGGTLNIEDEYRLHETSKEPDVSLGSTWLSDFPQAWAETGGMGLAVRQAPLIIPLKATSTPVSIKQYPMSQEARLGIKPHIQRLLDQGILVPCQSPWNTPLLPVKKPGTNDYRPVQDLREVNKRVEDIHPTVPNPYNLLSGLPPSHQWYTVLDLKDAFFCLRLHPTSQPLFAFEWRDPEMGISGQLTWTRLPQGFKNSPTLFNEALHRDLAGFRIQHPDLILLQYVDDLLLAATSELDCQQGTRALLQTLGDLGYRASAKKAQICQKQVKYLGYLLKEGQRWLTEARKETVMGQPIPKTPRQLREFLGKAGFCRLFIPGFAEMAAPLYPLTKPGTLFNWGPDQQKAFQEIKQALLTAPALGLPDLTKPFELFVDEKQGYAKGVLTQKLGPWRRPVAYLSKKLDPVAAGWPPCLRMVAAIAVLTKDAGKLTMGQPLVILAPHAVEALVKQPPDRWLSNARMTHYQALLLDTDRVQFGPVVALNPATLLPLPEEGLQHDCLDILAEAHGTRSDLMDQPLPDADHTWYTDGSSFLQEGQRKAGAAVTTETEVIWARALPAGTSAQRAELIALTQALKMAEGKKLNVYTDSRYAFATAHIHGEIYRRRGWLTSEGKEIKNKDEILALLKALFLPKRLSIIHCPGHQKGNSAEARGNRMADQAAREVATRETPETSTLLAGKRTADGSEFEKRTADGSEFESPKKKAKVE

SEQ ID NO: 2322 - protein, 2115 aa, synthetic construct
MPAAKRVKLDGGDKKYSIGLDIGTNSVGWAVITDEYKVPSKKFKVLGNTDRHSIKKNLIGALLFDSGETAEATRLKRTARRRYTRRKNRICYLQEIFSNEMAKVDDSFFHRLEESFLVEEDKKHERHPIFGNIVDEVAYHEKYPTIYHLRKKLVDSTDKADLRLIYLALAHMIKFRGHFLIEGDLNPDNSDVDKLFIQLVQTYNQLFEENPINASGVDAKAILSARLSKSRRLENLIAQLPGEKKNGLFGNLIALSLGLTPNFKSNFDLAEDAKLQLSKDTYDDDLDNLLAQIGDQYADLFLAAKNLSDAILLSDILRVNTEITKAPLSASMIKRYDEHHQDLTLLKALVRQQLPEKYKEIFFDQSKNGYAGYIDGGASQEEFYKFIKPILEKMDGTEELLVKLNREDLLRKQRTFDNGSIPHQIHLGELHAILRRQEDFYPFLKDNREKIEKILTFRIPYYVGPLARGNSRFAWMTRKSEETITPWNFEEVVDKGASAQSFIERMTNFDKNLPNEKVLPKHSLLYEYFTVYNELTKVKYVTEGMRKPAFLSGEQKKAIVDLLFKTNRKVTVKQLKEDYFKKIECFDSVEISGVEDRFNASLGTYHDLLKIIKDKDFLDNEENEDILEDIVLTLTLFEDREMIEERLKTYAHLFDDKVMKQLKRRRYTGWGRLSRKLINGIRDKQSGKTILDFLKSDGFANRNFMQLIHDDSLTFKEDIQKAQVSGQGDSLHEHIANLAGSPAIKKGILQTVKVVDELVKVMGRHKPENIVIEMARENQTTQKGQKNSRERMKRIEEGIKELGSQILKEHPVENTQLQNEKLYLYYLQNGRDMYVDQELDINRLSDYDVDHIVPQSFLKDDSIDNKVLTRSDKARGKSDNVPSEEVVKKMKNYWRQLLNAKLITQRKFDNLTKAERGGLSELDKAGFIKRQLVETRQITKHVAQILDSRMNTKYDENDKLIREVKVITLKSKLVSDFRKDFQFYKVREINNYHHAHDAYLNAVVGTALIKKYPKLESEFVYGDYKVYDVRKMIAKSEQEIGKATAKYFFYSNIMNFFKTEITLANGEIRKRPLIETNGETGEIVWDKGRDFATVRKVLSMPQVNIVKKTEVQTGGFSKESILPKRNSDKLIARKKDWDPKKYGGFDSPTVAYSVLVVAKVEKGKSKKLKSVKELLGITIMERSSFEKNPIDFLEAKGYKEVKKDLIIKLPKYSLFELENGRKRMLASAGELQKGNELALPSKYVNFLYLASHYEKLKGSPEDNEQKQLFVEQHKHYLDEIIEQISEFSKRVILADANLDKVLSAYNKHRDKPIREQAENIIHLFTLTNLGAPAAFKYFDTTIDRKRYTSTKEVLDATLIHQSITGLYETRIDLSQLGGDGGEAAAKEAAAKEAAAKEAAAKEAAAKEAAAKGGTLNIEDEYRLHETSKEPDVSLGSTWLSDFPQAWAETGGMGLAVRQAPLIIPLKATSTPVSIKQYPMSQEARLGIKPHIQRLLDQGILVPCQSPWNTPLLPVKKPGTNDYRPVQDLREVNKRVEDIHPTVPNPYNLLSGLPPSHQWYTVLDLKDAFFCLRLHPTSQPLFAFEWRDPEMGISGQLTWTRLPQGFKNSPTLFNEALHRDLAGFRIQHPDLILLQYVDDLLLAATSELDCQQGTRALLQTLGDLGYRASAKKAQICQKQVKYLGYLLKEGQRWLTEARKETVMGQPIPKTPRQLREFLGKAGFCRLFIPGFAEMAAPLYPLTKPGTLFNWGPDQQKAFQEIKQALLTAPALGLPDLTKPFELFVDEKQGYAKGVLTQKLGPWRRPVAYLSKKLDPVAAGWPPCLRMVAAIAVLTKDAGKLTMGQPLVILAPHAVEALVKQPPDRWLSNARMTHYQALLLDTDRVQFGPVVALNPATLLPLPEEGLQHDCLDILAEAHGTRSDLMDQPLPDADHTWYTDGSSFLQEGQRKAGAAVTTETEVIWARALPAGTSAQRAELIALTQALKMAEGKKLNVYTDSRYAFATAHIHGEIYRRRGWLTSEGKEIKNKDEILALLKALFLPKRLSIIHCPGHQKGNSAEARGNRMADQAAREVATRETPETSTLLAGKRTADGSEFEKRTADGSEFESPKKKAKVE

SEQ ID NO: 2323 - protein, 2088 aa, synthetic construct
MPAAKRVKLDGGDKKYSIGLDIGTNSVGWAVITDEYKVPSKKFKVLGNTDRHSIKKNLIGALLFDSGETAEATRLKRTARRRYTRRKNRICYLQEIFSNEMAKVDDSFFHRLEESFLVEEDKKHERHPIFGNIVDEVAYHEKYPTIYHLRKKLVDSTDKADLRLIYLALAHMIKFRGHFLIEGDLNPDNSDVDKLFIQLVQTYNQLFEENPINASGVDAKAILSARLSKSRRLENLIAQLPGEKKNGLFGNLIALSLGLTPNFKSNFDLAEDAKLQLSKDTYDDDLDNLLAQIGDQYADLFLAAKNLSDAILLSDILRVNTEITKAPLSASMIKRYDEHHQDLTLLKALVRQQLPEKYKEIFFDQSKNGYAGYIDGGASQEEFYKFIKPILEKMDGTEELLVKLNREDLLRKQRTFDNGSIPHQIHLGELHAILRRQEDFYPFLKDNREKIEKILTFRIPYYVGPLARGNSRFAWMTRKSEETITPWNFEEVVDKGASAQSFIERMTNFDKNLPNEKVLPKHSLLYEYFTVYNELTKVKYVTEGMRKPAFLSGEQKKAIVDLLFKTNRKVTVKQLKEDYFKKIECFDSVEISGVEDRFNASLGTYHDLLKIIKDKDFLDNEENEDILEDIVLTLTLFEDREMIEERLKTYAHLFDDKVMKQLKRRRYTGWGRLSRKLINGIRDKQSGKTILDFLKSDGFANRNFMQLIHDDSLTFKEDIQKAQVSGQGDSLHEHIANLAGSPAIKKGILQTVKVVDELVKVMGRHKPENIVIEMARENQTTQKGQKNSRERMKRIEEGIKELGSQILKEHPVENTQLQNEKLYLYYLQNGRDMYVDQELDINRLSDYDVDHIVPQSFLKDDSIDNKVLTRSDKARGKSDNVPSEEVVKKMKNYWRQLLNAKLITQRKFDNLTKAERGGLSELDKAGFIKRQLVETRQITKHVAQILDSRMNTKYDENDKLIREVKVITLKSKLVSDFRKDFQFYKVREINNYHHAHDAYLNAVVGTALIKKYPKLESEFVYGDYKVYDVRKMIAKSEQEIGKATAKYFFYSNIMNFFKTEITLANGEIRKRPLIETNGETGEIVWDKGRDFATVRKVLSMPQVNIVKKTEVQTGGFSKESILPKRNSDKLIARKKDWDPKKYGGFDSPTVAYSVLVVAKVEKGKSKKLKSVKELLGITIMERSSFEKNPIDFLEAKGYKEVKKDLIIKLPKYSLFELENGRKRMLASAGELQKGNELALPSKYVNFLYLASHYEKLKGSPEDNEQKQLFVEQHKHYLDEIIEQISEFSKRVILADANLDKVLSAYNKHRDKPIREQAENIIHLFTLTNLGAPAAFKYFDTTIDRKRYTSTKEVLDATLIHQSITGLYETRIDLSQLGGDGGGGSGGTLNIEDEYRLHETSKEPDVSLGSTWLSDFPQAWAETGGMGLAVRQAPLIIPLKATSTPVSIKQYPMSQEARLGIKPHIQRLLDQGILVPCQSPWNTPLLPVKKPGTNDYRPVQDLREVNKRVEDIHPTVPNPYNLLSGLPPSHQWYTVLDLKDAFFCLRLHPTSQPLFAFEWRDPEMGISGQLTWTRLPQGFKNSPTLFNEALHRDLAGFRIQHPDLILLQYVDDLLLAATSELDCQQGTRALLQTLGDLGYRASAKKAQICQKQVKYLGYLLKEGQRWLTEARKETVMGQPIPKTPRQLREFLGKAGFCRLFIPGFAEMAAPLYPLTKPGTLFNWGPDQQKAFQEIKQALLTAPALGLPDLTKPFELFVDEKQGYAKGVLTQKLGPWRRPVAYLSKKLDPVAAGWPPCLRMVAAIAVLTKDAGKLTMGQPLVILAPHAVEALVKQPPDRWLSNARMTHYQALLLDTDRVQFGPVVALNPATLLPLPEEGLQHDCLDILAEAHGTRSDLMDQPLPDADHTWYTDGSSFLQEGQRKAGAAVTTETEVIWARALPAGTSAQRAELIALTQALKMAEGKKLNVYTDSRYAFATAHIHGEIYRRRGWLTSEGKEIKNKDEILALLKALFLPKRLSIIHCPGHQKGNSAEARGNRMADQAAREVATRETPETSTLLAGKRTADGSEFEKRTADGSEFESPKKKAKVE

SEQ ID NO: 2324 - protein, 2110 aa, synthetic construct
MPAAKRVKLDGGDKKYSIGLDIGTNSVGWAVITDEYKVPSKKFKVLGNTDRHSIKKNLIGALLFDSGETAEATRLKRTARRRYTRRKNRICYLQEIFSNEMAKVDDSFFHRLEESFLVEEDKKHERHPIFGNIVDEVAYHEKYPTIYHLRKKLVDSTDKADLRLIYLALAHMIKFRGHFLIEGDLNPDNSDVDKLFIQLVQTYNQLFEENPINASGVDAKAILSARLSKSRRLENLIAQLPGEKKNGLFGNLIALSLGLTPNFKSNFDLAEDAKLQLSKDTYDDDLDNLLAQIGDQYADLFLAAKNLSDAILLSDILRVNTEITKAPLSASMIKRYDEHHQDLTLLKALVRQQLPEKYKEIFFDQSKNGYAGYIDGGASQEEFYKFIKPILEKMDGTEELLVKLNREDLLRKQRTFDNGSIPHQIHLGELHAILRRQEDFYPFLKDNREKIEKILTFRIPYYVGPLARGNSRFAWMTRKSEETITPWNFEEVVDKGASAQSFIERMTNFDKNLPNEKVLPKHSLLYEYFTVYNELTKVKYVTEGMRKPAFLSGEQKKAIVDLLFKTNRKVTVKQLKEDYFKKIECFDSVEISGVEDRFNASLGTYHDLLKIIKDKDFLDNEENEDILEDIVLTLTLFEDREMIEERLKTYAHLFDDKVMKQLKRRRYTGWGRLSRKLINGIRDKQSGKTILDFLKSDGFANRNFMQLIHDDSLTFKEDIQKAQVSGQGDSLHEHIANLAGSPAIKKGILQTVKVVDELVKVMGRHKPENIVIEMARENQTTQKGQKNSRERMKRIEEGIKELGSQILKEHPVENTQLQNEKLYLYYLQNGRDMYVDQELDINRLSDYDVDHIVPQSFLKDDSIDNKVLTRSDKARGKSDNVPSEEVVKKMKNYWRQLLNAKLITQRKFDNLTKAERGGLSELDKAGFIKRQLVETRQITKHVAQILDSRMNTKYDENDKLIREVKVITLKSKLVSDFRKDFQFYKVREINNYHHAHDAYLNAVVGTALIKKYPKLESEFVYGDYKVYDVRKMIAKSEQEIGKATAKYFFYSNIMNFFKTEITLANGEIRKRPLIETNGETGEIVWDKGRDFATVRKVLSMPQVNIVKKTEVQTGGFSKESILPKRNSDKLIARKKDWDPKKYGGFDSPTVAYSVLVVAKVEKGKSKKLKSVKELLGITIMERSSFEKNPIDFLEAKGYKEVKKDLIIKLPKYSLFELENGRKRMLASAGELQKGNELALPSKYVNFLYLASHYEKLKGSPEDNEQKQLFVEQHKHYLDEIIEQISEFSKRVILADANLDKVLSAYNKHRDKPIREQAENIIHLFTLTNLGAPAAFKYFDTTIDRKRYTSTKEVLDATLIHQSITGLYETRIDLSQLGGDGGEAAAKEAAAKEAAAKEAAAKEAAAKGGTLNIEDEYRLHETSKEPDVSLGSTWLSDFPQAWAETGGMGLAVRQAPLIIPLKATSTPVSIKQYPMSQEARLGIKPHIQRLLDQGILVPCQSPWNTPLLPVKKPGTNDYRPVQDLREVNKRVEDIHPTVPNPYNLLSGLPPSHQWYTVLDLKDAFFCLRLHPTSQPLFAFEWRDPEMGISGQLTWTRLPQGFKNSPTLFNEALHRDLAGFRIQHPDLILLQYVDDLLLAATSELDCQQGTRALLQTLGDLGYRASAKKAQICQKQVKYLGYLLKEGQRWLTEARKETVMGQPIPKTPRQLREFLGKAGFCRLFIPGFAEMAAPLYPLTKPGTLFNWGPDQQKAFQEIKQALLTAPALGLPDLTKPFELFVDEKQGYAKGVLTQKLGPWRRPVAYLSKKLDPVAAGWPPCLRMVAAIAVLTKDAGKLTMGQPLVILAPHAVEALVKQPPDRWLSNARMTHYQALLLDTDRVQFGPVVALNPATLLPLPEEGLQHDCLDILAEAHGTRSDLMDQPLPDADHTWYTDGSSFLQEGQRKAGAAVTTETEVIWARALPAGTSAQRAELIALTQALKMAEGKKLNVYTDSRYAFATAHIHGEIYRRRGWLTSEGKEIKNKDEILALLKALFLPKRLSIIHCPGHQKGNSAEARGNRMADQAAREVATRETPETSTLLAGKRTADGSEFEKRTADGSEFESPKKKAKVE

SEQ ID NO: 2325 - protein, 2105 aa, synthetic construct
MPAAKRVKLDGGDKKYSIGLDIGTNSVGWAVITDEYKVPSKKFKVLGNTDRHSIKKNLIGALLFDSGETAEATRLKRTARRRYTRRKNRICYLQEIFSNEMAKVDDSFFHRLEESFLVEEDKKHERHPIFGNIVDEVAYHEKYPTIYHLRKKLVDSTDKADLRLIYLALAHMIKFRGHFLIEGDLNPDNSDVDKLFIQLVQTYNQLFEENPINASGVDAKAILSARLSKSRRLENLIAQLPGEKKNGLFGNLIALSLGLTPNFKSNFDLAEDAKLQLSKDTYDDDLDNLLAQIGDQYADLFLAAKNLSDAILLSDILRVNTEITKAPLSASMIKRYDEHHQDLTLLKALVRQQLPEKYKEIFFDQSKNGYAGYIDGGASQEEFYKFIKPILEKMDGTEELLVKLNREDLLRKQRTFDNGSIPHQIHLGELHAILRRQEDFYPFLKDNREKIEKILTFRIPYYVGPLARGNSRFAWMTRKSEETITPWNFEEVVDKGASAQSFIERMTNFDKNLPNEKVLPKHSLLYEYFTVYNELTKVKYVTEGMRKPAFLSGEQKKAIVDLLFKTNRKVTVKQLKEDYFKKIECFDSVEISGVEDRFNASLGTYHDLLKIIKDKDFLDNEENEDILEDIVLTLTLFEDREMIEERLKTYAHLFDDKVMKQLKRRRYTGWGRLSRKLINGIRDKQSGKTILDFLKSDGFANRNFMQLIHDDSLTFKEDIQKAQVSGQGDSLHEHIANLAGSPAIKKGILQTVKVVDELVKVMGRHKPENIVIEMARENQTTQKGQKNSRERMKRIEEGIKELGSQILKEHPVENTQLQNEKLYLYYLQNGRDMYVDQELDINRLSDYDVDHIVPQSFLKDDSIDNKVLTRSDKARGKSDNVPSEEVVKKMKNYWRQLLNAKLITQRKFDNLTKAERGGLSELDKAGFIKRQLVETRQITKHVAQILDSRMNTKYDENDKLIREVKVITLKSKLVSDFRKDFQFYKVREINNYHHAHDAYLNAVVGTALIKKYPKLESEFVYGDYKVYDVRKMIAKSEQEIGKATAKYFFYSNIMNFFKTEITLANGEIRKRPLIETNGETGEIVWDKGRDFATVRKVLSMPQVNIVKKTEVQTGGFSKESILPKRNSDKLIARKKDWDPKKYGGFDSPTVAYSVLVVAKVEKGKSKKLKSVKELLGITIMERSSFEKNPIDFLEAKGYKEVKKDLIIKLPKYSLFELENGRKRMLASAGELQKGNELALPSKYVNFLYLASHYEKLKGSPEDNEQKQLFVEQHKHYLDEIIEQISEFSKRVILADANLDKVLSAYNKHRDKPIREQAENIIHLFTLTNLGAPAAFKYFDTTIDRKRYTSTKEVLDATLIHQSITGLYETRIDLSQLGGDGGEAAAKEAAAKEAAAKEAAAKGGTLNIEDEYRLHETSKEPDVSLGSTWLSDFPQAWAETGGMGLAVRQAPLIIPLKATSTPVSIKQYPMSQEARLGIKPHIQRLLDQGILVPCQSPWNTPLLPVKKPGTNDYRPVQDLREVNKRVEDIHPTVPNPYNLLSGLPPSHQWYTVLDLKDAFFCLRLHPTSQPLFAFEWRDPEMGISGQLTWTRLPQGFKNSPTLFNEALHRDLAGFRIQHPDLILLQYVDDLLLAATSELDCQQGTRALLQTLGDLGYRASAKKAQICQKQVKYLGYLLKEGQRWLTEARKETVMGQPIPKTPRQLREFLGKAGFCRLFIPGFAEMAAPLYPLTKPGTLFNWGPDQQKAFQEIKQALLTAPALGLPDLTKPFELFVDEKQGYAKGVLTQKLGPWRRPVAYLSKKLDPVAAGWPPCLRMVAAIAVLTKDAGKLTMGQPLVILAPHAVEALVKQPPDRWLSNARMTHYQALLLDTDRVQFGPVVALNPATLLPLPEEGLQHDCLDILAEAHGTRSDLMDQPLPDADHTWYTDGSSFLQEGQRKAGAAVTTETEVIWARALPAGTSAQRAELIALTQALKMAEGKKLNVYTDSRYAFATAHIHGEIYRRRGWLTSEGKEIKNKDEILALLKALFLPKRLSIIHCPGHQKGNSAEARGNRMADQAAREVATRETPETSTLLAGKRTADGSEFEKRTADGSEFESPKKKAKVE

SEQ ID NO: 2326 - protein, 2096 aa, synthetic construct
MPAAKRVKLDGGDKKYSIGLDIGTNSVGWAVITDEYKVPSKKFKVLGNTDRHSIKKNLIGALLFDSGETAEATRLKRTARRRYTRRKNRICYLQEIFSNEMAKVDDSFFHRLEESFLVEEDKKHERHPIFGNIVDEVAYHEKYPTIYHLRKKLVDSTDKADLRLIYLALAHMIKFRGHFLIEGDLNPDNSDVDKLFIQLVQTYNQLFEENPINASGVDAKAILSARLSKSRRLENLIAQLPGEKKNGLFGNLIALSLGLTPNFKSNFDLAEDAKLQLSKDTYDDDLDNLLAQIGDQYADLFLAAKNLSDAILLSDILRVNTEITKAPLSASMIKRYDEHHQDLTLLKALVRQQLPEKYKEIFFDQSKNGYAGYIDGGASQEEFYKFIKPILEKMDGTEELLVKLNREDLLRKQRTFDNGSIPHQIHLGELHAILRRQEDFYPFLKDNREKIEKILTFRIPYYVGPLARGNSRFAWMTRKSEETITPWNFEEVVDKGASAQSFIERMTNFDKNLPNEKVLPKHSLLYEYFTVYNELTKVKYVTEGMRKPAFLSGEQKKAIVDLLFKTNRKVTVKQLKEDYFKKIECFDSVEISGVEDRFNASLGTYHDLLKIIKDKDFLDNEENEDILEDIVLTLTLFEDREMIEERLKTYAHLFDDKVMKQLKRRRYTGWGRLSRKLINGIRDKQSGKTILDFLKSDGFANRNFMQLIHDDSLTFKEDIQKAQVSGQGDSLHEHIANLAGSPAIKKGILQTVKVVDELVKVMGRHKPENIVIEMARENQTTQKGQKNSRERMKRIEEGIKELGSQILKEHPVENTQLQNEKLYLYYLQNGRDMYVDQELDINRLSDYDVDHIVPQSFLKDDSIDNKVLTRSDKARGKSDNVPSEEVVKKMKNYWRQLLNAKLITQRKFDNLTKAERGGLSELDKAGFIKRQLVETRQITKHVAQILDSRMNTKYDENDKLIREVKVITLKSKLVSDFRKDFQFYKVREINNYHHAHDAYLNAVVGTALIKKYPKLESEFVYGDYKVYDVRKMIAKSEQEIGKATAKYFFYSNIMNFFKTEITLANGEIRKRPLIETNGETGEIVWDKGRDFATVRKVLSMPQVNIVKKTEVQTGGFSKESILPKRNSDKLIARKKDWDPKKYGGFDSPTVAYSVLVVAKVEKGKSKKLKSVKELLGITIMERSSFEKNPIDFLEAKGYKEVKKDLIIKLPKYSLFELENGRKRMLASAGELQKGNELALPSKYVNFLYLASHYEKLKGSPEDNEQKQLFVEQHKHYLDEIIEQISEFSKRVILADANLDKVLSAYNKHRDKPIREQAENIIHLFTLTNLGAPAAFKYFDTTIDRKRYTSTKEVLDATLIHQSITGLYETRIDLSQLGGDGGGGSEAAAKPAPGGTLNIEDEYRLHETSKEPDVSLGSTWLSDFPQAWAETGGMGLAVRQAPLIIPLKATSTPVSIKQYPMSQEARLGIKPHIQRLLDQGILVPCQSPWNTPLLPVKKPGTNDYRPVQDLREVNKRVEDIHPTVPNPYNLLSGLPPSHQWYTVLDLKDAFFCLRLHPTSQPLFAFEWRDPEMGISGQLTWTRLPQGFKNSPTLFNEALHRDLAGFRIQHPDLILLQYVDDLLLAATSELDCQQGTRALLQTLGDLGYRASAKKAQICQKQVKYLGYLLKEGQRWLTEARKETVMGQPIPKTPRQLREFLGKAGFCRLFIPGFAEMAAPLYPLTKPGTLFNWGPDQQKAFQEIKQALLTAPALGLPDLTKPFELFVDEKQGYAKGVLTQKLGPWRRPVAYLSKKLDPVAAGWPPCLRMVAAIAVLTKDAGKLTMGQPLVILAPHAVEALVKQPPDRWLSNARMTHYQALLLDTDRVQFGPVVALNPATLLPLPEEGLQHDCLDILAEAHGTRSDLMDQPLPDADHTWYTDGSSFLQEGQRKAGAAVTTETEVIWARALPAGTSAQRAELIALTQALKMAEGKKLNVYTDSRYAFATAHIHGEIYRRRGWLTSEGKEIKNKDEILALLKALFLPKRLSIIHCPGHQKGNSAEARGNRMADQAAREVATRETPETSTLLAGKRTADGSEFEKRTADGSEFESPKKKAKVE

SEQ ID NO: 2327 - protein, 2096 aa, synthetic construct
MPAAKRVKLDGGDKKYSIGLDIGTNSVGWAVITDEYKVPSKKFKVLGNTDRHSIKKNLIGALLFDSGETAEATRLKRTARRRYTRRKNRICYLQEIFSNEMAKVDDSFFHRLEESFLVEEDKKHERHPIFGNIVDEVAYHEKYPTIYHLRKKLVDSTDKADLRLIYLALAHMIKFRGHFLIEGDLNPDNSDVDKLFIQLVQTYNQLFEENPINASGVDAKAILSARLSKSRRLENLIAQLPGEKKNGLFGNLIALSLGLTPNFKSNFDLAEDAKLQLSKDTYDDDLDNLLAQIGDQYADLFLAAKNLSDAILLSDILRVNTEITKAPLSASMIKRYDEHHQDLTLLKALVRQQLPEKYKEIFFDQSKNGYAGYIDGGASQEEFYKFIKPILEKMDGTEELLVKLNREDLLRKQRTFDNGSIPHQIHLGELHAILRRQEDFYPFLKDNREKIEKILTFRIPYYVGPLARGNSRFAWMTRKSEETITPWNFEEVVDKGASAQSFIERMTNFDKNLPNEKVLPKHSLLYEYFTVYNELTKVKYVTEGMRKPAFLSGEQKKAIVDLLFKTNRKVTVKQLKEDYFKKIECFDSVEISGVEDRFNASLGTYHDLLKIIKDKDFLDNEENEDILEDIVLTLTLFEDREMIEERLKTYAHLFDDKVMKQLKRRRYTGWGRLSRKLINGIRDKQSGKTILDFLKSDGFANRNFMQLIHDDSLTFKEDIQKAQVSGQGDSLHEHIANLAGSPAIKKGILQTVKVVDELVKVMGRHKPENIVIEMARENQTTQKGQKNSRERMKRIEEGIKELGSQILKEHPVENTQLQNEKLYLYYLQNGRDMYVDQELDINRLSDYDVDHIVPQSFLKDDSIDNKVLTRSDKARGKSDNVPSEEVVKKMKNYWRQLLNAKLITQRKFDNLTKAERGGLSELDKAGFIKRQLVETRQITKHVAQILDSRMNTKYDENDKLIREVKVITLKSKLVSDFRKDFQFYKVREINNYHHAHDAYLNAVVGTALIKKYPKLESEFVYGDYKVYDVRKMIAKSEQEIGKATAKYFFYSNIMNFFKTEITLANGEIRKRPLIETNGETGEIVWDKGRDFATVRKVLSMPQVNIVKKTEVQTGGFSKESILPKRNSDKLIARKKDWDPKKYGGFDSPTVAYSVLVVAKVEKGKSKKLKSVKELLGITIMERSSFEKNPIDFLEAKGYKEVKKDLIIKLPKYSLFELENGRKRMLASAGELQKGNELALPSKYVNFLYLASHYEKLKGSPEDNEQKQLFVEQHKHYLDEIIEQISEFSKRVILADANLDKVLSAYNKHRDKPIREQAENIIHLFTLTNLGAPAAFKYFDTTIDRKRYTSTKEVLDATLIHQSITGLYETRIDLSQLGGDGGGGGGSSEAAAKGGTLNIEDEYRLHETSKEPDVSLGSTWLSDFPQAWAETGGMGLAVRQAPLIIPLKATSTPVSIKQYPMSQEARLGIKPHIQRLLDQGILVPCQSPWNTPLLPVKKPGTNDYRPVQDLREVNKRVEDIHPTVPNPYNLLSGLPPSHQWYTVLDLKDAFFCLRLHPTSQPLFAFEWRDPEMGISGQLTWTRLPQGFKNSPTLFNEALHRDLAGFRIQHPDLILLQYVDDLLLAATSELDCQQGTRALLQTLGDLGYRASAKKAQICQKQVKYLGYLLKEGQRWLTEARKETVMGQPIPKTPRQLREFLGKAGFCRLFIPGFAEMAAPLYPLTKPGTLFNWGPDQQKAFQEIKQALLTAPALGLPDLTKPFELFVDEKQGYAKGVLTQKLGPWRRPVAYLSKKLDPVAAGWPPCLRMVAAIAVLTKDAGKLTMGQPLVILAPHAVEALVKQPPDRWLSNARMTHYQALLLDTDRVQFGPVVALNPATLLPLPEEGLQHDCLDILAEAHGTRSDLMDQPLPDADHTWYTDGSSFLQEGQRKAGAAVTTETEVIWARALPAGTSAQRAELIALTQALKMAEGKKLNVYTDSRYAFATAHIHGEIYRRRGWLTSEGKEIKNKDEILALLKALFLPKRLSIIHCPGHQKGNSAEARGNRMADQAAREVATRETPETSTLLAGKRTADGSEFEKRTADGSEFESPKKKAKVE

SEQ ID NO: 2328 - protein, 2090 aa, synthetic construct
MPAAKRVKLDGGDKKYSIGLDIGTNSVGWAVITDEYKVPSKKFKVLGNTDRHSIKKNLIGALLFDSGETAEATRLKRTARRRYTRRKNRICYLQEIFSNEMAKVDDSFFHRLEESFLVEEDKKHERHPIFGNIVDEVAYHEKYPTIYHLRKKLVDSTDKADLRLIYLALAHMIKFRGHFLIEGDLNPDNSDVDKLFIQLVQTYNQLFEENPINASGVDAKAILSARLSKSRRLENLIAQLPGEKKNGLFGNLIALSLGLTPNFKSNFDLAEDAKLQLSKDTYDDDLDNLLAQIGDQYADLFLAAKNLSDAILLSDILRVNTEITKAPLSASMIKRYDEHHQDLTLLKALVRQQLPEKYKEIFFDQSKNGYAGYIDGGASQEEFYKFIKPILEKMDGTEELLVKLNREDLLRKQRTFDNGSIPHQIHLGELHAILRRQEDFYPFLKDNREKIEKILTFRIPYYVGPLARGNSRFAWMTRKSEETITPWNFEEVVDKGASAQSFIERMTNFDKNLPNEKVLPKHSLLYEYFTVYNELTKVKYVTEGMRKPAFLSGEQKKAIVDLLFKTNRKVTVKQLKEDYFKKIECFDSVEISGVEDRFNASLGTYHDLLKIIKDKDFLDNEENEDILEDIVLTLTLFEDREMIEERLKTYAHLFDDKVMKQLKRRRYTGWGRLSRKLINGIRDKQSGKTILDFLKSDGFANRNFMQLIHDDSLTFKEDIQKAQVSGQGDSLHEHIANLAGSPAIKKGILQTVKVVDELVKVMGRHKPENIVIEMARENQTTQKGQKNSRERMKRIEEGIKELGSQILKEHPVENTQLQNEKLYLYYLQNGRDMYVDQELDINRLSDYDVDHIVPQSFLKDDSIDNKVLTRSDKARGKSDNVPSEEVVKKMKNYWRQLLNAKLITQRKFDNLTKAERGGLSELDKAGFIKRQLVETRQITKHVAQILDSRMNTKYDENDKLIREVKVITLKSKLVSDFRKDFQFYKVREINNYHHAHDAYLNAVVGTALIKKYPKLESEFVYGDYKVYDVRKMIAKSEQEIGKATAKYFFYSNIMNFFKTEITLANGEIRKRPLIETNGETGEIVWDKGRDFATVRKVLSMPQVNIVKKTEVQTGGFSKESILPKRNSDKLIARKKDWDPKKYGGFDSPTVAYSVLVVAKVEKGKSKKLKSVKELLGITIMERSSFEKNPIDFLEAKGYKEVKKDLIIKLPKYSLFELENGRKRMLASAGELQKGNELALPSKYVNFLYLASHYEKLKGSPEDNEQKQLFVEQHKHYLDEIIEQISEFSKRVILADANLDKVLSAYNKHRDKPIREQAENIIHLFTLTNLGAPAAFKYFDTTIDRKRYTSTKEVLDATLIHQSITGLYETRIDLSQLGGDGGEAAAKGGTLNIEDEYRLHETSKEPDVSLGSTWLSDFPQAWAETGGMGLAVRQAPLIIPLKATSTPVSIKQYPMSQEARLGIKPHIQRLLDQGILVPCQSPWNTPLLPVKKPGTNDYRPVQDLREVNKRVEDIHPTVPNPYNLLSGLPPSHQWYTVLDLKDAFFCLRLHPTSQPLFAFEWRDPEMGISGQLTWTRLPQGFKNSPTLFNEALHRDLAGFRIQHPDLILLQYVDDLLLAATSELDCQQGTRALLQTLGDLGYRASAKKAQICQKQVKYLGYLLKEGQRWLTEARKETVMGQPIPKTPRQLREFLGKAGFCRLFIPGFAEMAAPLYPLTKPGTLFNWGPDQQKAFQEIKQALLTAPALGLPDLTKPFELFVDEKQGYAKGVLTQKLGPWRRPVAYLSKKLDPVAAGWPPCLRMVAAIAVLTKDAGKLTMGQPLVILAPHAVEALVKQPPDRWLSNARMTHYQALLLDTDRVQFGPVVALNPATLLPLPEEGLQHDCLDILAEAHGTRSDLMDQPLPDADHTWYTDGSSFLQEGQRKAGAAVTTETEVIWARALPAGTSAQRAELIALTQALKMAEGKKLNVYTDSRYAFATAHIHGEIYRRRGWLTSEGKEIKNKDEILALLKALFLPKRLSIIHCPGHQKGNSAEARGNRMADQAAREVATRETPETSTLLAGKRTADGSEFEKRTADGSEFESPKKKAKVE

SEQ ID NO: 2329 - protein, 2094 aa, synthetic construct
MPAAKRVKLDGGDKKYSIGLDIGTNSVGWAVITDEYKVPSKKFKVLGNTDRHSIKKNLIGALLFDSGETAEATRLKRTARRRYTRRKNRICYLQEIFSNEMAKVDDSFFHRLEESFLVEEDKKHERHPIFGNIVDEVAYHEKYPTIYHLRKKLVDSTDKADLRLIYLALAHMIKFRGHFLIEGDLNPDNSDVDKLFIQLVQTYNQLFEENPINASGVDAKAILSARLSKSRRLENLIAQLPGEKKNGLFGNLIALSLGLTPNFKSNFDLAEDAKLQLSKDTYDDDLDNLLAQIGDQYADLFLAAKNLSDAILLSDILRVNTEITKAPLSASMIKRYDEHHQDLTLLKALVRQQLPEKYKEIFFDQSKNGYAGYIDGGASQEEFYKFIKPILEKMDGTEELLVKLNREDLLRKQRTFDNGSIPHQIHLGELHAILRRQEDFYPFLKDNREKIEKILTFRIPYYVGPLARGNSRFAWMTRKSEETITPWNFEEVVDKGASAQSFIERMTNFDKNLPNEKVLPKHSLLYEYFTVYNELTKVKYVTEGMRKPAFLSGEQKKAIVDLLFKTNRKVTVKQLKEDYFKKIECFDSVEISGVEDRFNASLGTYHDLLKIIKDKDFLDNEENEDILEDIVLTLTLFEDREMIEERLKTYAHLFDDKVMKQLKRRRYTGWGRLSRKLINGIRDKQSGKTILDFLKSDGFANRNFMQLIHDDSLTFKEDIQKAQVSGQGDSLHEHIANLAGSPAIKKGILQTVKVVDELVKVMGRHKPENIVIEMARENQTTQKGQKNSRERMKRIEEGIKELGSQILKEHPVENTQLQNEKLYLYYLQNGRDMYVDQELDINRLSDYDVDHIVPQSFLKDDSIDNKVLTRSDKARGKSDNVPSEEVVKKMKNYWRQLLNAKLITQRKFDNLTKAERGGLSELDKAGFIKRQLVETRQITKHVAQILDSRMNTKYDENDKLIREVKVITLKSKLVSDFRKDFQFYKVREINNYHHAHDAYLNAVVGTALIKKYPKLESEFVYGDYKVYDVRKMIAKSEQEIGKATAKYFFYSNIMNFFKTEITLANGEIRKRPLIETNGETGEIVWDKGRDFATVRKVLSMPQVNIVKKTEVQTGGFSKESILPKRNSDKLIARKKDWDPKKYGGFDSPTVAYSVLVVAKVEKGKSKKLKSVKELLGITIMERSSFEKNPIDFLEAKGYKEVKKDLIIKLPKYSLFELENGRKRMLASAGELQKGNELALPSKYVNFLYLASHYEKLKGSPEDNEQKQLFVEQHKHYLDEIIEQISEFSKRVILADANLDKVLSAYNKHRDKPIREQAENIIHLFTLTNLGAPAAFKYFDTTIDRKRYTSTKEVLDATLIHQSITGLYETRIDLSQLGGDGGGSSPAPGGGGGTLNIEDEYRLHETSKEPDVSLGSTWLSDFPQAWAETGGMGLAVRQAPLIIPLKATSTPVSIKQYPMSQEARLGIKPHIQRLLDQGILVPCQSPWNTPLLPVKKPGTNDYRPVQDLREVNKRVEDIHPTVPNPYNLLSGLPPSHQWYTVLDLKDAFFCLRLHPTSQPLFAFEWRDPEMGISGQLTWTRLPQGFKNSPTLFNEALHRDLAGFRIQHPDLILLQYVDDLLLAATSELDCQQGTRALLQTLGDLGYRASAKKAQICQKQVKYLGYLLKEGQRWLTEARKETVMGQPIPKTPRQLREFLGKAGFCRLFIPGFAEMAAPLYPLTKPGTLFNWGPDQQKAFQEIKQALLTAPALGLPDLTKPFELFVDEKQGYAKGVLTQKLGPWRRPVAYLSKKLDPVAAGWPPCLRMVAAIAVLTKDAGKLTMGQPLVILAPHAVEALVKQPPDRWLSNARMTHYQALLLDTDRVQFGPVVALNPATLLPLPEEGLQHDCLDILAEAHGTRSDLMDQPLPDADHTWYTDGSSFLQEGQRKAGAAVTTETEVIWARALPAGTSAQRAELIALTQALKMAEGKKLNVYTDSRYAFATAHIHGEIYRRRGWLTSEGKEIKNKDEILALLKALFLPKRLSIIHCPGHQKGNSAEARGNRMADQAAREVATRETPETSTLLAGKRTADGSEFEKRTADGSEFESPKKKAKVE

SEQ ID NO: 2330 - protein, 2088 aa, synthetic construct
MPAAKRVKLDGGDKKYSIGLDIGTNSVGWAVITDEYKVPSKKFKVLGNTDRHSIKKNLIGALLFDSGETAEATRLKRTARRRYTRRKNRICYLQEIFSNEMAKVDDSFFHRLEESFLVEEDKKHERHPIFGNIVDEVAYHEKYPTIYHLRKKLVDSTDKADLRLIYLALAHMIKFRGHFLIEGDLNPDNSDVDKLFIQLVQTYNQLFEENPINASGVDAKAILSARLSKSRRLENLIAQLPGEKKNGLFGNLIALSLGLTPNFKSNFDLAEDAKLQLSKDTYDDDLDNLLAQIGDQYADLFLAAKNLSDAILLSDILRVNTEITKAPLSASMIKRYDEHHQDLTLLKALVRQQLPEKYKEIFFDQSKNGYAGYIDGGASQEEFYKFIKPILEKMDGTEELLVKLNREDLLRKQRTFDNGSIPHQIHLGELHAILRRQEDFYPFLKDNREKIEKILTFRIPYYVGPLARGNSRFAWMTRKSEETITPWNFEEVVDKGASAQSFIERMTNFDKNLPNEKVLPKHSLLYEYFTVYNELTKVKYVTEGMRKPAFLSGEQKKAIVDLLFKTNRKVTVKQLKEDYFKKIECFDSVEISGVEDRFNASLGTYHDLLKIIKDKDFLDNEENEDILEDIVLTLTLFEDREMIEERLKTYAHLFDDKVMKQLKRRRYTGWGRLSRKLINGIRDKQSGKTILDFLKSDGFANRNFMQLIHDDSLTFKEDIQKAQVSGQGDSLHEHIANLAGSPAIKKGILQTVKVVDELVKVMGRHKPENIVIEMARENQTTQKGQKNSRERMKRIEEGIKELGSQILKEHPVENTQLQNEKLYLYYLQNGRDMYVDQELDINRLSDYDVDHIVPQSFLKDDSIDNKVLTRSDKARGKSDNVPSEEVVKKMKNYWRQLLNAKLITQRKFDNLTKAERGGLSELDKAGFIKRQLVETRQITKHVAQILDSRMNTKYDENDKLIREVKVITLKSKLVSDFRKDFQFYKVREINNYHHAHDAYLNAVVGTALIKKYPKLESEFVYGDYKVYDVRKMIAKSEQEIGKATAKYFFYSNIMNFFKTEITLANGEIRKRPLIETNGETGEIVWDKGRDFATVRKVLSMPQVNIVKKTEVQTGGFSKESILPKRNSDKLIARKKDWDPKKYGGFDSPTVAYSVLVVAKVEKGKSKKLKSVKELLGITIMERSSFEKNPIDFLEAKGYKEVKKDLIIKLPKYSLFELENGRKRMLASAGELQKGNELALPSKYVNFLYLASHYEKLKGSPEDNEQKQLFVEQHKHYLDEIIEQISEFSKRVILADANLDKVLSAYNKHRDKPIREQAENIIHLFTLTNLGAPAAFKYFDTTIDRKRYTSTKEVLDATLIHQSITGLYETRIDLSQLGGDGGGSSGGTLNIEDEYRLHETSKEPDVSLGSTWLSDFPQAWAETGGMGLAVRQAPLIIPLKATSTPVSIKQYPMSQEARLGIKPHIQRLLDQGILVPCQSPWNTPLLPVKKPGTNDYRPVQDLREVNKRVEDIHPTVPNPYNLLSGLPPSHQWYTVLDLKDAFFCLRLHPTSQPLFAFEWRDPEMGISGQLTWTRLPQGFKNSPTLFNEALHRDLAGFRIQHPDLILLQYVDDLLLAATSELDCQQGTRALLQTLGDLGYRASAKKAQICQKQVKYLGYLLKEGQRWLTEARKETVMGQPIPKTPRQLREFLGKAGFCRLFIPGFAEMAAPLYPLTKPGTLFNWGPDQQKAFQEIKQALLTAPALGLPDLTKPFELFVDEKQGYAKGVLTQKLGPWRRPVAYLSKKLDPVAAGWPPCLRMVAAIAVLTKDAGKLTMGQPLVILAPHAVEALVKQPPDRWLSNARMTHYQALLLDTDRVQFGPVVALNPATLLPLPEEGLQHDCLDILAEAHGTRSDLMDQPLPDADHTWYTDGSSFLQEGQRKAGAAVTTETEVIWARALPAGTSAQRAELIALTQALKMAEGKKLNVYTDSRYAFATAHIHGEIYRRRGWLTSEGKEIKNKDEILALLKALFLPKRLSIIHCPGHQKGNSAEARGNRMADQAAREVATRETPETSTLLAGKRTADGSEFEKRTADGSEFESPKKKAKVE

SEQ ID NO: 2331 - protein, 2094 aa, synthetic construct
MPAAKRVKLDGGDKKYSIGLDIGTNSVGWAVITDEYKVPSKKFKVLGNTDRHSIKKNLIGALLFDSGETAEATRLKRTARRRYTRRKNRICYLQEIFSNEMAKVDDSFFHRLEESFLVEEDKKHERHPIFGNIVDEVAYHEKYPTIYHLRKKLVDSTDKADLRLIYLALAHMIKFRGHFLIEGDLNPDNSDVDKLFIQLVQTYNQLFEENPINASGVDAKAILSARLSKSRRLENLIAQLPGEKKNGLFGNLIALSLGLTPNFKSNFDLAEDAKLQLSKDTYDDDLDNLLAQIGDQYADLFLAAKNLSDAILLSDILRVNTEITKAPLSASMIKRYDEHHQDLTLLKALVRQQLPEKYKEIFFDQSKNGYAGYIDGGASQEEFYKFIKPILEKMDGTEELLVKLNREDLLRKQRTFDNGSIPHQIHLGELHAILRRQEDFYPFLKDNREKIEKILTFRIPYYVGPLARGNSRFAWMTRKSEETITPWNFEEVVDKGASAQSFIERMTNFDKNLPNEKVLPKHSLLYEYFTVYNELTKVKYVTEGMRKPAFLSGEQKKAIVDLLFKTNRKVTVKQLKEDYFKKIECFDSVEISGVEDRFNASLGTYHDLLKIIKDKDFLDNEENEDILEDIVLTLTLFEDREMIEERLKTYAHLFDDKVMKQLKRRRYTGWGRLSRKLINGIRDKQSGKTILDFLKSDGFANRNFMQLIHDDSLTFKEDIQKAQVSGQGDSLHEHIANLAGSPAIKKGILQTVKVVDELVKVMGRHKPENIVIEMARENQTTQKGQKNSRERMKRIEEGIKELGSQILKEHPVENTQLQNEKLYLYYLQNGRDMYVDQELDINRLSDYDVDHIVPQSFLKDDSIDNKVLTRSDKARGKSDNVPSEEVVKKMKNYWRQLLNAKLITQRKFDNLTKAERGGLSELDKAGFIKRQLVETRQITKHVAQILDSRMNTKYDENDKLIREVKVITLKSKLVSDFRKDFQFYKVREINNYHHAHDAYLNAVVGTALIKKYPKLESEFVYGDYKVYDVRKMIAKSEQEIGKATAKYFFYSNIMNFFKTEITLANGEIRKRPLIETNGETGEIVWDKGRDFATVRKVLSMPQVNIVKKTEVQTGGFSKESILPKRNSDKLIARKKDWDPKKYGGFDSPTVAYSVLVVAKVEKGKSKKLKSVKELLGITIMERSSFEKNPIDFLEAKGYKEVKKDLIIKLPKYSLFELENGRKRMLASAGELQKGNELALPSKYVNFLYLASHYEKLKGSPEDNEQKQLFVEQHKHYLDEIIEQISEFSKRVILADANLDKVLSAYNKHRDKPIREQAENIIHLFTLTNLGAPAAFKYFDTTIDRKRYTSTKEVLDATLIHQSITGLYETRIDLSQLGGDGGGGSGSSGGGGGTLNIEDEYRLHETSKEPDVSLGSTWLSDFPQAWAETGGMGLAVRQAPLIIPLKATSTPVSIKQYPMSQEARLGIKPHIQRLLDQGILVPCQSPWNTPLLPVKKPGTNDYRPVQDLREVNKRVEDIHPTVPNPYNLLSGLPPSHQWYTVLDLKDAFFCLRLHPTSQPLFAFEWRDPEMGISGQLTWTRLPQGFKNSPTLFNEALHRDLAGFRIQHPDLILLQYVDDLLLAATSELDCQQGTRALLQTLGDLGYRASAKKAQICQKQVKYLGYLLKEGQRWLTEARKETVMGQPIPKTPRQLREFLGKAGFCRLFIPGFAEMAAPLYPLTKPGTLFNWGPDQQKAFQEIKQALLTAPALGLPDLTKPFELFVDEKQGYAKGVLTQKLGPWRRPVAYLSKKLDPVAAGWPPCLRMVAAIAVLTKDAGKLTMGQPLVILAPHAVEALVKQPPDRWLSNARMTHYQALLLDTDRVQFGPVVALNPATLLPLPEEGLQHDCLDILAEAHGTRSDLMDQPLPDADHTWYTDGSSFLQEGQRKAGAAVTTETEVIWARALPAGTSAQRAELIALTQALKMAEGKKLNVYTDSRYAFATAHIHGEIYRRRGWLTSEGKEIKNKDEILALLKALFLPKRLSIIHCPGHQKGNSAEARGNRMADQAAREVATRETPETSTLLAGKRTADGSEFEKRTADGSEFESPKKKAKVE

SEQ ID NO: 2332 - protein, 2096 aa, synthetic construct
MPAAKRVKLDGGDKKYSIGLDIGTNSVGWAVITDEYKVPSKKFKVLGNTDRHSIKKNLIGALLFDSGETAEATRLKRTARRRYTRRKNRICYLQEIFSNEMAKVDDSFFHRLEESFLVEEDKKHERHPIFGNIVDEVAYHEKYPTIYHLRKKLVDSTDKADLRLIYLALAHMIKFRGHFLIEGDLNPDNSDVDKLFIQLVQTYNQLFEENPINASGVDAKAILSARLSKSRRLENLIAQLPGEKKNGLFGNLIALSLGLTPNFKSNFDLAEDAKLQLSKDTYDDDLDNLLAQIGDQYADLFLAAKNLSDAILLSDILRVNTEITKAPLSASMIKRYDEHHQDLTLLKALVRQQLPEKYKEIFFDQSKNGYAGYIDGGASQEEFYKFIKPILEKMDGTEELLVKLNREDLLRKQRTFDNGSIPHQIHLGELHAILRRQEDFYPFLKDNREKIEKILTFRIPYYVGPLARGNSRFAWMTRKSEETITPWNFEEVVDKGASAQSFIERMTNFDKNLPNEKVLPKHSLLYEYFTVYNELTKVKYVTEGMRKPAFLSGEQKKAIVDLLFKTNRKVTVKQLKEDYFKKIECFDSVEISGVEDRFNASLGTYHDLLKIIKDKDFLDNEENEDILEDIVLTLTLFEDREMIEERLKTYAHLFDDKVMKQLKRRRYTGWGRLSRKLINGIRDKQSGKTILDFLKSDGFANRNFMQLIHDDSLTFKEDIQKAQVSGQGDSLHEHIANLAGSPAIKKGILQTVKVVDELVKVMGRHKPENIVIEMARENQTTQKGQKNSRERMKRIEEGIKELGSQILKEHPVENTQLQNEKLYLYYLQNGRDMYVDQELDINRLSDYDVDHIVPQSFLKDDSIDNKVLTRSDKARGKSDNVPSEEVVKKMKNYWRQLLNAKLITQRKFDNLTKAERGGLSELDKAGFIKRQLVETRQITKHVAQILDSRMNTKYDENDKLIREVKVITLKSKLVSDFRKDFQFYKVREINNYHHAHDAYLNAVVGTALIKKYPKLESEFVYGDYKVYDVRKMIAKSEQEIGKATAKYFFYSNIMNFFKTEITLANGEIRKRPLIETNGETGEIVWDKGRDFATVRKVLSMPQVNIVKKTEVQTGGFSKESILPKRNSDKLIARKKDWDPKKYGGFDSPTVAYSVLVVAKVEKGKSKKLKSVKELLGITIMERSSFEKNPIDFLEAKGYKEVKKDLIIKLPKYSLFELENGRKRMLASAGELQKGNELALPSKYVNFLYLASHYEKLKGSPEDNEQKQLFVEQHKHYLDEIIEQISEFSKRVILADANLDKVLSAYNKHRDKPIREQAENIIHLFTLTNLGAPAAFKYFDTTIDRKRYTSTKEVLDATLIHQSITGLYETRIDLSQLGGDGGPAPGGSEAAAKGGTLNIEDEYRLHETSKEPDVSLGSTWLSDFPQAWAETGGMGLAVRQAPLIIPLKATSTPVSIKQYPMSQEARLGIKPHIQRLLDQGILVPCQSPWNTPLLPVKKPGTNDYRPVQDLREVNKRVEDIHPTVPNPYNLLSGLPPSHQWYTVLDLKDAFFCLRLHPTSQPLFAFEWRDPEMGISGQLTWTRLPQGFKNSPTLFNEALHRDLAGFRIQHPDLILLQYVDDLLLAATSELDCQQGTRALLQTLGDLGYRASAKKAQICQKQVKYLGYLLKEGQRWLTEARKETVMGQPIPKTPRQLREFLGKAGFCRLFIPGFAEMAAPLYPLTKPGTLFNWGPDQQKAFQEIKQALLTAPALGLPDLTKPFELFVDEKQGYAKGVLTQKLGPWRRPVAYLSKKLDPVAAGWPPCLRMVAAIAVLTKDAGKLTMGQPLVILAPHAVEALVKQPPDRWLSNARMTHYQALLLDTDRVQFGPVVALNPATLLPLPEEGLQHDCLDILAEAHGTRSDLMDQPLPDADHTWYTDGSSFLQEGQRKAGAAVTTETEVIWARALPAGTSAQRAELIALTQALKMAEGKKLNVYTDSRYAFATAHIHGEIYRRRGWLTSEGKEIKNKDEILALLKALFLPKRLSIIHCPGHQKGNSAEARGNRMADQAAREVATRETPETSTLLAGKRTADGSEFEKRTADGSEFESPKKKAKVE

SEQ ID NO: 2333 - protein, 2100 aa, synthetic construct
MPAAKRVKLDGGDKKYSIGLDIGTNSVGWAVITDEYKVPSKKFKVLGNTDRHSIKKNLIGALLFDSGETAEATRLKRTARRRYTRRKNRICYLQEIFSNEMAKVDDSFFHRLEESFLVEEDKKHERHPIFGNIVDEVAYHEKYPTIYHLRKKLVDSTDKADLRLIYLALAHMIKFRGHFLIEGDLNPDNSDVDKLFIQLVQTYNQLFEENPINASGVDAKAILSARLSKSRRLENLIAQLPGEKKNGLFGNLIALSLGLTPNFKSNFDLAEDAKLQLSKDTYDDDLDNLLAQIGDQYADLFLAAKNLSDAILLSDILRVNTEITKAPLSASMIKRYDEHHQDLTLLKALVRQQLPEKYKEIFFDQSKNGYAGYIDGGASQEEFYKFIKPILEKMDGTEELLVKLNREDLLRKQRTFDNGSIPHQIHLGELHAILRRQEDFYPFLKDNREKIEKILTFRIPYYVGPLARGNSRFAWMTRKSEETITPWNFEEVVDKGASAQSFIERMTNFDKNLPNEKVLPKHSLLYEYFTVYNELTKVKYVTEGMRKPAFLSGEQKKAIVDLLFKTNRKVTVKQLKEDYFKKIECFDSVEISGVEDRFNASLGTYHDLLKIIKDKDFLDNEENEDILEDIVLTLTLFEDREMIEERLKTYAHLFDDKVMKQLKRRRYTGWGRLSRKLINGIRDKQSGKTILDFLKSDGFANRNFMQLIHDDSLTFKEDIQKAQVSGQGDSLHEHIANLAGSPAIKKGILQTVKVVDELVKVMGRHKPENIVIEMARENQTTQKGQKNSRERMKRIEEGIKELGSQILKEHPVENTQLQNEKLYLYYLQNGRDMYVDQELDINRLSDYDVDHIVPQSFLKDDSIDNKVLTRSDKARGKSDNVPSEEVVKKMKNYWRQLLNAKLITQRKFDNLTKAERGGLSELDKAGFIKRQLVETRQITKHVAQILDSRMNTKYDENDKLIREVKVITLKSKLVSDFRKDFQFYKVREINNYHHAHDAYLNAVVGTALIKKYPKLESEFVYGDYKVYDVRKMIAKSEQEIGKATAKYFFYSNIMNFFKTEITLANGEIRKRPLIETNGETGEIVWDKGRDFATVRKVLSMPQVNIVKKTEVQTGGFSKESILPKRNSDKLIARKKDWDPKKYGGFDSPTVAYSVLVVAKVEKGKSKKLKSVKELLGITIMERSSFEKNPIDFLEAKGYKEVKKDLIIKLPKYSLFELENGRKRMLASAGELQKGNELALPSKYVNFLYLASHYEKLKGSPEDNEQKQLFVEQHKHYLDEIIEQISEFSKRVILADANLDKVLSAYNKHRDKPIREQAENIIHLFTLTNLGAPAAFKYFDTTIDRKRYTSTKEVLDATLIHQSITGLYETRIDLSQLGGDGGGGGGSGGGGSGGGGSGGTLNIEDEYRLHETSKEPDVSLGSTWLSDFPQAWAETGGMGLAVRQAPLIIPLKATSTPVSIKQYPMSQEARLGIKPHIQRLLDQGILVPCQSPWNTPLLPVKKPGTNDYRPVQDLREVNKRVEDIHPTVPNPYNLLSGLPPSHQWYTVLDLKDAFFCLRLHPTSQPLFAFEWRDPEMGISGQLTWTRLPQGFKNSPTLFNEALHRDLAGFRIQHPDLILLQYVDDLLLAATSELDCQQGTRALLQTLGDLGYRASAKKAQICQKQVKYLGYLLKEGQRWLTEARKETVMGQPIPKTPRQLREFLGKAGFCRLFIPGFAEMAAPLYPLTKPGTLFNWGPDQQKAFQEIKQALLTAPALGLPDLTKPFELFVDEKQGYAKGVLTQKLGPWRRPVAYLSKKLDPVAAGWPPCLRMVAAIAVLTKDAGKLTMGQPLVILAPHAVEALVKQPPDRWLSNARMTHYQALLLDTDRVQFGPVVALNPATLLPLPEEGLQHDCLDILAEAHGTRSDLMDQPLPDADHTWYTDGSSFLQEGQRKAGAAVTTETEVIWARALPAGTSAQRAELIALTQALKMAEGKKLNVYTDSRYAFATAHIHGEIYRRRGWLTSEGKEIKNKDEILALLKALFLPKRLSIIHCPGHQKGNSAEARGNRMADQAAREVATRETPETSTLLAGKRTADGSEFEKRTADGSEFESPKKKAKVE

SEQ ID NO: 2334 - protein, 2096 aa, synthetic construct
MPAAKRVKLDGGDKKYSIGLDIGTNSVGWAVITDEYKVPSKKFKVLGNTDRHSIKKNLIGALLFDSGETAEATRLKRTARRRYTRRKNRICYLQEIFSNEMAKVDDSFFHRLEESFLVEEDKKHERHPIFGNIVDEVAYHEKYPTIYHLRKKLVDSTDKADLRLIYLALAHMIKFRGHFLIEGDLNPDNSDVDKLFIQLVQTYNQLFEENPINASGVDAKAILSARLSKSRRLENLIAQLPGEKKNGLFGNLIALSLGLTPNFKSNFDLAEDAKLQLSKDTYDDDLDNLLAQIGDQYADLFLAAKNLSDAILLSDILRVNTEITKAPLSASMIKRYDEHHQDLTLLKALVRQQLPEKYKEIFFDQSKNGYAGYIDGGASQEEFYKFIKPILEKMDGTEELLVKLNREDLLRKQRTFDNGSIPHQIHLGELHAILRRQEDFYPFLKDNREKIEKILTFRIPYYVGPLARGNSRFAWMTRKSEETITPWNFEEVVDKGASAQSFIERMTNFDKNLPNEKVLPKHSLLYEYFTVYNELTKVKYVTEGMRKPAFLSGEQKKAIVDLLFKTNRKVTVKQLKEDYFKKIECFDSVEISGVEDRFNASLGTYHDLLKIIKDKDFLDNEENEDILEDIVLTLTLFEDREMIEERLKTYAHLFDDKVMKQLKRRRYTGWGRLSRKLINGIRDKQSGKTILDFLKSDGFANRNFMQLIHDDSLTFKEDIQKAQVSGQGDSLHEHIANLAGSPAIKKGILQTVKVVDELVKVMGRHKPENIVIEMARENQTTQKGQKNSRERMKRIEEGIKELGSQILKEHPVENTQLQNEKLYLYYLQNGRDMYVDQELDINRLSDYDVDHIVPQSFLKDDSIDNKVLTRSDKARGKSDNVPSEEVVKKMKNYWRQLLNAKLITQRKFDNLTKAERGGLSELDKAGFIKRQLVETRQITKHVAQILDSRMNTKYDENDKLIREVKVITLKSKLVSDFRKDFQFYKVREINNYHHAHDAYLNAVVGTALIKKYPKLESEFVYGDYKVYDVRKMIAKSEQEIGKATAKYFFYSNIMNFFKTEITLANGEIRKRPLIETNGETGEIVWDKGRDFATVRKVLSMPQVNIVKKTEVQTGGFSKESILPKRNSDKLIARKKDWDPKKYGGFDSPTVAYSVLVVAKVEKGKSKKLKSVKELLGITIMERSSFEKNPIDFLEAKGYKEVKKDLIIKLPKYSLFELENGRKRMLASAGELQKGNELALPSKYVNFLYLASHYEKLKGSPEDNEQKQLFVEQHKHYLDEIIEQISEFSKRVILADANLDKVLSAYNKHRDKPIREQAENIIHLFTLTNLGAPAAFKYFDTTIDRKRYTSTKEVLDATLIHQSITGLYETRIDLSQLGGDGGEAAAKGGSGGGGGTLNIEDEYRLHETSKEPDVSLGSTWLSDFPQAWAETGGMGLAVRQAPLIIPLKATSTPVSIKQYPMSQEARLGIKPHIQRLLDQGILVPCQSPWNTPLLPVKKPGTNDYRPVQDLREVNKRVEDIHPTVPNPYNLLSGLPPSHQWYTVLDLKDAFFCLRLHPTSQPLFAFEWRDPEMGISGQLTWTRLPQGFKNSPTLFNEALHRDLAGFRIQHPDLILLQYVDDLLLAATSELDCQQGTRALLQTLGDLGYRASAKKAQICQKQVKYLGYLLKEGQRWLTEARKETVMGQPIPKTPRQLREFLGKAGFCRLFIPGFAEMAAPLYPLTKPGTLFNWGPDQQKAFQEIKQALLTAPALGLPDLTKPFELFVDEKQGYAKGVLTQKLGPWRRPVAYLSKKLDPVAAGWPPCLRMVAAIAVLTKDAGKLTMGQPLVILAPHAVEALVKQPPDRWLSNARMTHYQALLLDTDRVQFGPVVALNPATLLPLPEEGLQHDCLDILAEAHGTRSDLMDQPLPDADHTWYTDGSSFLQEGQRKAGAAVTTETEVIWARALPAGTSAQRAELIALTQALKMAEGKKLNVYTDSRYAFATAHIHGEIYRRRGWLTSEGKEIKNKDEILALLKALFLPKRLSIIHCPGHQKGNSAEARGNRMADQAAREVATRETPETSTLLAGKRTADGSEFEKRTADGSEFESPKKKAKVE

SEQ ID NO: 2335 - protein, 2091 aa, synthetic construct
MPAAKRVKLDGGDKKYSIGLDIGTNSVGWAVITDEYKVPSKKFKVLGNTDRHSIKKNLIGALLFDSGETAEATRLKRTARRRYTRRKNRICYLQEIFSNEMAKVDDSFFHRLEESFLVEEDKKHERHPIFGNIVDEVAYHEKYPTIYHLRKKLVDSTDKADLRLIYLALAHMIKFRGHFLIEGDLNPDNSDVDKLFIQLVQTYNQLFEENPINASGVDAKAILSARLSKSRRLENLIAQLPGEKKNGLFGNLIALSLGLTPNFKSNFDLAEDAKLQLSKDTYDDDLDNLLAQIGDQYADLFLAAKNLSDAILLSDILRVNTEITKAPLSASMIKRYDEHHQDLTLLKALVRQQLPEKYKEIFFDQSKNGYAGYIDGGASQEEFYKFIKPILEKMDGTEELLVKLNREDLLRKQRTFDNGSIPHQIHLGELHAILRRQEDFYPFLKDNREKIEKILTFRIPYYVGPLARGNSRFAWMTRKSEETITPWNFEEVVDKGASAQSFIERMTNFDKNLPNEKVLPKHSLLYEYFTVYNELTKVKYVTEGMRKPAFLSGEQKKAIVDLLFKTNRKVTVKQLKEDYFKKIECFDSVEISGVEDRFNASLGTYHDLLKIIKDKDFLDNEENEDILEDIVLTLTLFEDREMIEERLKTYAHLFDDKVMKQLKRRRYTGWGRLSRKLINGIRDKQSGKTILDFLKSDGFANRNFMQLIHDDSLTFKEDIQKAQVSGQGDSLHEHIANLAGSPAIKKGILQTVKVVDELVKVMGRHKPENIVIEMARENQTTQKGQKNSRERMKRIEEGIKELGSQILKEHPVENTQLQNEKLYLYYLQNGRDMYVDQELDINRLSDYDVDHIVPQSFLKDDSIDNKVLTRSDKARGKSDNVPSEEVVKKMKNYWRQLLNAKLITQRKFDNLTKAERGGLSELDKAGFIKRQLVETRQITKHVAQILDSRMNTKYDENDKLIREVKVITLKSKLVSDFRKDFQFYKVREINNYHHAHDAYLNAVVGTALIKKYPKLESEFVYGDYKVYDVRKMIAKSEQEIGKATAKYFFYSNIMNFFKTEITLANGEIRKRPLIETNGETGEIVWDKGRDFATVRKVLSMPQVNIVKKTEVQTGGFSKESILPKRNSDKLIARKKDWDPKKYGGFDSPTVAYSVLVVAKVEKGKSKKLKSVKELLGITIMERSSFEKNPIDFLEAKGYKEVKKDLIIKLPKYSLFELENGRKRMLASAGELQKGNELALPSKYVNFLYLASHYEKLKGSPEDNEQKQLFVEQHKHYLDEIIEQISEFSKRVILADANLDKVLSAYNKHRDKPIREQAENIIHLFTLTNLGAPAAFKYFDTTIDRKRYTSTKEVLDATLIHQSITGLYETRIDLSQLGGDGGGGSGGGGGTLNIEDEYRLHETSKEPDVSLGSTWLSDFPQAWAETGGMGLAVRQAPLIIPLKATSTPVSIKQYPMSQEARLGIKPHIQRLLDQGILVPCQSPWNTPLLPVKKPGTNDYRPVQDLREVNKRVEDIHPTVPNPYNLLSGLPPSHQWYTVLDLKDAFFCLRLHPTSQPLFAFEWRDPEMGISGQLTWTRLPQGFKNSPTLFNEALHRDLAGFRIQHPDLILLQYVDDLLLAATSELDCQQGTRALLQTLGDLGYRASAKKAQICQKQVKYLGYLLKEGQRWLTEARKETVMGQPIPKTPRQLREFLGKAGFCRLFIPGFAEMAAPLYPLTKPGTLFNWGPDQQKAFQEIKQALLTAPALGLPDLTKPFELFVDEKQGYAKGVLTQKLGPWRRPVAYLSKKLDPVAAGWPPCLRMVAAIAVLTKDAGKLTMGQPLVILAPHAVEALVKQPPDRWLSNARMTHYQALLLDTDRVQFGPVVALNPATLLPLPEEGLQHDCLDILAEAHGTRSDLMDQPLPDADHTWYTDGSSFLQEGQRKAGAAVTTETEVIWARALPAGTSAQRAELIALTQALKMAEGKKLNVYTDSRYAFATAHIHGEIYRRRGWLTSEGKEIKNKDEILALLKALFLPKRLSIIHCPGHQKGNSAEARGNRMADQAAREVATRETPETSTLLAGKRTADGSEFEKRTADGSEFESPKKKAKVE

SEQ ID NO: 2336 - protein, 2091 aa, synthetic construct
MPAAKRVKLDGGDKKYSIGLDIGTNSVGWAVITDEYKVPSKKFKVLGNTDRHSIKKNLIGALLFDSGETAEATRLKRTARRRYTRRKNRICYLQEIFSNEMAKVDDSFFHRLEESFLVEEDKKHERHPIFGNIVDEVAYHEKYPTIYHLRKKLVDSTDKADLRLIYLALAHMIKFRGHFLIEGDLNPDNSDVDKLFIQLVQTYNQLFEENPINASGVDAKAILSARLSKSRRLENLIAQLPGEKKNGLFGNLIALSLGLTPNFKSNFDLAEDAKLQLSKDTYDDDLDNLLAQIGDQYADLFLAAKNLSDAILLSDILRVNTEITKAPLSASMIKRYDEHHQDLTLLKALVRQQLPEKYKEIFFDQSKNGYAGYIDGGASQEEFYKFIKPILEKMDGTEELLVKLNREDLLRKQRTFDNGSIPHQIHLGELHAILRRQEDFYPFLKDNREKIEKILTFRIPYYVGPLARGNSRFAWMTRKSEETITPWNFEEVVDKGASAQSFIERMTNFDKNLPNEKVLPKHSLLYEYFTVYNELTKVKYVTEGMRKPAFLSGEQKKAIVDLLFKTNRKVTVKQLKEDYFKKIECFDSVEISGVEDRFNASLGTYHDLLKIIKDKDFLDNEENEDILEDIVLTLTLFEDREMIEERLKTYAHLFDDKVMKQLKRRRYTGWGRLSRKLINGIRDKQSGKTILDFLKSDGFANRNFMQLIHDDSLTFKEDIQKAQVSGQGDSLHEHIANLAGSPAIKKGILQTVKVVDELVKVMGRHKPENIVIEMARENQTTQKGQKNSRERMKRIEEGIKELGSQILKEHPVENTQLQNEKLYLYYLQNGRDMYVDQELDINRLSDYDVDHIVPQSFLKDDSIDNKVLTRSDKARGKSDNVPSEEVVKKMKNYWRQLLNAKLITQRKFDNLTKAERGGLSELDKAGFIKRQLVETRQITKHVAQILDSRMNTKYDENDKLIREVKVITLKSKLVSDFRKDFQFYKVREINNYHHAHDAYLNAVVGTALIKKYPKLESEFVYGDYKVYDVRKMIAKSEQEIGKATAKYFFYSNIMNFFKTEITLANGEIRKRPLIETNGETGEIVWDKGRDFATVRKVLSMPQVNIVKKTEVQTGGFSKESILPKRNSDKLIARKKDWDPKKYGGFDSPTVAYSVLVVAKVEKGKSKKLKSVKELLGITIMERSSFEKNPIDFLEAKGYKEVKKDLIIKLPKYSLFELENGRKRMLASAGELQKGNELALPSKYVNFLYLASHYEKLKGSPEDNEQKQLFVEQHKHYLDEIIEQISEFSKRVILADANLDKVLSAYNKHRDKPIREQAENIIHLFTLTNLGAPAAFKYFDTTIDRKRYTSTKEVLDATLIHQSITGLYETRIDLSQLGGDGGPAPGSSGGTLNIEDEYRLHETSKEPDVSLGSTWLSDFPQAWAETGGMGLAVRQAPLIIPLKATSTPVSIKQYPMSQEARLGIKPHIQRLLDQGILVPCQSPWNTPLLPVKKPGTNDYRPVQDLREVNKRVEDIHPTVPNPYNLLSGLPPSHQWYTVLDLKDAFFCLRLHPTSQPLFAFEWRDPEMGISGQLTWTRLPQGFKNSPTLFNEALHRDLAGFRIQHPDLILLQYVDDLLLAATSELDCQQGTRALLQTLGDLGYRASAKKAQICQKQVKYLGYLLKEGQRWLTEARKETVMGQPIPKTPRQLREFLGKAGFCRLFIPGFAEMAAPLYPLTKPGTLFNWGPDQQKAFQEIKQALLTAPALGLPDLTKPFELFVDEKQGYAKGVLTQKLGPWRRPVAYLSKKLDPVAAGWPPCLRMVAAIAVLTKDAGKLTMGQPLVILAPHAVEALVKQPPDRWLSNARMTHYQALLLDTDRVQFGPVVALNPATLLPLPEEGLQHDCLDILAEAHGTRSDLMDQPLPDADHTWYTDGSSFLQEGQRKAGAAVTTETEVIWARALPAGTSAQRAELIALTQALKMAEGKKLNVYTDSRYAFATAHIHGEIYRRRGWLTSEGKEIKNKDEILALLKALFLPKRLSIIHCPGHQKGNSAEARGNRMADQAAREVATRETPETSTLLAGKRTADGSEFEKRTADGSEFESPKKKAKVE

SEQ ID NO: 2337 - protein, 2093 aa, synthetic construct
MPAAKRVKLDGGDKKYSIGLDIGTNSVGWAVITDEYKVPSKKFKVLGNTDRHSIKKNLIGALLFDSGETAEATRLKRTARRRYTRRKNRICYLQEIFSNEMAKVDDSFFHRLEESFLVEEDKKHERHPIFGNIVDEVAYHEKYPTIYHLRKKLVDSTDKADLRLIYLALAHMIKFRGHFLIEGDLNPDNSDVDKLFIQLVQTYNQLFEENPINASGVDAKAILSARLSKSRRLENLIAQLPGEKKNGLFGNLIALSLGLTPNFKSNFDLAEDAKLQLSKDTYDDDLDNLLAQIGDQYADLFLAAKNLSDAILLSDILRVNTEITKAPLSASMIKRYDEHHQDLTLLKALVRQQLPEKYKEIFFDQSKNGYAGYIDGGASQEEFYKFIKPILEKMDGTEELLVKLNREDLLRKQRTFDNGSIPHQIHLGELHAILRRQEDFYPFLKDNREKIEKILTFRIPYYVGPLARGNSRFAWMTRKSEETITPWNFEEVVDKGASAQSFIERMTNFDKNLPNEKVLPKHSLLYEYFTVYNELTKVKYVTEGMRKPAFLSGEQKKAIVDLLFKTNRKVTVKQLKEDYFKKIECFDSVEISGVEDRFNASLGTYHDLLKIIKDKDFLDNEENEDILEDIVLTLTLFEDREMIEERLKTYAHLFDDKVMKQLKRRRYTGWGRLSRKLINGIRDKQSGKTILDFLKSDGFANRNFMQLIHDDSLTFKEDIQKAQVSGQGDSLHEHIANLAGSPAIKKGILQTVKVVDELVKVMGRHKPENIVIEMARENQTTQKGQKNSRERMKRIEEGIKELGSQILKEHPVENTQLQNEKLYLYYLQNGRDMYVDQELDINRLSDYDVDHIVPQSFLKDDSIDNKVLTRSDKARGKSDNVPSEEVVKKMKNYWRQLLNAKLITQRKFDNLTKAERGGLSELDKAGFIKRQLVETRQITKHVAQILDSRMNTKYDENDKLIREVKVITLKSKLVSDFRKDFQFYKVREINNYHHAHDAYLNAVVGTALIKKYPKLESEFVYGDYKVYDVRKMIAKSEQEIGKATAKYFFYSNIMNFFKTEITLANGEIRKRPLIETNGETGEIVWDKGRDFATVRKVLSMPQVNIVKKTEVQTGGFSKESILPKRNSDKLIARKKDWDPKKYGGFDSPTVAYSVLVVAKVEKGKSKKLKSVKELLGITIMERSSFEKNPIDFLEAKGYKEVKKDLIIKLPKYSLFELENGRKRMLASAGELQKGNELALPSKYVNFLYLASHYEKLKGSPEDNEQKQLFVEQHKHYLDEIIEQISEFSKRVILADANLDKVLSAYNKHRDKPIREQAENIIHLFTLTNLGAPAAFKYFDTTIDRKRYTSTKEVLDATLIHQSITGLYETRIDLSQLGGDGGEAAAKPAPGGTLNIEDEYRLHETSKEPDVSLGSTWLSDFPQAWAETGGMGLAVRQAPLIIPLKATSTPVSIKQYPMSQEARLGIKPHIQRLLDQGILVPCQSPWNTPLLPVKKPGTNDYRPVQDLREVNKRVEDIHPTVPNPYNLLSGLPPSHQWYTVLDLKDAFFCLRLHPTSQPLFAFEWRDPEMGISGQLTWTRLPQGFKNSPTLFNEALHRDLAGFRIQHPDLILLQYVDDLLLAATSELDCQQGTRALLQTLGDLGYRASAKKAQICQKQVKYLGYLLKEGQRWLTEARKETVMGQPIPKTPRQLREFLGKAGFCRLFIPGFAEMAAPLYPLTKPGTLFNWGPDQQKAFQEIKQALLTAPALGLPDLTKPFELFVDEKQGYAKGVLTQKLGPWRRPVAYLSKKLDPVAAGWPPCLRMVAAIAVLTKDAGKLTMGQPLVILAPHAVEALVKQPPDRWLSNARMTHYQALLLDTDRVQFGPVVALNPATLLPLPEEGLQHDCLDILAEAHGTRSDLMDQPLPDADHTWYTDGSSFLQEGQRKAGAAVTTETEVIWARALPAGTSAQRAELIALTQALKMAEGKKLNVYTDSRYAFATAHIHGEIYRRRGWLTSEGKEIKNKDEILALLKALFLPKRLSIIHCPGHQKGNSAEARGNRMADQAAREVATRETPETSTLLAGKRTADGSEFEKRTADGSEFESPKKKAKVE

SEQ ID NO: 2338 - protein, 2096 aa, synthetic construct
MPAAKRVKLDGGDKKYSIGLDIGTNSVGWAVITDEYKVPSKKFKVLGNTDRHSIKKNLIGALLFDSGETAEATRLKRTARRRYTRRKNRICYLQEIFSNEMAKVDDSFFHRLEESFLVEEDKKHERHPIFGNIVDEVAYHEKYPTIYHLRKKLVDSTDKADLRLIYLALAHMIKFRGHFLIEGDLNPDNSDVDKLFIQLVQTYNQLFEENPINASGVDAKAILSARLSKSRRLENLIAQLPGEKKNGLFGNLIALSLGLTPNFKSNFDLAEDAKLQLSKDTYDDDLDNLLAQIGDQYADLFLAAKNLSDAILLSDILRVNTEITKAPLSASMIKRYDEHHQDLTLLKALVRQQLPEKYKEIFFDQSKNGYAGYIDGGASQEEFYKFIKPILEKMDGTEELLVKLNREDLLRKQRTFDNGSIPHQIHLGELHAILRRQEDFYPFLKDNREKIEKILTFRIPYYVGPLARGNSRFAWMTRKSEETITPWNFEEVVDKGASAQSFIERMTNFDKNLPNEKVLPKHSLLYEYFTVYNELTKVKYVTEGMRKPAFLSGEQKKAIVDLLFKTNRKVTVKQLKEDYFKKIECFDSVEISGVEDRFNASLGTYHDLLKIIKDKDFLDNEENEDILEDIVLTLTLFEDREMIEERLKTYAHLFDDKVMKQLKRRRYTGWGRLSRKLINGIRDKQSGKTILDFLKSDGFANRNFMQLIHDDSLTFKEDIQKAQVSGQGDSLHEHIANLAGSPAIKKGILQTVKVVDELVKVMGRHKPENIVIEMARENQTTQKGQKNSRERMKRIEEGIKELGSQILKEHPVENTQLQNEKLYLYYLQNGRDMYVDQELDINRLSDYDVDHIVPQSFLKDDSIDNKVLTRSDKARGKSDNVPSEEVVKKMKNYWRQLLNAKLITQRKFDNLTKAERGGLSELDKAGFIKRQLVETRQITKHVAQILDSRMNTKYDENDKLIREVKVITLKSKLVSDFRKDFQFYKVREINNYHHAHDAYLNAVVGTALIKKYPKLESEFVYGDYKVYDVRKMIAKSEQEIGKATAKYFFYSNIMNFFKTEITLANGEIRKRPLIETNGETGEIVWDKGRDFATVRKVLSMPQVNIVKKTEVQTGGFSKESILPKRNSDKLIARKKDWDPKKYGGFDSPTVAYSVLVVAKVEKGKSKKLKSVKELLGITIMERSSFEKNPIDFLEAKGYKEVKKDLIIKLPKYSLFELENGRKRMLASAGELQKGNELALPSKYVNFLYLASHYEKLKGSPEDNEQKQLFVEQHKHYLDEIIEQISEFSKRVILADANLDKVLSAYNKHRDKPIREQAENIIHLFTLTNLGAPAAFKYFDTTIDRKRYTSTKEVLDATLIHQSITGLYETRIDLSQLGGDGGGGSPAPEAAAKGGTLNIEDEYRLHETSKEPDVSLGSTWLSDFPQAWAETGGMGLAVRQAPLIIPLKATSTPVSIKQYPMSQEARLGIKPHIQRLLDQGILVPCQSPWNTPLLPVKKPGTNDYRPVQDLREVNKRVEDIHPTVPNPYNLLSGLPPSHQWYTVLDLKDAFFCLRLHPTSQPLFAFEWRDPEMGISGQLTWTRLPQGFKNSPTLFNEALHRDLAGFRIQHPDLILLQYVDDLLLAATSELDCQQGTRALLQTLGDLGYRASAKKAQICQKQVKYLGYLLKEGQRWLTEARKETVMGQPIPKTPRQLREFLGKAGFCRLFIPGFAEMAAPLYPLTKPGTLFNWGPDQQKAFQEIKQALLTAPALGLPDLTKPFELFVDEKQGYAKGVLTQKLGPWRRPVAYLSKKLDPVAAGWPPCLRMVAAIAVLTKDAGKLTMGQPLVILAPHAVEALVKQPPDRWLSNARMTHYQALLLDTDRVQFGPVVALNPATLLPLPEEGLQHDCLDILAEAHGTRSDLMDQPLPDADHTWYTDGSSFLQEGQRKAGAAVTTETEVIWARALPAGTSAQRAELIALTQALKMAEGKKLNVYTDSRYAFATAHIHGEIYRRRGWLTSEGKEIKNKDEILALLKALFLPKRLSIIHCPGHQKGNSAEARGNRMADQAAREVATRETPETSTLLAGKRTADGSEFEKRTADGSEFESPKKKAKVE

SEQ ID NO: 2339 - protein, 2094 aa, synthetic construct
MPAAKRVKLDGGDKKYSIGLDIGTNSVGWAVITDEYKVPSKKFKVLGNTDRHSIKKNLIGALLFDSGETAEATRLKRTARRRYTRRKNRICYLQEIFSNEMAKVDDSFFHRLEESFLVEEDKKHERHPIFGNIVDEVAYHEKYPTIYHLRKKLVDSTDKADLRLIYLALAHMIKFRGHFLIEGDLNPDNSDVDKLFIQLVQTYNQLFEENPINASGVDAKAILSARLSKSRRLENLIAQLPGEKKNGLFGNLIALSLGLTPNFKSNFDLAEDAKLQLSKDTYDDDLDNLLAQIGDQYADLFLAAKNLSDAILLSDILRVNTEITKAPLSASMIKRYDEHHQDLTLLKALVRQQLPEKYKEIFFDQSKNGYAGYIDGGASQEEFYKFIKPILEKMDGTEELLVKLNREDLLRKQRTFDNGSIPHQIHLGELHAILRRQEDFYPFLKDNREKIEKILTFRIPYYVGPLARGNSRFAWMTRKSEETITPWNFEEVVDKGASAQSFIERMTNFDKNLPNEKVLPKHSLLYEYFTVYNELTKVKYVTEGMRKPAFLSGEQKKAIVDLLFKTNRKVTVKQLKEDYFKKIECFDSVEISGVEDRFNASLGTYHDLLKIIKDKDFLDNEENEDILEDIVLTLTLFEDREMIEERLKTYAHLFDDKVMKQLKRRRYTGWGRLSRKLINGIRDKQSGKTILDFLKSDGFANRNFMQLIHDDSLTFKEDIQKAQVSGQGDSLHEHIANLAGSPAIKKGILQTVKVVDELVKVMGRHKPENIVIEMARENQTTQKGQKNSRERMKRIEEGIKELGSQILKEHPVENTQLQNEKLYLYYLQNGRDMYVDQELDINRLSDYDVDHIVPQSFLKDDSIDNKVLTRSDKARGKSDNVPSEEVVKKMKNYWRQLLNAKLITQRKFDNLTKAERGGLSELDKAGFIKRQLVETRQITKHVAQILDSRMNTKYDENDKLIREVKVITLKSKLVSDFRKDFQFYKVREINNYHHAHDAYLNAVVGTALIKKYPKLESEFVYGDYKVYDVRKMIAKSEQEIGKATAKYFFYSNIMNFFKTEITLANGEIRKRPLIETNGETGEIVWDKGRDFATVRKVLSMPQVNIVKKTEVQTGGFSKESILPKRNSDKLIARKKDWDPKKYGGFDSPTVAYSVLVVAKVEKGKSKKLKSVKELLGITIMERSSFEKNPIDFLEAKGYKEVKKDLIIKLPKYSLFELENGRKRMLASAGELQKGNELALPSKYVNFLYLASHYEKLKGSPEDNEQKQLFVEQHKHYLDEIIEQISEFSKRVILADANLDKVLSAYNKHRDKPIREQAENIIHLFTLTNLGAPAAFKYFDTTIDRKRYTSTKEVLDATLIHQSITGLYETRIDLSQLGGDGGGGSGSSPAPGGTLNIEDEYRLHETSKEPDVSLGSTWLSDFPQAWAETGGMGLAVRQAPLIIPLKATSTPVSIKQYPMSQEARLGIKPHIQRLLDQGILVPCQSPWNTPLLPVKKPGTNDYRPVQDLREVNKRVEDIHPTVPNPYNLLSGLPPSHQWYTVLDLKDAFFCLRLHPTSQPLFAFEWRDPEMGISGQLTWTRLPQGFKNSPTLFNEALHRDLAGFRIQHPDLILLQYVDDLLLAATSELDCQQGTRALLQTLGDLGYRASAKKAQICQKQVKYLGYLLKEGQRWLTEARKETVMGQPIPKTPRQLREFLGKAGFCRLFIPGFAEMAAPLYPLTKPGTLFNWGPDQQKAFQEIKQALLTAPALGLPDLTKPFELFVDEKQGYAKGVLTQKLGPWRRPVAYLSKKLDPVAAGWPPCLRMVAAIAVLTKDAGKLTMGQPLVILAPHAVEALVKQPPDRWLSNARMTHYQALLLDTDRVQFGPVVALNPATLLPLPEEGLQHDCLDILAEAHGTRSDLMDQPLPDADHTWYTDGSSFLQEGQRKAGAAVTTETEVIWARALPAGTSAQRAELIALTQALKMAEGKKLNVYTDSRYAFATAHIHGEIYRRRGWLTSEGKEIKNKDEILALLKALFLPKRLSIIHCPGHQKGNSAEARGNRMADQAAREVATRETPETSTLLAGKRTADGSEFEKRTADGSEFESPKKKAKVE

SEQ ID NO: 2340 - protein, 2091 aa, synthetic construct
MPAAKRVKLDGGDKKYSIGLDIGTNSVGWAVITDEYKVPSKKFKVLGNTDRHSIKKNLIGALLFDSGETAEATRLKRTARRRYTRRKNRICYLQEIFSNEMAKVDDSFFHRLEESFLVEEDKKHERHPIFGNIVDEVAYHEKYPTIYHLRKKLVDSTDKADLRLIYLALAHMIKFRGHFLIEGDLNPDNSDVDKLFIQLVQTYNQLFEENPINASGVDAKAILSARLSKSRRLENLIAQLPGEKKNGLFGNLIALSLGLTPNFKSNFDLAEDAKLQLSKDTYDDDLDNLLAQIGDQYADLFLAAKNLSDAILLSDILRVNTEITKAPLSASMIKRYDEHHQDLTLLKALVRQQLPEKYKEIFFDQSKNGYAGYIDGGASQEEFYKFIKPILEKMDGTEELLVKLNREDLLRKQRTFDNGSIPHQIHLGELHAILRRQEDFYPFLKDNREKIEKILTFRIPYYVGPLARGNSRFAWMTRKSEETITPWNFEEVVDKGASAQSFIERMTNFDKNLPNEKVLPKHSLLYEYFTVYNELTKVKYVTEGMRKPAFLSGEQKKAIVDLLFKTNRKVTVKQLKEDYFKKIECFDSVEISGVEDRFNASLGTYHDLLKIIKDKDFLDNEENEDILEDIVLTLTLFEDREMIEERLKTYAHLFDDKVMKQLKRRRYTGWGRLSRKLINGIRDKQSGKTILDFLKSDGFANRNFMQLIHDDSLTFKEDIQKAQVSGQGDSLHEHIANLAGSPAIKKGILQTVKVVDELVKVMGRHKPENIVIEMARENQTTQKGQKNSRERMKRIEEGIKELGSQILKEHPVENTQLQNEKLYLYYLQNGRDMYVDQELDINRLSDYDVDHIVPQSFLKDDSIDNKVLTRSDKARGKSDNVPSEEVVKKMKNYWRQLLNAKLITQRKFDNLTKAERGGLSELDKAGFIKRQLVETRQITKHVAQILDSRMNTKYDENDKLIREVKVITLKSKLVSDFRKDFQFYKVREINNYHHAHDAYLNAVVGTALIKKYPKLESEFVYGDYKVYDVRKMIAKSEQEIGKATAKYFFYSNIMNFFKTEITLANGEIRKRPLIETNGETGEIVWDKGRDFATVRKVLSMPQVNIVKKTEVQTGGFSKESILPKRNSDKLIARKKDWDPKKYGGFDSPTVAYSVLVVAKVEKGKSKKLKSVKELLGITIMERSSFEKNPIDFLEAKGYKEVKKDLIIKLPKYSLFELENGRKRMLASAGELQKGNELALPSKYVNFLYLASHYEKLKGSPEDNEQKQLFVEQHKHYLDEIIEQISEFSKRVILADANLDKVLSAYNKHRDKPIREQAENIIHLFTLTNLGAPAAFKYFDTTIDRKRYTSTKEVLDATLIHQSITGLYETRIDLSQLGGDGGPAPGGSGGTLNIEDEYRLHETSKEPDVSLGSTWLSDFPQAWAETGGMGLAVRQAPLIIPLKATSTPVSIKQYPMSQEARLGIKPHIQRLLDQGILVPCQSPWNTPLLPVKKPGTNDYRPVQDLREVNKRVEDIHPTVPNPYNLLSGLPPSHQWYTVLDLKDAFFCLRLHPTSQPLFAFEWRDPEMGISGQLTWTRLPQGFKNSPTLFNEALHRDLAGFRIQHPDLILLQYVDDLLLAATSELDCQQGTRALLQTLGDLGYRASAKKAQICQKQVKYLGYLLKEGQRWLTEARKETVMGQPIPKTPRQLREFLGKAGFCRLFIPGFAEMAAPLYPLTKPGTLFNWGPDQQKAFQEIKQALLTAPALGLPDLTKPFELFVDEKQGYAKGVLTQKLGPWRRPVAYLSKKLDPVAAGWPPCLRMVAAIAVLTKDAGKLTMGQPLVILAPHAVEALVKQPPDRWLSNARMTHYQALLLDTDRVQFGPVVALNPATLLPLPEEGLQHDCLDILAEAHGTRSDLMDQPLPDADHTWYTDGSSFLQEGQRKAGAAVTTETEVIWARALPAGTSAQRAELIALTQALKMAEGKKLNVYTDSRYAFATAHIHGEIYRRRGWLTSEGKEIKNKDEILALLKALFLPKRLSIIHCPGHQKGNSAEARGNRMADQAAREVATRETPETSTLLAGKRTADGSEFEKRTADGSEFESPKKKAKVE

SEQ ID NO: 2341 - protein, 2093 aa, synthetic construct
MPAAKRVKLDGGDKKYSIGLDIGTNSVGWAVITDEYKVPSKKFKVLGNTDRHSIKKNLIGALLFDSGETAEATRLKRTARRRYTRRKNRICYLQEIFSNEMAKVDDSFFHRLEESFLVEEDKKHERHPIFGNIVDEVAYHEKYPTIYHLRKKLVDSTDKADLRLIYLALAHMIKFRGHFLIEGDLNPDNSDVDKLFIQLVQTYNQLFEENPINASGVDAKAILSARLSKSRRLENLIAQLPGEKKNGLFGNLIALSLGLTPNFKSNFDLAEDAKLQLSKDTYDDDLDNLLAQIGDQYADLFLAAKNLSDAILLSDILRVNTEITKAPLSASMIKRYDEHHQDLTLLKALVRQQLPEKYKEIFFDQSKNGYAGYIDGGASQEEFYKFIKPILEKMDGTEELLVKLNREDLLRKQRTFDNGSIPHQIHLGELHAILRRQEDFYPFLKDNREKIEKILTFRIPYYVGPLARGNSRFAWMTRKSEETITPWNFEEVVDKGASAQSFIERMTNFDKNLPNEKVLPKHSLLYEYFTVYNELTKVKYVTEGMRKPAFLSGEQKKAIVDLLFKTNRKVTVKQLKEDYFKKIECFDSVEISGVEDRFNASLGTYHDLLKIIKDKDFLDNEENEDILEDIVLTLTLFEDREMIEERLKTYAHLFDDKVMKQLKRRRYTGWGRLSRKLINGIRDKQSGKTILDFLKSDGFANRNFMQLIHDDSLTFKEDIQKAQVSGQGDSLHEHIANLAGSPAIKKGILQTVKVVDELVKVMGRHKPENIVIEMARENQTTQKGQKNSRERMKRIEEGIKELGSQILKEHPVENTQLQNEKLYLYYLQNGRDMYVDQELDINRLSDYDVDHIVPQSFLKDDSIDNKVLTRSDKARGKSDNVPSEEVVKKMKNYWRQLLNAKLITQRKFDNLTKAERGGLSELDKAGFIKRQLVETRQITKHVAQILDSRMNTKYDENDKLIREVKVITLKSKLVSDFRKDFQFYKVREINNYHHAHDAYLNAVVGTALIKKYPKLESEFVYGDYKVYDVRKMIAKSEQEIGKATAKYFFYSNIMNFFKTEITLANGEIRKRPLIETNGETGEIVWDKGRDFATVRKVLSMPQVNIVKKTEVQTGGFSKESILPKRNSDKLIARKKDWDPKKYGGFDSPTVAYSVLVVAKVEKGKSKKLKSVKELLGITIMERSSFEKNPIDFLEAKGYKEVKKDLIIKLPKYSLFELENGRKRMLASAGELQKGNELALPSKYVNFLYLASHYEKLKGSPEDNEQKQLFVEQHKHYLDEIIEQISEFSKRVILADANLDKVLSAYNKHRDKPIREQAENIIHLFTLTNLGAPAAFKYFDTTIDRKRYTSTKEVLDATLIHQSITGLYETRIDLSQLGGDGGEAAAKGGSGGTLNIEDEYRLHETSKEPDVSLGSTWLSDFPQAWAETGGMGLAVRQAPLIIPLKATSTPVSIKQYPMSQEARLGIKPHIQRLLDQGILVPCQSPWNTPLLPVKKPGTNDYRPVQDLREVNKRVEDIHPTVPNPYNLLSGLPPSHQWYTVLDLKDAFFCLRLHPTSQPLFAFEWRDPEMGISGQLTWTRLPQGFKNSPTLFNEALHRDLAGFRIQHPDLILLQYVDDLLLAATSELDCQQGTRALLQTLGDLGYRASAKKAQICQKQVKYLGYLLKEGQRWLTEARKETVMGQPIPKTPRQLREFLGKAGFCRLFIPGFAEMAAPLYPLTKPGTLFNWGPDQQKAFQEIKQALLTAPALGLPDLTKPFELFVDEKQGYAKGVLTQKLGPWRRPVAYLSKKLDPVAAGWPPCLRMVAAIAVLTKDAGKLTMGQPLVILAPHAVEALVKQPPDRWLSNARMTHYQALLLDTDRVQFGPVVALNPATLLPLPEEGLQHDCLDILAEAHGTRSDLMDQPLPDADHTWYTDGSSFLQEGQRKAGAAVTTETEVIWARALPAGTSAQRAELIALTQALKMAEGKKLNVYTDSRYAFATAHIHGEIYRRRGWLTSEGKEIKNKDEILALLKALFLPKRLSIIHCPGHQKGNSAEARGNRMADQAAREVATRETPETSTLLAGKRTADGSEFEKRTADGSEFESPKKKAKVE

SEQ ID NO: 2342 - protein, 2093 aa, synthetic construct
MPAAKRVKLDGGDKKYSIGLDIGTNSVGWAVITDEYKVPSKKFKVLGNTDRHSIKKNLIGALLFDSGETAEATRLKRTARRRYTRRKNRICYLQEIFSNEMAKVDDSFFHRLEESFLVEEDKKHERHPIFGNIVDEVAYHEKYPTIYHLRKKLVDSTDKADLRLIYLALAHMIKFRGHFLIEGDLNPDNSDVDKLFIQLVQTYNQLFEENPINASGVDAKAILSARLSKSRRLENLIAQLPGEKKNGLFGNLIALSLGLTPNFKSNFDLAEDAKLQLSKDTYDDDLDNLLAQIGDQYADLFLAAKNLSDAILLSDILRVNTEITKAPLSASMIKRYDEHHQDLTLLKALVRQQLPEKYKEIFFDQSKNGYAGYIDGGASQEEFYKFIKPILEKMDGTEELLVKLNREDLLRKQRTFDNGSIPHQIHLGELHAILRRQEDFYPFLKDNREKIEKILTFRIPYYVGPLARGNSRFAWMTRKSEETITPWNFEEVVDKGASAQSFIERMTNFDKNLPNEKVLPKHSLLYEYFTVYNELTKVKYVTEGMRKPAFLSGEQKKAIVDLLFKTNRKVTVKQLKEDYFKKIECFDSVEISGVEDRFNASLGTYHDLLKIIKDKDFLDNEENEDILEDIVLTLTLFEDREMIEERLKTYAHLFDDKVMKQLKRRRYTGWGRLSRKLINGIRDKQSGKTILDFLKSDGFANRNFMQLIHDDSLTFKEDIQKAQVSGQGDSLHEHIANLAGSPAIKKGILQTVKVVDELVKVMGRHKPENIVIEMARENQTTQKGQKNSRERMKRIEEGIKELGSQILKEHPVENTQLQNEKLYLYYLQNGRDMYVDQELDINRLSDYDVDHIVPQSFLKDDSIDNKVLTRSDKARGKSDNVPSEEVVKKMKNYWRQLLNAKLITQRKFDNLTKAERGGLSELDKAGFIKRQLVETRQITKHVAQILDSRMNTKYDENDKLIREVKVITLKSKLVSDFRKDFQFYKVREINNYHHAHDAYLNAVVGTALIKKYPKLESEFVYGDYKVYDVRKMIAKSEQEIGKATAKYFFYSNIMNFFKTEITLANGEIRKRPLIETNGETGEIVWDKGRDFATVRKVLSMPQVNIVKKTEVQTGGFSKESILPKRNSDKLIARKKDWDPKKYGGFDSPTVAYSVLVVAKVEKGKSKKLKSVKELLGITIMERSSFEKNPIDFLEAKGYKEVKKDLIIKLPKYSLFELENGRKRMLASAGELQKGNELALPSKYVNFLYLASHYEKLKGSPEDNEQKQLFVEQHKHYLDEIIEQISEFSKRVILADANLDKVLSAYNKHRDKPIREQAENIIHLFTLTNLGAPAAFKYFDTTIDRKRYTSTKEVLDATLIHQSITGLYETRIDLSQLGGDGGGGGEAAAKGGTLNIEDEYRLHETSKEPDVSLGSTWLSDFPQAWAETGGMGLAVRQAPLIIPLKATSTPVSIKQYPMSQEARLGIKPHIQRLLDQGILVPCQSPWNTPLLPVKKPGTNDYRPVQDLREVNKRVEDIHPTVPNPYNLLSGLPPSHQWYTVLDLKDAFFCLRLHPTSQPLFAFEWRDPEMGISGQLTWTRLPQGFKNSPTLFNEALHRDLAGFRIQHPDLILLQYVDDLLLAATSELDCQQGTRALLQTLGDLGYRASAKKAQICQKQVKYLGYLLKEGQRWLTEARKETVMGQPIPKTPRQLREFLGKAGFCRLFIPGFAEMAAPLYPLTKPGTLFNWGPDQQKAFQEIKQALLTAPALGLPDLTKPFELFVDEKQGYAKGVLTQKLGPWRRPVAYLSKKLDPVAAGWPPCLRMVAAIAVLTKDAGKLTMGQPLVILAPHAVEALVKQPPDRWLSNARMTHYQALLLDTDRVQFGPVVALNPATLLPLPEEGLQHDCLDILAEAHGTRSDLMDQPLPDADHTWYTDGSSFLQEGQRKAGAAVTTETEVIWARALPAGTSAQRAELIALTQALKMAEGKKLNVYTDSRYAFATAHIHGEIYRRRGWLTSEGKEIKNKDEILALLKALFLPKRLSIIHCPGHQKGNSAEARGNRMADQAAREVATRETPETSTLLAGKRTADGSEFEKRTADGSEFESPKKKAKVE

SEQ ID NO: 2343 - protein, 2131 aa, synthetic construct
MPAAKRVKLDGGDKKYSIGLDIGTNSVGWAVITDEYKVPSKKFKVLGNTDRHSIKKNLIGALLFDSGETAEATRLKRTARRRYTRRKNRICYLQEIFSNEMAKVDDSFFHRLEESFLVEEDKKHERHPIFGNIVDEVAYHEKYPTIYHLRKKLVDSTDKADLRLIYLALAHMIKFRGHFLIEGDLNPDNSDVDKLFIQLVQTYNQLFEENPINASGVDAKAILSARLSKSRRLENLIAQLPGEKKNGLFGNLIALSLGLTPNFKSNFDLAEDAKLQLSKDTYDDDLDNLLAQIGDQYADLFLAAKNLSDAILLSDILRVNTEITKAPLSASMIKRYDEHHQDLTLLKALVRQQLPEKYKEIFFDQSKNGYAGYIDGGASQEEFYKFIKPILEKMDGTEELLVKLNREDLLRKQRTFDNGSIPHQIHLGELHAILRRQEDFYPFLKDNREKIEKILTFRIPYYVGPLARGNSRFAWMTRKSEETITPWNFEEVVDKGASAQSFIERMTNFDKNLPNEKVLPKHSLLYEYFTVYNELTKVKYVTEGMRKPAFLSGEQKKAIVDLLFKTNRKVTVKQLKEDYFKKIECFDSVEISGVEDRFNASLGTYHDLLKIIKDKDFLDNEENEDILEDIVLTLTLFEDREMIEERLKTYAHLFDDKVMKQLKRRRYTGWGRLSRKLINGIRDKQSGKTILDFLKSDGFANRNFMQLIHDDSLTFKEDIQKAQVSGQGDSLHEHIANLAGSPAIKKGILQTVKVVDELVKVMGRHKPENIVIEMARENQTTQKGQKNSRERMKRIEEGIKELGSQILKEHPVENTQLQNEKLYLYYLQNGRDMYVDQELDINRLSDYDVDHIVPQSFLKDDSIDNKVLTRSDKARGKSDNVPSEEVVKKMKNYWRQLLNAKLITQRKFDNLTKAERGGLSELDKAGFIKRQLVETRQITKHVAQILDSRMNTKYDENDKLIREVKVITLKSKLVSDFRKDFQFYKVREINNYHHAHDAYLNAVVGTALIKKYPKLESEFVYGDYKVYDVRKMIAKSEQEIGKATAKYFFYSNIMNFFKTEITLANGEIRKRPLIETNGETGEIVWDKGRDFATVRKVLSMPQVNIVKKTEVQTGGFSKESILPKRNSDKLIARKKDWDPKKYGGFDSPTVAYSVLVVAKVEKGKSKKLKSVKELLGITIMERSSFEKNPIDFLEAKGYKEVKKDLIIKLPKYSLFELENGRKRMLASAGELQKGNELALPSKYVNFLYLASHYEKLKGSPEDNEQKQLFVEQHKHYLDEIIEQISEFSKRVILADANLDKVLSAYNKHRDKPIREQAENIIHLFTLTNLGAPAAFKYFDTTIDRKRYTSTKEVLDATLIHQSITGLYETRIDLSQLGGDGGAEAAAKEAAAKEAAAKEAAAKALEAEAAAKEAAAKEAAAKEAAAKAGGTLNIEDEYRLHETSKEPDVSLGSTWLSDFPQAWAETGGMGLAVRQAPLIIPLKATSTPVSIKQYPMSQEARLGIKPHIQRLLDQGILVPCQSPWNTPLLPVKKPGTNDYRPVQDLREVNKRVEDIHPTVPNPYNLLSGLPPSHQWYTVLDLKDAFFCLRLHPTSQPLFAFEWRDPEMGISGQLTWTRLPQGFKNSPTLFNEALHRDLAGFRIQHPDLILLQYVDDLLLAATSELDCQQGTRALLQTLGDLGYRASAKKAQICQKQVKYLGYLLKEGQRWLTEARKETVMGQPIPKTPRQLREFLGKAGFCRLFIPGFAEMAAPLYPLTKPGTLFNWGPDQQKAFQEIKQALLTAPALGLPDLTKPFELFVDEKQGYAKGVLTQKLGPWRRPVAYLSKKLDPVAAGWPPCLRMVAAIAVLTKDAGKLTMGQPLVILAPHAVEALVKQPPDRWLSNARMTHYQALLLDTDRVQFGPVVALNPATLLPLPEEGLQHDCLDILAEAHGTRSDLMDQPLPDADHTWYTDGSSFLQEGQRKAGAAVTTETEVIWARALPAGTSAQRAELIALTQALKMAEGKKLNVYTDSRYAFATAHIHGEIYRRRGWLTSEGKEIKNKDEILALLKALFLPKRLSIIHCPGHQKGNSAEARGNRMADQAAREVATRETPETSTLLAGKRTADGSEFEKRTADGSEFESPKKKAKVE

SEQ ID NO: 2344 - protein, 2096 aa, synthetic construct
MPAAKRVKLDGGDKKYSIGLDIGTNSVGWAVITDEYKVPSKKFKVLGNTDRHSIKKNLIGALLFDSGETAEATRLKRTARRRYTRRKNRICYLQEIFSNEMAKVDDSFFHRLEESFLVEEDKKHERHPIFGNIVDEVAYHEKYPTIYHLRKKLVDSTDKADLRLIYLALAHMIKFRGHFLIEGDLNPDNSDVDKLFIQLVQTYNQLFEENPINASGVDAKAILSARLSKSRRLENLIAQLPGEKKNGLFGNLIALSLGLTPNFKSNFDLAEDAKLQLSKDTYDDDLDNLLAQIGDQYADLFLAAKNLSDAILLSDILRVNTEITKAPLSASMIKRYDEHHQDLTLLKALVRQQLPEKYKEIFFDQSKNGYAGYIDGGASQEEFYKFIKPILEKMDGTEELLVKLNREDLLRKQRTFDNGSIPHQIHLGELHAILRRQEDFYPFLKDNREKIEKILTFRIPYYVGPLARGNSRFAWMTRKSEETITPWNFEEVVDKGASAQSFIERMTNFDKNLPNEKVLPKHSLLYEYFTVYNELTKVKYVTEGMRKPAFLSGEQKKAIVDLLFKTNRKVTVKQLKEDYFKKIECFDSVEISGVEDRFNASLGTYHDLLKIIKDKDFLDNEENEDILEDIVLTLTLFEDREMIEERLKTYAHLFDDKVMKQLKRRRYTGWGRLSRKLINGIRDKQSGKTILDFLKSDGFANRNFMQLIHDDSLTFKEDIQKAQVSGQGDSLHEHIANLAGSPAIKKGILQTVKVVDELVKVMGRHKPENIVIEMARENQTTQKGQKNSRERMKRIEEGIKELGSQILKEHPVENTQLQNEKLYLYYLQNGRDMYVDQELDINRLSDYDVDHIVPQSFLKDDSIDNKVLTRSDKARGKSDNVPSEEVVKKMKNYWRQLLNAKLITQRKFDNLTKAERGGLSELDKAGFIKRQLVETRQITKHVAQILDSRMNTKYDENDKLIREVKVITLKSKLVSDFRKDFQFYKVREINNYHHAHDAYLNAVVGTALIKKYPKLESEFVYGDYKVYDVRKMIAKSEQEIGKATAKYFFYSNIMNFFKTEITLANGEIRKRPLIETNGETGEIVWDKGRDFATVRKVLSMPQVNIVKKTEVQTGGFSKESILPKRNSDKLIARKKDWDPKKYGGFDSPTVAYSVLVVAKVEKGKSKKLKSVKELLGITIMERSSFEKNPIDFLEAKGYKEVKKDLIIKLPKYSLFELENGRKRMLASAGELQKGNELALPSKYVNFLYLASHYEKLKGSPEDNEQKQLFVEQHKHYLDEIIEQISEFSKRVILADANLDKVLSAYNKHRDKPIREQAENIIHLFTLTNLGAPAAFKYFDTTIDRKRYTSTKEVLDATLIHQSITGLYETRIDLSQLGGDGGEAAAKGGGGGSGGTLNIEDEYRLHETSKEPDVSLGSTWLSDFPQAWAETGGMGLAVRQAPLIIPLKATSTPVSIKQYPMSQEARLGIKPHIQRLLDQGILVPCQSPWNTPLLPVKKPGTNDYRPVQDLREVNKRVEDIHPTVPNPYNLLSGLPPSHQWYTVLDLKDAFFCLRLHPTSQPLFAFEWRDPEMGISGQLTWTRLPQGFKNSPTLFNEALHRDLAGFRIQHPDLILLQYVDDLLLAATSELDCQQGTRALLQTLGDLGYRASAKKAQICQKQVKYLGYLLKEGQRWLTEARKETVMGQPIPKTPRQLREFLGKAGFCRLFIPGFAEMAAPLYPLTKPGTLFNWGPDQQKAFQEIKQALLTAPALGLPDLTKPFELFVDEKQGYAKGVLTQKLGPWRRPVAYLSKKLDPVAAGWPPCLRMVAAIAVLTKDAGKLTMGQPLVILAPHAVEALVKQPPDRWLSNARMTHYQALLLDTDRVQFGPVVALNPATLLPLPEEGLQHDCLDILAEAHGTRSDLMDQPLPDADHTWYTDGSSFLQEGQRKAGAAVTTETEVIWARALPAGTSAQRAELIALTQALKMAEGKKLNVYTDSRYAFATAHIHGEIYRRRGWLTSEGKEIKNKDEILALLKALFLPKRLSIIHCPGHQKGNSAEARGNRMADQAAREVATRETPETSTLLAGKRTADGSEFEKRTADGSEFESPKKKAKVE

SEQ ID NO: 2345 - protein, 2096 aa, synthetic construct
MPAAKRVKLDGGDKKYSIGLDIGTNSVGWAVITDEYKVPSKKFKVLGNTDRHSIKKNLIGALLFDSGETAEATRLKRTARRRYTRRKNRICYLQEIFSNEMAKVDDSFFHRLEESFLVEEDKKHERHPIFGNIVDEVAYHEKYPTIYHLRKKLVDSTDKADLRLIYLALAHMIKFRGHFLIEGDLNPDNSDVDKLFIQLVQTYNQLFEENPINASGVDAKAILSARLSKSRRLENLIAQLPGEKKNGLFGNLIALSLGLTPNFKSNFDLAEDAKLQLSKDTYDDDLDNLLAQIGDQYADLFLAAKNLSDAILLSDILRVNTEITKAPLSASMIKRYDEHHQDLTLLKALVRQQLPEKYKEIFFDQSKNGYAGYIDGGASQEEFYKFIKPILEKMDGTEELLVKLNREDLLRKQRTFDNGSIPHQIHLGELHAILRRQEDFYPFLKDNREKIEKILTFRIPYYVGPLARGNSRFAWMTRKSEETITPWNFEEVVDKGASAQSFIERMTNFDKNLPNEKVLPKHSLLYEYFTVYNELTKVKYVTEGMRKPAFLSGEQKKAIVDLLFKTNRKVTVKQLKEDYFKKIECFDSVEISGVEDRFNASLGTYHDLLKIIKDKDFLDNEENEDILEDIVLTLTLFEDREMIEERLKTYAHLFDDKVMKQLKRRRYTGWGRLSRKLINGIRDKQSGKTILDFLKSDGFANRNFMQLIHDDSLTFKEDIQKAQVSGQGDSLHEHIANLAGSPAIKKGILQTVKVVDELVKVMGRHKPENIVIEMARENQTTQKGQKNSRERMKRIEEGIKELGSQILKEHPVENTQLQNEKLYLYYLQNGRDMYVDQELDINRLSDYDVDHIVPQSFLKDDSIDNKVLTRSDKARGKSDNVPSEEVVKKMKNYWRQLLNAKLITQRKFDNLTKAERGGLSELDKAGFIKRQLVETRQITKHVAQILDSRMNTKYDENDKLIREVKVITLKSKLVSDFRKDFQFYKVREINNYHHAHDAYLNAVVGTALIKKYPKLESEFVYGDYKVYDVRKMIAKSEQEIGKATAKYFFYSNIMNFFKTEITLANGEIRKRPLIETNGETGEIVWDKGRDFATVRKVLSMPQVNIVKKTEVQTGGFSKESILPKRNSDKLIARKKDWDPKKYGGFDSPTVAYSVLVVAKVEKGKSKKLKSVKELLGITIMERSSFEKNPIDFLEAKGYKEVKKDLIIKLPKYSLFELENGRKRMLASAGELQKGNELALPSKYVNFLYLASHYEKLKGSPEDNEQKQLFVEQHKHYLDEIIEQISEFSKRVILADANLDKVLSAYNKHRDKPIREQAENIIHLFTLTNLGAPAAFKYFDTTIDRKRYTSTKEVLDATLIHQSITGLYETRIDLSQLGGDGGGSSPAPEAAAKGGTLNIEDEYRLHETSKEPDVSLGSTWLSDFPQAWAETGGMGLAVRQAPLIIPLKATSTPVSIKQYPMSQEARLGIKPHIQRLLDQGILVPCQSPWNTPLLPVKKPGTNDYRPVQDLREVNKRVEDIHPTVPNPYNLLSGLPPSHQWYTVLDLKDAFFCLRLHPTSQPLFAFEWRDPEMGISGQLTWTRLPQGFKNSPTLFNEALHRDLAGFRIQHPDLILLQYVDDLLLAATSELDCQQGTRALLQTLGDLGYRASAKKAQICQKQVKYLGYLLKEGQRWLTEARKETVMGQPIPKTPRQLREFLGKAGFCRLFIPGFAEMAAPLYPLTKPGTLFNWGPDQQKAFQEIKQALLTAPALGLPDLTKPFELFVDEKQGYAKGVLTQKLGPWRRPVAYLSKKLDPVAAGWPPCLRMVAAIAVLTKDAGKLTMGQPLVILAPHAVEALVKQPPDRWLSNARMTHYQALLLDTDRVQFGPVVALNPATLLPLPEEGLQHDCLDILAEAHGTRSDLMDQPLPDADHTWYTDGSSFLQEGQRKAGAAVTTETEVIWARALPAGTSAQRAELIALTQALKMAEGKKLNVYTDSRYAFATAHIHGEIYRRRGWLTSEGKEIKNKDEILALLKALFLPKRLSIIHCPGHQKGNSAEARGNRMADQAAREVATRETPETSTLLAGKRTADGSEFEKRTADGSEFESPKKKAKVE

SEQ ID NO: 2346 - protein, 2094 aa, synthetic construct
MPAAKRVKLDGGDKKYSIGLDIGTNSVGWAVITDEYKVPSKKFKVLGNTDRHSIKKNLIGALLFDSGETAEATRLKRTARRRYTRRKNRICYLQEIFSNEMAKVDDSFFHRLEESFLVEEDKKHERHPIFGNIVDEVAYHEKYPTIYHLRKKLVDSTDKADLRLIYLALAHMIKFRGHFLIEGDLNPDNSDVDKLFIQLVQTYNQLFEENPINASGVDAKAILSARLSKSRRLENLIAQLPGEKKNGLFGNLIALSLGLTPNFKSNFDLAEDAKLQLSKDTYDDDLDNLLAQIGDQYADLFLAAKNLSDAILLSDILRVNTEITKAPLSASMIKRYDEHHQDLTLLKALVRQQLPEKYKEIFFDQSKNGYAGYIDGGASQEEFYKFIKPILEKMDGTEELLVKLNREDLLRKQRTFDNGSIPHQIHLGELHAILRRQEDFYPFLKDNREKIEKILTFRIPYYVGPLARGNSRFAWMTRKSEETITPWNFEEVVDKGASAQSFIERMTNFDKNLPNEKVLPKHSLLYEYFTVYNELTKVKYVTEGMRKPAFLSGEQKKAIVDLLFKTNRKVTVKQLKEDYFKKIECFDSVEISGVEDRFNASLGTYHDLLKIIKDKDFLDNEENEDILEDIVLTLTLFEDREMIEERLKTYAHLFDDKVMKQLKRRRYTGWGRLSRKLINGIRDKQSGKTILDFLKSDGFANRNFMQLIHDDSLTFKEDIQKAQVSGQGDSLHEHIANLAGSPAIKKGILQTVKVVDELVKVMGRHKPENIVIEMARENQTTQKGQKNSRERMKRIEEGIKELGSQILKEHPVENTQLQNEKLYLYYLQNGRDMYVDQELDINRLSDYDVDHIVPQSFLKDDSIDNKVLTRSDKARGKSDNVPSEEVVKKMKNYWRQLLNAKLITQRKFDNLTKAERGGLSELDKAGFIKRQLVETRQITKHVAQILDSRMNTKYDENDKLIREVKVITLKSKLVSDFRKDFQFYKVREINNYHHAHDAYLNAVVGTALIKKYPKLESEFVYGDYKVYDVRKMIAKSEQEIGKATAKYFFYSNIMNFFKTEITLANGEIRKRPLIETNGETGEIVWDKGRDFATVRKVLSMPQVNIVKKTEVQTGGFSKESILPKRNSDKLIARKKDWDPKKYGGFDSPTVAYSVLVVAKVEKGKSKKLKSVKELLGITIMERSSFEKNPIDFLEAKGYKEVKKDLIIKLPKYSLFELENGRKRMLASAGELQKGNELALPSKYVNFLYLASHYEKLKGSPEDNEQKQLFVEQHKHYLDEIIEQISEFSKRVILADANLDKVLSAYNKHRDKPIREQAENIIHLFTLTNLGAPAAFKYFDTTIDRKRYTSTKEVLDATLIHQSITGLYETRIDLSQLGGDGGGGGGSSPAPGGTLNIEDEYRLHETSKEPDVSLGSTWLSDFPQAWAETGGMGLAVRQAPLIIPLKATSTPVSIKQYPMSQEARLGIKPHIQRLLDQGILVPCQSPWNTPLLPVKKPGTNDYRPVQDLREVNKRVEDIHPTVPNPYNLLSGLPPSHQWYTVLDLKDAFFCLRLHPTSQPLFAFEWRDPEMGISGQLTWTRLPQGFKNSPTLFNEALHRDLAGFRIQHPDLILLQYVDDLLLAATSELDCQQGTRALLQTLGDLGYRASAKKAQICQKQVKYLGYLLKEGQRWLTEARKETVMGQPIPKTPRQLREFLGKAGFCRLFIPGFAEMAAPLYPLTKPGTLFNWGPDQQKAFQEIKQALLTAPALGLPDLTKPFELFVDEKQGYAKGVLTQKLGPWRRPVAYLSKKLDPVAAGWPPCLRMVAAIAVLTKDAGKLTMGQPLVILAPHAVEALVKQPPDRWLSNARMTHYQALLLDTDRVQFGPVVALNPATLLPLPEEGLQHDCLDILAEAHGTRSDLMDQPLPDADHTWYTDGSSFLQEGQRKAGAAVTTETEVIWARALPAGTSAQRAELIALTQALKMAEGKKLNVYTDSRYAFATAHIHGEIYRRRGWLTSEGKEIKNKDEILALLKALFLPKRLSIIHCPGHQKGNSAEARGNRMADQAAREVATRETPETSTLLAGKRTADGSEFEKRTADGSEFESPKKKAKVE

SEQ ID NO: 2347 - protein, 2096 aa, synthetic construct
MPAAKRVKLDGGDKKYSIGLDIGTNSVGWAVITDEYKVPSKKFKVLGNTDRHSIKKNLIGALLFDSGETAEATRLKRTARRRYTRRKNRICYLQEIFSNEMAKVDDSFFHRLEESFLVEEDKKHERHPIFGNIVDEVAYHEKYPTIYHLRKKLVDSTDKADLRLIYLALAHMIKFRGHFLIEGDLNPDNSDVDKLFIQLVQTYNQLFEENPINASGVDAKAILSARLSKSRRLENLIAQLPGEKKNGLFGNLIALSLGLTPNFKSNFDLAEDAKLQLSKDTYDDDLDNLLAQIGDQYADLFLAAKNLSDAILLSDILRVNTEITKAPLSASMIKRYDEHHQDLTLLKALVRQQLPEKYKEIFFDQSKNGYAGYIDGGASQEEFYKFIKPILEKMDGTEELLVKLNREDLLRKQRTFDNGSIPHQIHLGELHAILRRQEDFYPFLKDNREKIEKILTFRIPYYVGPLARGNSRFAWMTRKSEETITPWNFEEVVDKGASAQSFIERMTNFDKNLPNEKVLPKHSLLYEYFTVYNELTKVKYVTEGMRKPAFLSGEQKKAIVDLLFKTNRKVTVKQLKEDYFKKIECFDSVEISGVEDRFNASLGTYHDLLKIIKDKDFLDNEENEDILEDIVLTLTLFEDREMIEERLKTYAHLFDDKVMKQLKRRRYTGWGRLSRKLINGIRDKQSGKTILDFLKSDGFANRNFMQLIHDDSLTFKEDIQKAQVSGQGDSLHEHIANLAGSPAIKKGILQTVKVVDELVKVMGRHKPENIVIEMARENQTTQKGQKNSRERMKRIEEGIKELGSQILKEHPVENTQLQNEKLYLYYLQNGRDMYVDQELDINRLSDYDVDHIVPQSFLKDDSIDNKVLTRSDKARGKSDNVPSEEVVKKMKNYWRQLLNAKLITQRKFDNLTKAERGGLSELDKAGFIKRQLVETRQITKHVAQILDSRMNTKYDENDKLIREVKVITLKSKLVSDFRKDFQFYKVREINNYHHAHDAYLNAVVGTALIKKYPKLESEFVYGDYKVYDVRKMIAKSEQEIGKATAKYFFYSNIMNFFKTEITLANGEIRKRPLIETNGETGEIVWDKGRDFATVRKVLSMPQVNIVKKTEVQTGGFSKESILPKRNSDKLIARKKDWDPKKYGGFDSPTVAYSVLVVAKVEKGKSKKLKSVKELLGITIMERSSFEKNPIDFLEAKGYKEVKKDLIIKLPKYSLFELENGRKRMLASAGELQKGNELALPSKYVNFLYLASHYEKLKGSPEDNEQKQLFVEQHKHYLDEIIEQISEFSKRVILADANLDKVLSAYNKHRDKPIREQAENIIHLFTLTNLGAPAAFKYFDTTIDRKRYTSTKEVLDATLIHQSITGLYETRIDLSQLGGDGGPAPEAAAKGSSGGTLNIEDEYRLHETSKEPDVSLGSTWLSDFPQAWAETGGMGLAVRQAPLIIPLKATSTPVSIKQYPMSQEARLGIKPHIQRLLDQGILVPCQSPWNTPLLPVKKPGTNDYRPVQDLREVNKRVEDIHPTVPNPYNLLSGLPPSHQWYTVLDLKDAFFCLRLHPTSQPLFAFEWRDPEMGISGQLTWTRLPQGFKNSPTLFNEALHRDLAGFRIQHPDLILLQYVDDLLLAATSELDCQQGTRALLQTLGDLGYRASAKKAQICQKQVKYLGYLLKEGQRWLTEARKETVMGQPIPKTPRQLREFLGKAGFCRLFIPGFAEMAAPLYPLTKPGTLFNWGPDQQKAFQEIKQALLTAPALGLPDLTKPFELFVDEKQGYAKGVLTQKLGPWRRPVAYLSKKLDPVAAGWPPCLRMVAAIAVLTKDAGKLTMGQPLVILAPHAVEALVKQPPDRWLSNARMTHYQALLLDTDRVQFGPVVALNPATLLPLPEEGLQHDCLDILAEAHGTRSDLMDQPLPDADHTWYTDGSSFLQEGQRKAGAAVTTETEVIWARALPAGTSAQRAELIALTQALKMAEGKKLNVYTDSRYAFATAHIHGEIYRRRGWLTSEGKEIKNKDEILALLKALFLPKRLSIIHCPGHQKGNSAEARGNRMADQAAREVATRETPETSTLLAGKRTADGSEFEKRTADGSEFESPKKKAKVE

SEQ ID NO: 2348 - protein, 2093 aa, synthetic construct
MPAAKRVKLDGGDKKYSIGLDIGTNSVGWAVITDEYKVPSKKFKVLGNTDRHSIKKNLIGALLFDSGETAEATRLKRTARRRYTRRKNRICYLQEIFSNEMAKVDDSFFHRLEESFLVEEDKKHERHPIFGNIVDEVAYHEKYPTIYHLRKKLVDSTDKADLRLIYLALAHMIKFRGHFLIEGDLNPDNSDVDKLFIQLVQTYNQLFEENPINASGVDAKAILSARLSKSRRLENLIAQLPGEKKNGLFGNLIALSLGLTPNFKSNFDLAEDAKLQLSKDTYDDDLDNLLAQIGDQYADLFLAAKNLSDAILLSDILRVNTEITKAPLSASMIKRYDEHHQDLTLLKALVRQQLPEKYKEIFFDQSKNGYAGYIDGGASQEEFYKFIKPILEKMDGTEELLVKLNREDLLRKQRTFDNGSIPHQIHLGELHAILRRQEDFYPFLKDNREKIEKILTFRIPYYVGPLARGNSRFAWMTRKSEETITPWNFEEVVDKGASAQSFIERMTNFDKNLPNEKVLPKHSLLYEYFTVYNELTKVKYVTEGMRKPAFLSGEQKKAIVDLLFKTNRKVTVKQLKEDYFKKIECFDSVEISGVEDRFNASLGTYHDLLKIIKDKDFLDNEENEDILEDIVLTLTLFEDREMIEERLKTYAHLFDDKVMKQLKRRRYTGWGRLSRKLINGIRDKQSGKTILDFLKSDGFANRNFMQLIHDDSLTFKEDIQKAQVSGQGDSLHEHIANLAGSPAIKKGILQTVKVVDELVKVMGRHKPENIVIEMARENQTTQKGQKNSRERMKRIEEGIKELGSQILKEHPVENTQLQNEKLYLYYLQNGRDMYVDQELDINRLSDYDVDHIVPQSFLKDDSIDNKVLTRSDKARGKSDNVPSEEVVKKMKNYWRQLLNAKLITQRKFDNLTKAERGGLSELDKAGFIKRQLVETRQITKHVAQILDSRMNTKYDENDKLIREVKVITLKSKLVSDFRKDFQFYKVREINNYHHAHDAYLNAVVGTALIKKYPKLESEFVYGDYKVYDVRKMIAKSEQEIGKATAKYFFYSNIMNFFKTEITLANGEIRKRPLIETNGETGEIVWDKGRDFATVRKVLSMPQVNIVKKTEVQTGGFSKESILPKRNSDKLIARKKDWDPKKYGGFDSPTVAYSVLVVAKVEKGKSKKLKSVKELLGITIMERSSFEKNPIDFLEAKGYKEVKKDLIIKLPKYSLFELENGRKRMLASAGELQKGNELALPSKYVNFLYLASHYEKLKGSPEDNEQKQLFVEQHKHYLDEIIEQISEFSKRVILADANLDKVLSAYNKHRDKPIREQAENIIHLFTLTNLGAPAAFKYFDTTIDRKRYTSTKEVLDATLIHQSITGLYETRIDLSQLGGDGGEAAAKGGGGGTLNIEDEYRLHETSKEPDVSLGSTWLSDFPQAWAETGGMGLAVRQAPLIIPLKATSTPVSIKQYPMSQEARLGIKPHIQRLLDQGILVPCQSPWNTPLLPVKKPGTNDYRPVQDLREVNKRVEDIHPTVPNPYNLLSGLPPSHQWYTVLDLKDAFFCLRLHPTSQPLFAFEWRDPEMGISGQLTWTRLPQGFKNSPTLFNEALHRDLAGFRIQHPDLILLQYVDDLLLAATSELDCQQGTRALLQTLGDLGYRASAKKAQICQKQVKYLGYLLKEGQRWLTEARKETVMGQPIPKTPRQLREFLGKAGFCRLFIPGFAEMAAPLYPLTKPGTLFNWGPDQQKAFQEIKQALLTAPALGLPDLTKPFELFVDEKQGYAKGVLTQKLGPWRRPVAYLSKKLDPVAAGWPPCLRMVAAIAVLTKDAGKLTMGQPLVILAPHAVEALVKQPPDRWLSNARMTHYQALLLDTDRVQFGPVVALNPATLLPLPEEGLQHDCLDILAEAHGTRSDLMDQPLPDADHTWYTDGSSFLQEGQRKAGAAVTTETEVIWARALPAGTSAQRAELIALTQALKMAEGKKLNVYTDSRYAFATAHIHGEIYRRRGWLTSEGKEIKNKDEILALLKALFLPKRLSIIHCPGHQKGNSAEARGNRMADQAAREVATRETPETSTLLAGKRTADGSEFEKRTADGSEFESPKKKAKVE

SEQ ID NO: 2349 - protein, 2093 aa, synthetic construct
MPAAKRVKLDGGDKKYSIGLDIGTNSVGWAVITDEYKVPSKKFKVLGNTDRHSIKKNLIGALLFDSGETAEATRLKRTARRRYTRRKNRICYLQEIFSNEMAKVDDSFFHRLEESFLVEEDKKHERHPIFGNIVDEVAYHEKYPTIYHLRKKLVDSTDKADLRLIYLALAHMIKFRGHFLIEGDLNPDNSDVDKLFIQLVQTYNQLFEENPINASGVDAKAILSARLSKSRRLENLIAQLPGEKKNGLFGNLIALSLGLTPNFKSNFDLAEDAKLQLSKDTYDDDLDNLLAQIGDQYADLFLAAKNLSDAILLSDILRVNTEITKAPLSASMIKRYDEHHQDLTLLKALVRQQLPEKYKEIFFDQSKNGYAGYIDGGASQEEFYKFIKPILEKMDGTEELLVKLNREDLLRKQRTFDNGSIPHQIHLGELHAILRRQEDFYPFLKDNREKIEKILTFRIPYYVGPLARGNSRFAWMTRKSEETITPWNFEEVVDKGASAQSFIERMTNFDKNLPNEKVLPKHSLLYEYFTVYNELTKVKYVTEGMRKPAFLSGEQKKAIVDLLFKTNRKVTVKQLKEDYFKKIECFDSVEISGVEDRFNASLGTYHDLLKIIKDKDFLDNEENEDILEDIVLTLTLFEDREMIEERLKTYAHLFDDKVMKQLKRRRYTGWGRLSRKLINGIRDKQSGKTILDFLKSDGFANRNFMQLIHDDSLTFKEDIQKAQVSGQGDSLHEHIANLAGSPAIKKGILQTVKVVDELVKVMGRHKPENIVIEMARENQTTQKGQKNSRERMKRIEEGIKELGSQILKEHPVENTQLQNEKLYLYYLQNGRDMYVDQELDINRLSDYDVDHIVPQSFLKDDSIDNKVLTRSDKARGKSDNVPSEEVVKKMKNYWRQLLNAKLITQRKFDNLTKAERGGLSELDKAGFIKRQLVETRQITKHVAQILDSRMNTKYDENDKLIREVKVITLKSKLVSDFRKDFQFYKVREINNYHHAHDAYLNAVVGTALIKKYPKLESEFVYGDYKVYDVRKMIAKSEQEIGKATAKYFFYSNIMNFFKTEITLANGEIRKRPLIETNGETGEIVWDKGRDFATVRKVLSMPQVNIVKKTEVQTGGFSKESILPKRNSDKLIARKKDWDPKKYGGFDSPTVAYSVLVVAKVEKGKSKKLKSVKELLGITIMERSSFEKNPIDFLEAKGYKEVKKDLIIKLPKYSLFELENGRKRMLASAGELQKGNELALPSKYVNFLYLASHYEKLKGSPEDNEQKQLFVEQHKHYLDEIIEQISEFSKRVILADANLDKVLSAYNKHRDKPIREQAENIIHLFTLTNLGAPAAFKYFDTTIDRKRYTSTKEVLDATLIHQSITGLYETRIDLSQLGGDGGGGGGGGGGGGTLNIEDEYRLHETSKEPDVSLGSTWLSDFPQAWAETGGMGLAVRQAPLIIPLKATSTPVSIKQYPMSQEARLGIKPHIQRLLDQGILVPCQSPWNTPLLPVKKPGTNDYRPVQDLREVNKRVEDIHPTVPNPYNLLSGLPPSHQWYTVLDLKDAFFCLRLHPTSQPLFAFEWRDPEMGISGQLTWTRLPQGFKNSPTLFNEALHRDLAGFRIQHPDLILLQYVDDLLLAATSELDCQQGTRALLQTLGDLGYRASAKKAQICQKQVKYLGYLLKEGQRWLTEARKETVMGQPIPKTPRQLREFLGKAGFCRLFIPGFAEMAAPLYPLTKPGTLFNWGPDQQKAFQEIKQALLTAPALGLPDLTKPFELFVDEKQGYAKGVLTQKLGPWRRPVAYLSKKLDPVAAGWPPCLRMVAAIAVLTKDAGKLTMGQPLVILAPHAVEALVKQPPDRWLSNARMTHYQALLLDTDRVQFGPVVALNPATLLPLPEEGLQHDCLDILAEAHGTRSDLMDQPLPDADHTWYTDGSSFLQEGQRKAGAAVTTETEVIWARALPAGTSAQRAELIALTQALKMAEGKKLNVYTDSRYAFATAHIHGEIYRRRGWLTSEGKEIKNKDEILALLKALFLPKRLSIIHCPGHQKGNSAEARGNRMADQAAREVATRETPETSTLLAGKRTADGSEFEKRTADGSEFESPKKKAKVE

SEQ ID NO: 2350 - protein, 2093 aa, synthetic construct
MPAAKRVKLDGGDKKYSIGLDIGTNSVGWAVITDEYKVPSKKFKVLGNTDRHSIKKNLIGALLFDSGETAEATRLKRTARRRYTRRKNRICYLQEIFSNEMAKVDDSFFHRLEESFLVEEDKKHERHPIFGNIVDEVAYHEKYPTIYHLRKKLVDSTDKADLRLIYLALAHMIKFRGHFLIEGDLNPDNSDVDKLFIQLVQTYNQLFEENPINASGVDAKAILSARLSKSRRLENLIAQLPGEKKNGLFGNLIALSLGLTPNFKSNFDLAEDAKLQLSKDTYDDDLDNLLAQIGDQYADLFLAAKNLSDAILLSDILRVNTEITKAPLSASMIKRYDEHHQDLTLLKALVRQQLPEKYKEIFFDQSKNGYAGYIDGGASQEEFYKFIKPILEKMDGTEELLVKLNREDLLRKQRTFDNGSIPHQIHLGELHAILRRQEDFYPFLKDNREKIEKILTFRIPYYVGPLARGNSRFAWMTRKSEETITPWNFEEVVDKGASAQSFIERMTNFDKNLPNEKVLPKHSLLYEYFTVYNELTKVKYVTEGMRKPAFLSGEQKKAIVDLLFKTNRKVTVKQLKEDYFKKIECFDSVEISGVEDRFNASLGTYHDLLKIIKDKDFLDNEENEDILEDIVLTLTLFEDREMIEERLKTYAHLFDDKVMKQLKRRRYTGWGRLSRKLINGIRDKQSGKTILDFLKSDGFANRNFMQLIHDDSLTFKEDIQKAQVSGQGDSLHEHIANLAGSPAIKKGILQTVKVVDELVKVMGRHKPENIVIEMARENQTTQKGQKNSRERMKRIEEGIKELGSQILKEHPVENTQLQNEKLYLYYLQNGRDMYVDQELDINRLSDYDVDHIVPQSFLKDDSIDNKVLTRSDKARGKSDNVPSEEVVKKMKNYWRQLLNAKLITQRKFDNLTKAERGGLSELDKAGFIKRQLVETRQITKHVAQILDSRMNTKYDENDKLIREVKVITLKSKLVSDFRKDFQFYKVREINNYHHAHDAYLNAVVGTALIKKYPKLESEFVYGDYKVYDVRKMIAKSEQEIGKATAKYFFYSNIMNFFKTEITLANGEIRKRPLIETNGETGEIVWDKGRDFATVRKVLSMPQVNIVKKTEVQTGGFSKESILPKRNSDKLIARKKDWDPKKYGGFDSPTVAYSVLVVAKVEKGKSKKLKSVKELLGITIMERSSFEKNPIDFLEAKGYKEVKKDLIIKLPKYSLFELENGRKRMLASAGELQKGNELALPSKYVNFLYLASHYEKLKGSPEDNEQKQLFVEQHKHYLDEIIEQISEFSKRVILADANLDKVLSAYNKHRDKPIREQAENIIHLFTLTNLGAPAAFKYFDTTIDRKRYTSTKEVLDATLIHQSITGLYETRIDLSQLGGDGGEAAAKGSSGGTLNIEDEYRLHETSKEPDVSLGSTWLSDFPQAWAETGGMGLAVRQAPLIIPLKATSTPVSIKQYPMSQEARLGIKPHIQRLLDQGILVPCQSPWNTPLLPVKKPGTNDYRPVQDLREVNKRVEDIHPTVPNPYNLLSGLPPSHQWYTVLDLKDAFFCLRLHPTSQPLFAFEWRDPEMGISGQLTWTRLPQGFKNSPTLFNEALHRDLAGFRIQHPDLILLQYVDDLLLAATSELDCQQGTRALLQTLGDLGYRASAKKAQICQKQVKYLGYLLKEGQRWLTEARKETVMGQPIPKTPRQLREFLGKAGFCRLFIPGFAEMAAPLYPLTKPGTLFNWGPDQQKAFQEIKQALLTAPALGLPDLTKPFELFVDEKQGYAKGVLTQKLGPWRRPVAYLSKKLDPVAAGWPPCLRMVAAIAVLTKDAGKLTMGQPLVILAPHAVEALVKQPPDRWLSNARMTHYQALLLDTDRVQFGPVVALNPATLLPLPEEGLQHDCLDILAEAHGTRSDLMDQPLPDADHTWYTDGSSFLQEGQRKAGAAVTTETEVIWARALPAGTSAQRAELIALTQALKMAEGKKLNVYTDSRYAFATAHIHGEIYRRRGWLTSEGKEIKNKDEILALLKALFLPKRLSIIHCPGHQKGNSAEARGNRMADQAAREVATRETPETSTLLAGKRTADGSEFEKRTADGSEFESPKKKAKVE

SEQ ID NO: 2351 - protein, 2096 aa, synthetic construct
MPAAKRVKLDGGDKKYSIGLDIGTNSVGWAVITDEYKVPSKKFKVLGNTDRHSIKKNLIGALLFDSGETAEATRLKRTARRRYTRRKNRICYLQEIFSNEMAKVDDSFFHRLEESFLVEEDKKHERHPIFGNIVDEVAYHEKYPTIYHLRKKLVDSTDKADLRLIYLALAHMIKFRGHFLIEGDLNPDNSDVDKLFIQLVQTYNQLFEENPINASGVDAKAILSARLSKSRRLENLIAQLPGEKKNGLFGNLIALSLGLTPNFKSNFDLAEDAKLQLSKDTYDDDLDNLLAQIGDQYADLFLAAKNLSDAILLSDILRVNTEITKAPLSASMIKRYDEHHQDLTLLKALVRQQLPEKYKEIFFDQSKNGYAGYIDGGASQEEFYKFIKPILEKMDGTEELLVKLNREDLLRKQRTFDNGSIPHQIHLGELHAILRRQEDFYPFLKDNREKIEKILTFRIPYYVGPLARGNSRFAWMTRKSEETITPWNFEEVVDKGASAQSFIERMTNFDKNLPNEKVLPKHSLLYEYFTVYNELTKVKYVTEGMRKPAFLSGEQKKAIVDLLFKTNRKVTVKQLKEDYFKKIECFDSVEISGVEDRFNASLGTYHDLLKIIKDKDFLDNEENEDILEDIVLTLTLFEDREMIEERLKTYAHLFDDKVMKQLKRRRYTGWGRLSRKLINGIRDKQSGKTILDFLKSDGFANRNFMQLIHDDSLTFKEDIQKAQVSGQGDSLHEHIANLAGSPAIKKGILQTVKVVDELVKVMGRHKPENIVIEMARENQTTQKGQKNSRERMKRIEEGIKELGSQILKEHPVENTQLQNEKLYLYYLQNGRDMYVDQELDINRLSDYDVDHIVPQSFLKDDSIDNKVLTRSDKARGKSDNVPSEEVVKKMKNYWRQLLNAKLITQRKFDNLTKAERGGLSELDKAGFIKRQLVETRQITKHVAQILDSRMNTKYDENDKLIREVKVITLKSKLVSDFRKDFQFYKVREINNYHHAHDAYLNAVVGTALIKKYPKLESEFVYGDYKVYDVRKMIAKSEQEIGKATAKYFFYSNIMNFFKTEITLANGEIRKRPLIETNGETGEIVWDKGRDFATVRKVLSMPQVNIVKKTEVQTGGFSKESILPKRNSDKLIARKKDWDPKKYGGFDSPTVAYSVLVVAKVEKGKSKKLKSVKELLGITIMERSSFEKNPIDFLEAKGYKEVKKDLIIKLPKYSLFELENGRKRMLASAGELQKGNELALPSKYVNFLYLASHYEKLKGSPEDNEQKQLFVEQHKHYLDEIIEQISEFSKRVILADANLDKVLSAYNKHRDKPIREQAENIIHLFTLTNLGAPAAFKYFDTTIDRKRYTSTKEVLDATLIHQSITGLYETRIDLSQLGGDGGGGGGGSEAAAKGGTLNIEDEYRLHETSKEPDVSLGSTWLSDFPQAWAETGGMGLAVRQAPLIIPLKATSTPVSIKQYPMSQEARLGIKPHIQRLLDQGILVPCQSPWNTPLLPVKKPGTNDYRPVQDLREVNKRVEDIHPTVPNPYNLLSGLPPSHQWYTVLDLKDAFFCLRLHPTSQPLFAFEWRDPEMGISGQLTWTRLPQGFKNSPTLFNEALHRDLAGFRIQHPDLILLQYVDDLLLAATSELDCQQGTRALLQTLGDLGYRASAKKAQICQKQVKYLGYLLKEGQRWLTEARKETVMGQPIPKTPRQLREFLGKAGFCRLFIPGFAEMAAPLYPLTKPGTLFNWGPDQQKAFQEIKQALLTAPALGLPDLTKPFELFVDEKQGYAKGVLTQKLGPWRRPVAYLSKKLDPVAAGWPPCLRMVAAIAVLTKDAGKLTMGQPLVILAPHAVEALVKQPPDRWLSNARMTHYQALLLDTDRVQFGPVVALNPATLLPLPEEGLQHDCLDILAEAHGTRSDLMDQPLPDADHTWYTDGSSFLQEGQRKAGAAVTTETEVIWARALPAGTSAQRAELIALTQALKMAEGKKLNVYTDSRYAFATAHIHGEIYRRRGWLTSEGKEIKNKDEILALLKALFLPKRLSIIHCPGHQKGNSAEARGNRMADQAAREVATRETPETSTLLAGKRTADGSEFEKRTADGSEFESPKKKAKVE

SEQ ID NO: 2352 - protein, 2096 aa, synthetic construct
MPAAKRVKLDGGDKKYSIGLDIGTNSVGWAVITDEYKVPSKKFKVLGNTDRHSIKKNLIGALLFDSGETAEATRLKRTARRRYTRRKNRICYLQEIFSNEMAKVDDSFFHRLEESFLVEEDKKHERHPIFGNIVDEVAYHEKYPTIYHLRKKLVDSTDKADLRLIYLALAHMIKFRGHFLIEGDLNPDNSDVDKLFIQLVQTYNQLFEENPINASGVDAKAILSARLSKSRRLENLIAQLPGEKKNGLFGNLIALSLGLTPNFKSNFDLAEDAKLQLSKDTYDDDLDNLLAQIGDQYADLFLAAKNLSDAILLSDILRVNTEITKAPLSASMIKRYDEHHQDLTLLKALVRQQLPEKYKEIFFDQSKNGYAGYIDGGASQEEFYKFIKPILEKMDGTEELLVKLNREDLLRKQRTFDNGSIPHQIHLGELHAILRRQEDFYPFLKDNREKIEKILTFRIPYYVGPLARGNSRFAWMTRKSEETITPWNFEEVVDKGASAQSFIERMTNFDKNLPNEKVLPKHSLLYEYFTVYNELTKVKYVTEGMRKPAFLSGEQKKAIVDLLFKTNRKVTVKQLKEDYFKKIECFDSVEISGVEDRFNASLGTYHDLLKIIKDKDFLDNEENEDILEDIVLTLTLFEDREMIEERLKTYAHLFDDKVMKQLKRRRYTGWGRLSRKLINGIRDKQSGKTILDFLKSDGFANRNFMQLIHDDSLTFKEDIQKAQVSGQGDSLHEHIANLAGSPAIKKGILQTVKVVDELVKVMGRHKPENIVIEMARENQTTQKGQKNSRERMKRIEEGIKELGSQILKEHPVENTQLQNEKLYLYYLQNGRDMYVDQELDINRLSDYDVDHIVPQSFLKDDSIDNKVLTRSDKARGKSDNVPSEEVVKKMKNYWRQLLNAKLITQRKFDNLTKAERGGLSELDKAGFIKRQLVETRQITKHVAQILDSRMNTKYDENDKLIREVKVITLKSKLVSDFRKDFQFYKVREINNYHHAHDAYLNAVVGTALIKKYPKLESEFVYGDYKVYDVRKMIAKSEQEIGKATAKYFFYSNIMNFFKTEITLANGEIRKRPLIETNGETGEIVWDKGRDFATVRKVLSMPQVNIVKKTEVQTGGFSKESILPKRNSDKLIARKKDWDPKKYGGFDSPTVAYSVLVVAKVEKGKSKKLKSVKELLGITIMERSSFEKNPIDFLEAKGYKEVKKDLIIKLPKYSLFELENGRKRMLASAGELQKGNELALPSKYVNFLYLASHYEKLKGSPEDNEQKQLFVEQHKHYLDEIIEQISEFSKRVILADANLDKVLSAYNKHRDKPIREQAENIIHLFTLTNLGAPAAFKYFDTTIDRKRYTSTKEVLDATLIHQSITGLYETRIDLSQLGGDGGGSSEAAAKGGSGGTLNIEDEYRLHETSKEPDVSLGSTWLSDFPQAWAETGGMGLAVRQAPLIIPLKATSTPVSIKQYPMSQEARLGIKPHIQRLLDQGILVPCQSPWNTPLLPVKKPGTNDYRPVQDLREVNKRVEDIHPTVPNPYNLLSGLPPSHQWYTVLDLKDAFFCLRLHPTSQPLFAFEWRDPEMGISGQLTWTRLPQGFKNSPTLFNEALHRDLAGFRIQHPDLILLQYVDDLLLAATSELDCQQGTRALLQTLGDLGYRASAKKAQICQKQVKYLGYLLKEGQRWLTEARKETVMGQPIPKTPRQLREFLGKAGFCRLFIPGFAEMAAPLYPLTKPGTLFNWGPDQQKAFQEIKQALLTAPALGLPDLTKPFELFVDEKQGYAKGVLTQKLGPWRRPVAYLSKKLDPVAAGWPPCLRMVAAIAVLTKDAGKLTMGQPLVILAPHAVEALVKQPPDRWLSNARMTHYQALLLDTDRVQFGPVVALNPATLLPLPEEGLQHDCLDILAEAHGTRSDLMDQPLPDADHTWYTDGSSFLQEGQRKAGAAVTTETEVIWARALPAGTSAQRAELIALTQALKMAEGKKLNVYTDSRYAFATAHIHGEIYRRRGWLTSEGKEIKNKDEILALLKALFLPKRLSIIHCPGHQKGNSAEARGNRMADQAAREVATRETPETSTLLAGKRTADGSEFEKRTADGSEFESPKKKAKVE

SEQ ID NO: 2353 - protein, 2091 aa, synthetic construct
MPAAKRVKLDGGDKKYSIGLDIGTNSVGWAVITDEYKVPSKKFKVLGNTDRHSIKKNLIGALLFDSGETAEATRLKRTARRRYTRRKNRICYLQEIFSNEMAKVDDSFFHRLEESFLVEEDKKHERHPIFGNIVDEVAYHEKYPTIYHLRKKLVDSTDKADLRLIYLALAHMIKFRGHFLIEGDLNPDNSDVDKLFIQLVQTYNQLFEENPINASGVDAKAILSARLSKSRRLENLIAQLPGEKKNGLFGNLIALSLGLTPNFKSNFDLAEDAKLQLSKDTYDDDLDNLLAQIGDQYADLFLAAKNLSDAILLSDILRVNTEITKAPLSASMIKRYDEHHQDLTLLKALVRQQLPEKYKEIFFDQSKNGYAGYIDGGASQEEFYKFIKPILEKMDGTEELLVKLNREDLLRKQRTFDNGSIPHQIHLGELHAILRRQEDFYPFLKDNREKIEKILTFRIPYYVGPLARGNSRFAWMTRKSEETITPWNFEEVVDKGASAQSFIERMTNFDKNLPNEKVLPKHSLLYEYFTVYNELTKVKYVTEGMRKPAFLSGEQKKAIVDLLFKTNRKVTVKQLKEDYFKKIECFDSVEISGVEDRFNASLGTYHDLLKIIKDKDFLDNEENEDILEDIVLTLTLFEDREMIEERLKTYAHLFDDKVMKQLKRRRYTGWGRLSRKLINGIRDKQSGKTILDFLKSDGFANRNFMQLIHDDSLTFKEDIQKAQVSGQGDSLHEHIANLAGSPAIKKGILQTVKVVDELVKVMGRHKPENIVIEMARENQTTQKGQKNSRERMKRIEEGIKELGSQILKEHPVENTQLQNEKLYLYYLQNGRDMYVDQELDINRLSDYDVDHIVPQSFLKDDSIDNKVLTRSDKARGKSDNVPSEEVVKKMKNYWRQLLNAKLITQRKFDNLTKAERGGLSELDKAGFIKRQLVETRQITKHVAQILDSRMNTKYDENDKLIREVKVITLKSKLVSDFRKDFQFYKVREINNYHHAHDAYLNAVVGTALIKKYPKLESEFVYGDYKVYDVRKMIAKSEQEIGKATAKYFFYSNIMNFFKTEITLANGEIRKRPLIETNGETGEIVWDKGRDFATVRKVLSMPQVNIVKKTEVQTGGFSKESILPKRNSDKLIARKKDWDPKKYGGFDSPTVAYSVLVVAKVEKGKSKKLKSVKELLGITIMERSSFEKNPIDFLEAKGYKEVKKDLIIKLPKYSLFELENGRKRMLASAGELQKGNELALPSKYVNFLYLASHYEKLKGSPEDNEQKQLFVEQHKHYLDEIIEQISEFSKRVILADANLDKVLSAYNKHRDKPIREQAENIIHLFTLTNLGAPAAFKYFDTTIDRKRYTSTKEVLDATLIHQSITGLYETRIDLSQLGGDGGGGSGSSGGTLNIEDEYRLHETSKEPDVSLGSTWLSDFPQAWAETGGMGLAVRQAPLIIPLKATSTPVSIKQYPMSQEARLGIKPHIQRLLDQGILVPCQSPWNTPLLPVKKPGTNDYRPVQDLREVNKRVEDIHPTVPNPYNLLSGLPPSHQWYTVLDLKDAFFCLRLHPTSQPLFAFEWRDPEMGISGQLTWTRLPQGFKNSPTLFNEALHRDLAGFRIQHPDLILLQYVDDLLLAATSELDCQQGTRALLQTLGDLGYRASAKKAQICQKQVKYLGYLLKEGQRWLTEARKETVMGQPIPKTPRQLREFLGKAGFCRLFIPGFAEMAAPLYPLTKPGTLFNWGPDQQKAFQEIKQALLTAPALGLPDLTKPFELFVDEKQGYAKGVLTQKLGPWRRPVAYLSKKLDPVAAGWPPCLRMVAAIAVLTKDAGKLTMGQPLVILAPHAVEALVKQPPDRWLSNARMTHYQALLLDTDRVQFGPVVALNPATLLPLPEEGLQHDCLDILAEAHGTRSDLMDQPLPDADHTWYTDGSSFLQEGQRKAGAAVTTETEVIWARALPAGTSAQRAELIALTQALKMAEGKKLNVYTDSRYAFATAHIHGEIYRRRGWLTSEGKEIKNKDEILALLKALFLPKRLSIIHCPGHQKGNSAEARGNRMADQAAREVATRETPETSTLLAGKRTADGSEFEKRTADGSEFESPKKKAKVE

SEQ ID NO: 2354 - protein, 2091 aa, synthetic construct
MPAAKRVKLDGGDKKYSIGLDIGTNSVGWAVITDEYKVPSKKFKVLGNTDRHSIKKNLIGALLFDSGETAEATRLKRTARRRYTRRKNRICYLQEIFSNEMAKVDDSFFHRLEESFLVEEDKKHERHPIFGNIVDEVAYHEKYPTIYHLRKKLVDSTDKADLRLIYLALAHMIKFRGHFLIEGDLNPDNSDVDKLFIQLVQTYNQLFEENPINASGVDAKAILSARLSKSRRLENLIAQLPGEKKNGLFGNLIALSLGLTPNFKSNFDLAEDAKLQLSKDTYDDDLDNLLAQIGDQYADLFLAAKNLSDAILLSDILRVNTEITKAPLSASMIKRYDEHHQDLTLLKALVRQQLPEKYKEIFFDQSKNGYAGYIDGGASQEEFYKFIKPILEKMDGTEELLVKLNREDLLRKQRTFDNGSIPHQIHLGELHAILRRQEDFYPFLKDNREKIEKILTFRIPYYVGPLARGNSRFAWMTRKSEETITPWNFEEVVDKGASAQSFIERMTNFDKNLPNEKVLPKHSLLYEYFTVYNELTKVKYVTEGMRKPAFLSGEQKKAIVDLLFKTNRKVTVKQLKEDYFKKIECFDSVEISGVEDRFNASLGTYHDLLKIIKDKDFLDNEENEDILEDIVLTLTLFEDREMIEERLKTYAHLFDDKVMKQLKRRRYTGWGRLSRKLINGIRDKQSGKTILDFLKSDGFANRNFMQLIHDDSLTFKEDIQKAQVSGQGDSLHEHIANLAGSPAIKKGILQTVKVVDELVKVMGRHKPENIVIEMARENQTTQKGQKNSRERMKRIEEGIKELGSQILKEHPVENTQLQNEKLYLYYLQNGRDMYVDQELDINRLSDYDVDHIVPQSFLKDDSIDNKVLTRSDKARGKSDNVPSEEVVKKMKNYWRQLLNAKLITQRKFDNLTKAERGGLSELDKAGFIKRQLVETRQITKHVAQILDSRMNTKYDENDKLIREVKVITLKSKLVSDFRKDFQFYKVREINNYHHAHDAYLNAVVGTALIKKYPKLESEFVYGDYKVYDVRKMIAKSEQEIGKATAKYFFYSNIMNFFKTEITLANGEIRKRPLIETNGETGEIVWDKGRDFATVRKVLSMPQVNIVKKTEVQTGGFSKESILPKRNSDKLIARKKDWDPKKYGGFDSPTVAYSVLVVAKVEKGKSKKLKSVKELLGITIMERSSFEKNPIDFLEAKGYKEVKKDLIIKLPKYSLFELENGRKRMLASAGELQKGNELALPSKYVNFLYLASHYEKLKGSPEDNEQKQLFVEQHKHYLDEIIEQISEFSKRVILADANLDKVLSAYNKHRDKPIREQAENIIHLFTLTNLGAPAAFKYFDTTIDRKRYTSTKEVLDATLIHQSITGLYETRIDLSQLGGDGGGGGGGGGGTLNIEDEYRLHETSKEPDVSLGSTWLSDFPQAWAETGGMGLAVRQAPLIIPLKATSTPVSIKQYPMSQEARLGIKPHIQRLLDQGILVPCQSPWNTPLLPVKKPGTNDYRPVQDLREVNKRVEDIHPTVPNPYNLLSGLPPSHQWYTVLDLKDAFFCLRLHPTSQPLFAFEWRDPEMGISGQLTWTRLPQGFKNSPTLFNEALHRDLAGFRIQHPDLILLQYVDDLLLAATSELDCQQGTRALLQTLGDLGYRASAKKAQICQKQVKYLGYLLKEGQRWLTEARKETVMGQPIPKTPRQLREFLGKAGFCRLFIPGFAEMAAPLYPLTKPGTLFNWGPDQQKAFQEIKQALLTAPALGLPDLTKPFELFVDEKQGYAKGVLTQKLGPWRRPVAYLSKKLDPVAAGWPPCLRMVAAIAVLTKDAGKLTMGQPLVILAPHAVEALVKQPPDRWLSNARMTHYQALLLDTDRVQFGPVVALNPATLLPLPEEGLQHDCLDILAEAHGTRSDLMDQPLPDADHTWYTDGSSFLQEGQRKAGAAVTTETEVIWARALPAGTSAQRAELIALTQALKMAEGKKLNVYTDSRYAFATAHIHGEIYRRRGWLTSEGKEIKNKDEILALLKALFLPKRLSIIHCPGHQKGNSAEARGNRMADQAAREVATRETPETSTLLAGKRTADGSEFEKRTADGSEFESPKKKAKVE

SEQ ID NO: 2355 - protein, 2096 aa, synthetic construct
MPAAKRVKLDGGDKKYSIGLDIGTNSVGWAVITDEYKVPSKKFKVLGNTDRHSIKKNLIGALLFDSGETAEATRLKRTARRRYTRRKNRICYLQEIFSNEMAKVDDSFFHRLEESFLVEEDKKHERHPIFGNIVDEVAYHEKYPTIYHLRKKLVDSTDKADLRLIYLALAHMIKFRGHFLIEGDLNPDNSDVDKLFIQLVQTYNQLFEENPINASGVDAKAILSARLSKSRRLENLIAQLPGEKKNGLFGNLIALSLGLTPNFKSNFDLAEDAKLQLSKDTYDDDLDNLLAQIGDQYADLFLAAKNLSDAILLSDILRVNTEITKAPLSASMIKRYDEHHQDLTLLKALVRQQLPEKYKEIFFDQSKNGYAGYIDGGASQEEFYKFIKPILEKMDGTEELLVKLNREDLLRKQRTFDNGSIPHQIHLGELHAILRRQEDFYPFLKDNREKIEKILTFRIPYYVGPLARGNSRFAWMTRKSEETITPWNFEEVVDKGASAQSFIERMTNFDKNLPNEKVLPKHSLLYEYFTVYNELTKVKYVTEGMRKPAFLSGEQKKAIVDLLFKTNRKVTVKQLKEDYFKKIECFDSVEISGVEDRFNASLGTYHDLLKIIKDKDFLDNEENEDILEDIVLTLTLFEDREMIEERLKTYAHLFDDKVMKQLKRRRYTGWGRLSRKLINGIRDKQSGKTILDFLKSDGFANRNFMQLIHDDSLTFKEDIQKAQVSGQGDSLHEHIANLAGSPAIKKGILQTVKVVDELVKVMGRHKPENIVIEMARENQTTQKGQKNSRERMKRIEEGIKELGSQILKEHPVENTQLQNEKLYLYYLQNGRDMYVDQELDINRLSDYDVDHIVPQSFLKDDSIDNKVLTRSDKARGKSDNVPSEEVVKKMKNYWRQLLNAKLITQRKFDNLTKAERGGLSELDKAGFIKRQLVETRQITKHVAQILDSRMNTKYDENDKLIREVKVITLKSKLVSDFRKDFQFYKVREINNYHHAHDAYLNAVVGTALIKKYPKLESEFVYGDYKVYDVRKMIAKSEQEIGKATAKYFFYSNIMNFFKTEITLANGEIRKRPLIETNGETGEIVWDKGRDFATVRKVLSMPQVNIVKKTEVQTGGFSKESILPKRNSDKLIARKKDWDPKKYGGFDSPTVAYSVLVVAKVEKGKSKKLKSVKELLGITIMERSSFEKNPIDFLEAKGYKEVKKDLIIKLPKYSLFELENGRKRMLASAGELQKGNELALPSKYVNFLYLASHYEKLKGSPEDNEQKQLFVEQHKHYLDEIIEQISEFSKRVILADANLDKVLSAYNKHRDKPIREQAENIIHLFTLTNLGAPAAFKYFDTTIDRKRYTSTKEVLDATLIHQSITGLYETRIDLSQLGGDGGPAPGSSEAAAKGGTLNIEDEYRLHETSKEPDVSLGSTWLSDFPQAWAETGGMGLAVRQAPLIIPLKATSTPVSIKQYPMSQEARLGIKPHIQRLLDQGILVPCQSPWNTPLLPVKKPGTNDYRPVQDLREVNKRVEDIHPTVPNPYNLLSGLPPSHQWYTVLDLKDAFFCLRLHPTSQPLFAFEWRDPEMGISGQLTWTRLPQGFKNSPTLFNEALHRDLAGFRIQHPDLILLQYVDDLLLAATSELDCQQGTRALLQTLGDLGYRASAKKAQICQKQVKYLGYLLKEGQRWLTEARKETVMGQPIPKTPRQLREFLGKAGFCRLFIPGFAEMAAPLYPLTKPGTLFNWGPDQQKAFQEIKQALLTAPALGLPDLTKPFELFVDEKQGYAKGVLTQKLGPWRRPVAYLSKKLDPVAAGWPPCLRMVAAIAVLTKDAGKLTMGQPLVILAPHAVEALVKQPPDRWLSNARMTHYQALLLDTDRVQFGPVVALNPATLLPLPEEGLQHDCLDILAEAHGTRSDLMDQPLPDADHTWYTDGSSFLQEGQRKAGAAVTTETEVIWARALPAGTSAQRAELIALTQALKMAEGKKLNVYTDSRYAFATAHIHGEIYRRRGWLTSEGKEIKNKDEILALLKALFLPKRLSIIHCPGHQKGNSAEARGNRMADQAAREVATRETPETSTLLAGKRTADGSEFEKRTADGSEFESPKKKAKVE

SEQ ID NO: 2356 - protein, 2093 aa, synthetic construct
MPAAKRVKLDGGDKKYSIGLDIGTNSVGWAVITDEYKVPSKKFKVLGNTDRHSIKKNLIGALLFDSGETAEATRLKRTARRRYTRRKNRICYLQEIFSNEMAKVDDSFFHRLEESFLVEEDKKHERHPIFGNIVDEVAYHEKYPTIYHLRKKLVDSTDKADLRLIYLALAHMIKFRGHFLIEGDLNPDNSDVDKLFIQLVQTYNQLFEENPINASGVDAKAILSARLSKSRRLENLIAQLPGEKKNGLFGNLIALSLGLTPNFKSNFDLAEDAKLQLSKDTYDDDLDNLLAQIGDQYADLFLAAKNLSDAILLSDILRVNTEITKAPLSASMIKRYDEHHQDLTLLKALVRQQLPEKYKEIFFDQSKNGYAGYIDGGASQEEFYKFIKPILEKMDGTEELLVKLNREDLLRKQRTFDNGSIPHQIHLGELHAILRRQEDFYPFLKDNREKIEKILTFRIPYYVGPLARGNSRFAWMTRKSEETITPWNFEEVVDKGASAQSFIERMTNFDKNLPNEKVLPKHSLLYEYFTVYNELTKVKYVTEGMRKPAFLSGEQKKAIVDLLFKTNRKVTVKQLKEDYFKKIECFDSVEISGVEDRFNASLGTYHDLLKIIKDKDFLDNEENEDILEDIVLTLTLFEDREMIEERLKTYAHLFDDKVMKQLKRRRYTGWGRLSRKLINGIRDKQSGKTILDFLKSDGFANRNFMQLIHDDSLTFKEDIQKAQVSGQGDSLHEHIANLAGSPAIKKGILQTVKVVDELVKVMGRHKPENIVIEMARENQTTQKGQKNSRERMKRIEEGIKELGSQILKEHPVENTQLQNEKLYLYYLQNGRDMYVDQELDINRLSDYDVDHIVPQSFLKDDSIDNKVLTRSDKARGKSDNVPSEEVVKKMKNYWRQLLNAKLITQRKFDNLTKAERGGLSELDKAGFIKRQLVETRQITKHVAQILDSRMNTKYDENDKLIREVKVITLKSKLVSDFRKDFQFYKVREINNYHHAHDAYLNAVVGTALIKKYPKLESEFVYGDYKVYDVRKMIAKSEQEIGKATAKYFFYSNIMNFFKTEITLANGEIRKRPLIETNGETGEIVWDKGRDFATVRKVLSMPQVNIVKKTEVQTGGFSKESILPKRNSDKLIARKKDWDPKKYGGFDSPTVAYSVLVVAKVEKGKSKKLKSVKELLGITIMERSSFEKNPIDFLEAKGYKEVKKDLIIKLPKYSLFELENGRKRMLASAGELQKGNELALPSKYVNFLYLASHYEKLKGSPEDNEQKQLFVEQHKHYLDEIIEQISEFSKRVILADANLDKVLSAYNKHRDKPIREQAENIIHLFTLTNLGAPAAFKYFDTTIDRKRYTSTKEVLDATLIHQSITGLYETRIDLSQLGGDGGPAPEAAAKGGTLNIEDEYRLHETSKEPDVSLGSTWLSDFPQAWAETGGMGLAVRQAPLIIPLKATSTPVSIKQYPMSQEARLGIKPHIQRLLDQGILVPCQSPWNTPLLPVKKPGTNDYRPVQDLREVNKRVEDIHPTVPNPYNLLSGLPPSHQWYTVLDLKDAFFCLRLHPTSQPLFAFEWRDPEMGISGQLTWTRLPQGFKNSPTLFNEALHRDLAGFRIQHPDLILLQYVDDLLLAATSELDCQQGTRALLQTLGDLGYRASAKKAQICQKQVKYLGYLLKEGQRWLTEARKETVMGQPIPKTPRQLREFLGKAGFCRLFIPGFAEMAAPLYPLTKPGTLFNWGPDQQKAFQEIKQALLTAPALGLPDLTKPFELFVDEKQGYAKGVLTQKLGPWRRPVAYLSKKLDPVAAGWPPCLRMVAAIAVLTKDAGKLTMGQPLVILAPHAVEALVKQPPDRWLSNARMTHYQALLLDTDRVQFGPVVALNPATLLPLPEEGLQHDCLDILAEAHGTRSDLMDQPLPDADHTWYTDGSSFLQEGQRKAGAAVTTETEVIWARALPAGTSAQRAELIALTQALKMAEGKKLNVYTDSRYAFATAHIHGEIYRRRGWLTSEGKEIKNKDEILALLKALFLPKRLSIIHCPGHQKGNSAEARGNRMADQAAREVATRETPETSTLLAGKRTADGSEFEKRTADGSEFESPKKKAKVE

SEQ ID NO: 2357 - protein, 2096 aa, synthetic construct
MPAAKRVKLDGGDKKYSIGLDIGTNSVGWAVITDEYKVPSKKFKVLGNTDRHSIKKNLIGALLFDSGETAEATRLKRTARRRYTRRKNRICYLQEIFSNEMAKVDDSFFHRLEESFLVEEDKKHERHPIFGNIVDEVAYHEKYPTIYHLRKKLVDSTDKADLRLIYLALAHMIKFRGHFLIEGDLNPDNSDVDKLFIQLVQTYNQLFEENPINASGVDAKAILSARLSKSRRLENLIAQLPGEKKNGLFGNLIALSLGLTPNFKSNFDLAEDAKLQLSKDTYDDDLDNLLAQIGDQYADLFLAAKNLSDAILLSDILRVNTEITKAPLSASMIKRYDEHHQDLTLLKALVRQQLPEKYKEIFFDQSKNGYAGYIDGGASQEEFYKFIKPILEKMDGTEELLVKLNREDLLRKQRTFDNGSIPHQIHLGELHAILRRQEDFYPFLKDNREKIEKILTFRIPYYVGPLARGNSRFAWMTRKSEETITPWNFEEVVDKGASAQSFIERMTNFDKNLPNEKVLPKHSLLYEYFTVYNELTKVKYVTEGMRKPAFLSGEQKKAIVDLLFKTNRKVTVKQLKEDYFKKIECFDSVEISGVEDRFNASLGTYHDLLKIIKDKDFLDNEENEDILEDIVLTLTLFEDREMIEERLKTYAHLFDDKVMKQLKRRRYTGWGRLSRKLINGIRDKQSGKTILDFLKSDGFANRNFMQLIHDDSLTFKEDIQKAQVSGQGDSLHEHIANLAGSPAIKKGILQTVKVVDELVKVMGRHKPENIVIEMARENQTTQKGQKNSRERMKRIEEGIKELGSQILKEHPVENTQLQNEKLYLYYLQNGRDMYVDQELDINRLSDYDVDHIVPQSFLKDDSIDNKVLTRSDKARGKSDNVPSEEVVKKMKNYWRQLLNAKLITQRKFDNLTKAERGGLSELDKAGFIKRQLVETRQITKHVAQILDSRMNTKYDENDKLIREVKVITLKSKLVSDFRKDFQFYKVREINNYHHAHDAYLNAVVGTALIKKYPKLESEFVYGDYKVYDVRKMIAKSEQEIGKATAKYFFYSNIMNFFKTEITLANGEIRKRPLIETNGETGEIVWDKGRDFATVRKVLSMPQVNIVKKTEVQTGGFSKESILPKRNSDKLIARKKDWDPKKYGGFDSPTVAYSVLVVAKVEKGKSKKLKSVKELLGITIMERSSFEKNPIDFLEAKGYKEVKKDLIIKLPKYSLFELENGRKRMLASAGELQKGNELALPSKYVNFLYLASHYEKLKGSPEDNEQKQLFVEQHKHYLDEIIEQISEFSKRVILADANLDKVLSAYNKHRDKPIREQAENIIHLFTLTNLGAPAAFKYFDTTIDRKRYTSTKEVLDATLIHQSITGLYETRIDLSQLGGDGGEAAAKPAPGSSGGTLNIEDEYRLHETSKEPDVSLGSTWLSDFPQAWAETGGMGLAVRQAPLIIPLKATSTPVSIKQYPMSQEARLGIKPHIQRLLDQGILVPCQSPWNTPLLPVKKPGTNDYRPVQDLREVNKRVEDIHPTVPNPYNLLSGLPPSHQWYTVLDLKDAFFCLRLHPTSQPLFAFEWRDPEMGISGQLTWTRLPQGFKNSPTLFNEALHRDLAGFRIQHPDLILLQYVDDLLLAATSELDCQQGTRALLQTLGDLGYRASAKKAQICQKQVKYLGYLLKEGQRWLTEARKETVMGQPIPKTPRQLREFLGKAGFCRLFIPGFAEMAAPLYPLTKPGTLFNWGPDQQKAFQEIKQALLTAPALGLPDLTKPFELFVDEKQGYAKGVLTQKLGPWRRPVAYLSKKLDPVAAGWPPCLRMVAAIAVLTKDAGKLTMGQPLVILAPHAVEALVKQPPDRWLSNARMTHYQALLLDTDRVQFGPVVALNPATLLPLPEEGLQHDCLDILAEAHGTRSDLMDQPLPDADHTWYTDGSSFLQEGQRKAGAAVTTETEVIWARALPAGTSAQRAELIALTQALKMAEGKKLNVYTDSRYAFATAHIHGEIYRRRGWLTSEGKEIKNKDEILALLKALFLPKRLSIIHCPGHQKGNSAEARGNRMADQAAREVATRETPETSTLLAGKRTADGSEFEKRTADGSEFESPKKKAKVE

SEQ ID NO: 2358 - protein, 2096 aa, synthetic construct
MPAAKRVKLDGGDKKYSIGLDIGTNSVGWAVITDEYKVPSKKFKVLGNTDRHSIKKNLIGALLFDSGETAEATRLKRTARRRYTRRKNRICYLQEIFSNEMAKVDDSFFHRLEESFLVEEDKKHERHPIFGNIVDEVAYHEKYPTIYHLRKKLVDSTDKADLRLIYLALAHMIKFRGHFLIEGDLNPDNSDVDKLFIQLVQTYNQLFEENPINASGVDAKAILSARLSKSRRLENLIAQLPGEKKNGLFGNLIALSLGLTPNFKSNFDLAEDAKLQLSKDTYDDDLDNLLAQIGDQYADLFLAAKNLSDAILLSDILRVNTEITKAPLSASMIKRYDEHHQDLTLLKALVRQQLPEKYKEIFFDQSKNGYAGYIDGGASQEEFYKFIKPILEKMDGTEELLVKLNREDLLRKQRTFDNGSIPHQIHLGELHAILRRQEDFYPFLKDNREKIEKILTFRIPYYVGPLARGNSRFAWMTRKSEETITPWNFEEVVDKGASAQSFIERMTNFDKNLPNEKVLPKHSLLYEYFTVYNELTKVKYVTEGMRKPAFLSGEQKKAIVDLLFKTNRKVTVKQLKEDYFKKIECFDSVEISGVEDRFNASLGTYHDLLKIIKDKDFLDNEENEDILEDIVLTLTLFEDREMIEERLKTYAHLFDDKVMKQLKRRRYTGWGRLSRKLINGIRDKQSGKTILDFLKSDGFANRNFMQLIHDDSLTFKEDIQKAQVSGQGDSLHEHIANLAGSPAIKKGILQTVKVVDELVKVMGRHKPENIVIEMARENQTTQKGQKNSRERMKRIEEGIKELGSQILKEHPVENTQLQNEKLYLYYLQNGRDMYVDQELDINRLSDYDVDHIVPQSFLKDDSIDNKVLTRSDKARGKSDNVPSEEVVKKMKNYWRQLLNAKLITQRKFDNLTKAERGGLSELDKAGFIKRQLVETRQITKHVAQILDSRMNTKYDENDKLIREVKVITLKSKLVSDFRKDFQFYKVREINNYHHAHDAYLNAVVGTALIKKYPKLESEFVYGDYKVYDVRKMIAKSEQEIGKATAKYFFYSNIMNFFKTEITLANGEIRKRPLIETNGETGEIVWDKGRDFATVRKVLSMPQVNIVKKTEVQTGGFSKESILPKRNSDKLIARKKDWDPKKYGGFDSPTVAYSVLVVAKVEKGKSKKLKSVKELLGITIMERSSFEKNPIDFLEAKGYKEVKKDLIIKLPKYSLFELENGRKRMLASAGELQKGNELALPSKYVNFLYLASHYEKLKGSPEDNEQKQLFVEQHKHYLDEIIEQISEFSKRVILADANLDKVLSAYNKHRDKPIREQAENIIHLFTLTNLGAPAAFKYFDTTIDRKRYTSTKEVLDATLIHQSITGLYETRIDLSQLGGDGGGGSEAAAKGGGGGTLNIEDEYRLHETSKEPDVSLGSTWLSDFPQAWAETGGMGLAVRQAPLIIPLKATSTPVSIKQYPMSQEARLGIKPHIQRLLDQGILVPCQSPWNTPLLPVKKPGTNDYRPVQDLREVNKRVEDIHPTVPNPYNLLSGLPPSHQWYTVLDLKDAFFCLRLHPTSQPLFAFEWRDPEMGISGQLTWTRLPQGFKNSPTLFNEALHRDLAGFRIQHPDLILLQYVDDLLLAATSELDCQQGTRALLQTLGDLGYRASAKKAQICQKQVKYLGYLLKEGQRWLTEARKETVMGQPIPKTPRQLREFLGKAGFCRLFIPGFAEMAAPLYPLTKPGTLFNWGPDQQKAFQEIKQALLTAPALGLPDLTKPFELFVDEKQGYAKGVLTQKLGPWRRPVAYLSKKLDPVAAGWPPCLRMVAAIAVLTKDAGKLTMGQPLVILAPHAVEALVKQPPDRWLSNARMTHYQALLLDTDRVQFGPVVALNPATLLPLPEEGLQHDCLDILAEAHGTRSDLMDQPLPDADHTWYTDGSSFLQEGQRKAGAAVTTETEVIWARALPAGTSAQRAELIALTQALKMAEGKKLNVYTDSRYAFATAHIHGEIYRRRGWLTSEGKEIKNKDEILALLKALFLPKRLSIIHCPGHQKGNSAEARGNRMADQAAREVATRETPETSTLLAGKRTADGSEFEKRTADGSEFESPKKKAKVE

SEQ ID NO: 2359 - protein, 2096 aa, synthetic construct
MPAAKRVKLDGGDKKYSIGLDIGTNSVGWAVITDEYKVPSKKFKVLGNTDRHSIKKNLIGALLFDSGETAEATRLKRTARRRYTRRKNRICYLQEIFSNEMAKVDDSFFHRLEESFLVEEDKKHERHPIFGNIVDEVAYHEKYPTIYHLRKKLVDSTDKADLRLIYLALAHMIKFRGHFLIEGDLNPDNSDVDKLFIQLVQTYNQLFEENPINASGVDAKAILSARLSKSRRLENLIAQLPGEKKNGLFGNLIALSLGLTPNFKSNFDLAEDAKLQLSKDTYDDDLDNLLAQIGDQYADLFLAAKNLSDAILLSDILRVNTEITKAPLSASMIKRYDEHHQDLTLLKALVRQQLPEKYKEIFFDQSKNGYAGYIDGGASQEEFYKFIKPILEKMDGTEELLVKLNREDLLRKQRTFDNGSIPHQIHLGELHAILRRQEDFYPFLKDNREKIEKILTFRIPYYVGPLARGNSRFAWMTRKSEETITPWNFEEVVDKGASAQSFIERMTNFDKNLPNEKVLPKHSLLYEYFTVYNELTKVKYVTEGMRKPAFLSGEQKKAIVDLLFKTNRKVTVKQLKEDYFKKIECFDSVEISGVEDRFNASLGTYHDLLKIIKDKDFLDNEENEDILEDIVLTLTLFEDREMIEERLKTYAHLFDDKVMKQLKRRRYTGWGRLSRKLINGIRDKQSGKTILDFLKSDGFANRNFMQLIHDDSLTFKEDIQKAQVSGQGDSLHEHIANLAGSPAIKKGILQTVKVVDELVKVMGRHKPENIVIEMARENQTTQKGQKNSRERMKRIEEGIKELGSQILKEHPVENTQLQNEKLYLYYLQNGRDMYVDQELDINRLSDYDVDHIVPQSFLKDDSIDNKVLTRSDKARGKSDNVPSEEVVKKMKNYWRQLLNAKLITQRKFDNLTKAERGGLSELDKAGFIKRQLVETRQITKHVAQILDSRMNTKYDENDKLIREVKVITLKSKLVSDFRKDFQFYKVREINNYHHAHDAYLNAVVGTALIKKYPKLESEFVYGDYKVYDVRKMIAKSEQEIGKATAKYFFYSNIMNFFKTEITLANGEIRKRPLIETNGETGEIVWDKGRDFATVRKVLSMPQVNIVKKTEVQTGGFSKESILPKRNSDKLIARKKDWDPKKYGGFDSPTVAYSVLVVAKVEKGKSKKLKSVKELLGITIMERSSFEKNPIDFLEAKGYKEVKKDLIIKLPKYSLFELENGRKRMLASAGELQKGNELALPSKYVNFLYLASHYEKLKGSPEDNEQKQLFVEQHKHYLDEIIEQISEFSKRVILADANLDKVLSAYNKHRDKPIREQAENIIHLFTLTNLGAPAAFKYFDTTIDRKRYTSTKEVLDATLIHQSITGLYETRIDLSQLGGDGGGSSEAAAKPAPGGTLNIEDEYRLHETSKEPDVSLGSTWLSDFPQAWAETGGMGLAVRQAPLIIPLKATSTPVSIKQYPMSQEARLGIKPHIQRLLDQGILVPCQSPWNTPLLPVKKPGTNDYRPVQDLREVNKRVEDIHPTVPNPYNLLSGLPPSHQWYTVLDLKDAFFCLRLHPTSQPLFAFEWRDPEMGISGQLTWTRLPQGFKNSPTLFNEALHRDLAGFRIQHPDLILLQYVDDLLLAATSELDCQQGTRALLQTLGDLGYRASAKKAQICQKQVKYLGYLLKEGQRWLTEARKETVMGQPIPKTPRQLREFLGKAGFCRLFIPGFAEMAAPLYPLTKPGTLFNWGPDQQKAFQEIKQALLTAPALGLPDLTKPFELFVDEKQGYAKGVLTQKLGPWRRPVAYLSKKLDPVAAGWPPCLRMVAAIAVLTKDAGKLTMGQPLVILAPHAVEALVKQPPDRWLSNARMTHYQALLLDTDRVQFGPVVALNPATLLPLPEEGLQHDCLDILAEAHGTRSDLMDQPLPDADHTWYTDGSSFLQEGQRKAGAAVTTETEVIWARALPAGTSAQRAELIALTQALKMAEGKKLNVYTDSRYAFATAHIHGEIYRRRGWLTSEGKEIKNKDEILALLKALFLPKRLSIIHCPGHQKGNSAEARGNRMADQAAREVATRETPETSTLLAGKRTADGSEFEKRTADGSEFESPKKKAKVE

SEQ ID NO: 2360 - protein, 2094 aa, synthetic construct
MPAAKRVKLDGGDKKYSIGLDIGTNSVGWAVITDEYKVPSKKFKVLGNTDRHSIKKNLIGALLFDSGETAEATRLKRTARRRYTRRKNRICYLQEIFSNEMAKVDDSFFHRLEESFLVEEDKKHERHPIFGNIVDEVAYHEKYPTIYHLRKKLVDSTDKADLRLIYLALAHMIKFRGHFLIEGDLNPDNSDVDKLFIQLVQTYNQLFEENPINASGVDAKAILSARLSKSRRLENLIAQLPGEKKNGLFGNLIALSLGLTPNFKSNFDLAEDAKLQLSKDTYDDDLDNLLAQIGDQYADLFLAAKNLSDAILLSDILRVNTEITKAPLSASMIKRYDEHHQDLTLLKALVRQQLPEKYKEIFFDQSKNGYAGYIDGGASQEEFYKFIKPILEKMDGTEELLVKLNREDLLRKQRTFDNGSIPHQIHLGELHAILRRQEDFYPFLKDNREKIEKILTFRIPYYVGPLARGNSRFAWMTRKSEETITPWNFEEVVDKGASAQSFIERMTNFDKNLPNEKVLPKHSLLYEYFTVYNELTKVKYVTEGMRKPAFLSGEQKKAIVDLLFKTNRKVTVKQLKEDYFKKIECFDSVEISGVEDRFNASLGTYHDLLKIIKDKDFLDNEENEDILEDIVLTLTLFEDREMIEERLKTYAHLFDDKVMKQLKRRRYTGWGRLSRKLINGIRDKQSGKTILDFLKSDGFANRNFMQLIHDDSLTFKEDIQKAQVSGQGDSLHEHIANLAGSPAIKKGILQTVKVVDELVKVMGRHKPENIVIEMARENQTTQKGQKNSRERMKRIEEGIKELGSQILKEHPVENTQLQNEKLYLYYLQNGRDMYVDQELDINRLSDYDVDHIVPQSFLKDDSIDNKVLTRSDKARGKSDNVPSEEVVKKMKNYWRQLLNAKLITQRKFDNLTKAERGGLSELDKAGFIKRQLVETRQITKHVAQILDSRMNTKYDENDKLIREVKVITLKSKLVSDFRKDFQFYKVREINNYHHAHDAYLNAVVGTALIKKYPKLESEFVYGDYKVYDVRKMIAKSEQEIGKATAKYFFYSNIMNFFKTEITLANGEIRKRPLIETNGETGEIVWDKGRDFATVRKVLSMPQVNIVKKTEVQTGGFSKESILPKRNSDKLIARKKDWDPKKYGGFDSPTVAYSVLVVAKVEKGKSKKLKSVKELLGITIMERSSFEKNPIDFLEAKGYKEVKKDLIIKLPKYSLFELENGRKRMLASAGELQKGNELALPSKYVNFLYLASHYEKLKGSPEDNEQKQLFVEQHKHYLDEIIEQISEFSKRVILADANLDKVLSAYNKHRDKPIREQAENIIHLFTLTNLGAPAAFKYFDTTIDRKRYTSTKEVLDATLIHQSITGLYETRIDLSQLGGDGGGGSGGSGGSGGTLNIEDEYRLHETSKEPDVSLGSTWLSDFPQAWAETGGMGLAVRQAPLIIPLKATSTPVSIKQYPMSQEARLGIKPHIQRLLDQGILVPCQSPWNTPLLPVKKPGTNDYRPVQDLREVNKRVEDIHPTVPNPYNLLSGLPPSHQWYTVLDLKDAFFCLRLHPTSQPLFAFEWRDPEMGISGQLTWTRLPQGFKNSPTLFNEALHRDLAGFRIQHPDLILLQYVDDLLLAATSELDCQQGTRALLQTLGDLGYRASAKKAQICQKQVKYLGYLLKEGQRWLTEARKETVMGQPIPKTPRQLREFLGKAGFCRLFIPGFAEMAAPLYPLTKPGTLFNWGPDQQKAFQEIKQALLTAPALGLPDLTKPFELFVDEKQGYAKGVLTQKLGPWRRPVAYLSKKLDPVAAGWPPCLRMVAAIAVLTKDAGKLTMGQPLVILAPHAVEALVKQPPDRWLSNARMTHYQALLLDTDRVQFGPVVALNPATLLPLPEEGLQHDCLDILAEAHGTRSDLMDQPLPDADHTWYTDGSSFLQEGQRKAGAAVTTETEVIWARALPAGTSAQRAELIALTQALKMAEGKKLNVYTDSRYAFATAHIHGEIYRRRGWLTSEGKEIKNKDEILALLKALFLPKRLSIIHCPGHQKGNSAEARGNRMADQAAREVATRETPETSTLLAGKRTADGSEFEKRTADGSEFESPKKKAKVE

SEQ ID NO: 2361 - protein, 2095 aa, synthetic construct
MPAAKRVKLDGGDKKYSIGLDIGTNSVGWAVITDEYKVPSKKFKVLGNTDRHSIKKNLIGALLFDSGETAEATRLKRTARRRYTRRKNRICYLQEIFSNEMAKVDDSFFHRLEESFLVEEDKKHERHPIFGNIVDEVAYHEKYPTIYHLRKKLVDSTDKADLRLIYLALAHMIKFRGHFLIEGDLNPDNSDVDKLFIQLVQTYNQLFEENPINASGVDAKAILSARLSKSRRLENLIAQLPGEKKNGLFGNLIALSLGLTPNFKSNFDLAEDAKLQLSKDTYDDDLDNLLAQIGDQYADLFLAAKNLSDAILLSDILRVNTEITKAPLSASMIKRYDEHHQDLTLLKALVRQQLPEKYKEIFFDQSKNGYAGYIDGGASQEEFYKFIKPILEKMDGTEELLVKLNREDLLRKQRTFDNGSIPHQIHLGELHAILRRQEDFYPFLKDNREKIEKILTFRIPYYVGPLARGNSRFAWMTRKSEETITPWNFEEVVDKGASAQSFIERMTNFDKNLPNEKVLPKHSLLYEYFTVYNELTKVKYVTEGMRKPAFLSGEQKKAIVDLLFKTNRKVTVKQLKEDYFKKIECFDSVEISGVEDRFNASLGTYHDLLKIIKDKDFLDNEENEDILEDIVLTLTLFEDREMIEERLKTYAHLFDDKVMKQLKRRRYTGWGRLSRKLINGIRDKQSGKTILDFLKSDGFANRNFMQLIHDDSLTFKEDIQKAQVSGQGDSLHEHIANLAGSPAIKKGILQTVKVVDELVKVMGRHKPENIVIEMARENQTTQKGQKNSRERMKRIEEGIKELGSQILKEHPVENTQLQNEKLYLYYLQNGRDMYVDQELDINRLSDYDVDHIVPQSFLKDDSIDNKVLTRSDKARGKSDNVPSEEVVKKMKNYWRQLLNAKLITQRKFDNLTKAERGGLSELDKAGFIKRQLVETRQITKHVAQILDSRMNTKYDENDKLIREVKVITLKSKLVSDFRKDFQFYKVREINNYHHAHDAYLNAVVGTALIKKYPKLESEFVYGDYKVYDVRKMIAKSEQEIGKATAKYFFYSNIMNFFKTEITLANGEIRKRPLIETNGETGEIVWDKGRDFATVRKVLSMPQVNIVKKTEVQTGGFSKESILPKRNSDKLIARKKDWDPKKYGGFDSPTVAYSVLVVAKVEKGKSKKLKSVKELLGITIMERSSFEKNPIDFLEAKGYKEVKKDLIIKLPKYSLFELENGRKRMLASAGELQKGNELALPSKYVNFLYLASHYEKLKGSPEDNEQKQLFVEQHKHYLDEIIEQISEFSKRVILADANLDKVLSAYNKHRDKPIREQAENIIHLFTLTNLGAPAAFKYFDTTIDRKRYTSTKEVLDATLIHQSITGLYETRIDLSQLGGDGGEAAAKEAAAKGGTLNIEDEYRLHETSKEPDVSLGSTWLSDFPQAWAETGGMGLAVRQAPLIIPLKATSTPVSIKQYPMSQEARLGIKPHIQRLLDQGILVPCQSPWNTPLLPVKKPGTNDYRPVQDLREVNKRVEDIHPTVPNPYNLLSGLPPSHQWYTVLDLKDAFFCLRLHPTSQPLFAFEWRDPEMGISGQLTWTRLPQGFKNSPTLFNEALHRDLAGFRIQHPDLILLQYVDDLLLAATSELDCQQGTRALLQTLGDLGYRASAKKAQICQKQVKYLGYLLKEGQRWLTEARKETVMGQPIPKTPRQLREFLGKAGFCRLFIPGFAEMAAPLYPLTKPGTLFNWGPDQQKAFQEIKQALLTAPALGLPDLTKPFELFVDEKQGYAKGVLTQKLGPWRRPVAYLSKKLDPVAAGWPPCLRMVAAIAVLTKDAGKLTMGQPLVILAPHAVEALVKQPPDRWLSNARMTHYQALLLDTDRVQFGPVVALNPATLLPLPEEGLQHDCLDILAEAHGTRSDLMDQPLPDADHTWYTDGSSFLQEGQRKAGAAVTTETEVIWARALPAGTSAQRAELIALTQALKMAEGKKLNVYTDSRYAFATAHIHGEIYRRRGWLTSEGKEIKNKDEILALLKALFLPKRLSIIHCPGHQKGNSAEARGNRMADQAAREVATRETPETSTLLAGKRTADGSEFEKRTADGSEFESPKKKAKVE

SEQ ID NO: 2362 - protein, 2091 aa, synthetic construct
MPAAKRVKLDGGDKKYSIGLDIGTNSVGWAVITDEYKVPSKKFKVLGNTDRHSIKKNLIGALLFDSGETAEATRLKRTARRRYTRRKNRICYLQEIFSNEMAKVDDSFFHRLEESFLVEEDKKHERHPIFGNIVDEVAYHEKYPTIYHLRKKLVDSTDKADLRLIYLALAHMIKFRGHFLIEGDLNPDNSDVDKLFIQLVQTYNQLFEENPINASGVDAKAILSARLSKSRRLENLIAQLPGEKKNGLFGNLIALSLGLTPNFKSNFDLAEDAKLQLSKDTYDDDLDNLLAQIGDQYADLFLAAKNLSDAILLSDILRVNTEITKAPLSASMIKRYDEHHQDLTLLKALVRQQLPEKYKEIFFDQSKNGYAGYIDGGASQEEFYKFIKPILEKMDGTEELLVKLNREDLLRKQRTFDNGSIPHQIHLGELHAILRRQEDFYPFLKDNREKIEKILTFRIPYYVGPLARGNSRFAWMTRKSEETITPWNFEEVVDKGASAQSFIERMTNFDKNLPNEKVLPKHSLLYEYFTVYNELTKVKYVTEGMRKPAFLSGEQKKAIVDLLFKTNRKVTVKQLKEDYFKKIECFDSVEISGVEDRFNASLGTYHDLLKIIKDKDFLDNEENEDILEDIVLTLTLFEDREMIEERLKTYAHLFDDKVMKQLKRRRYTGWGRLSRKLINGIRDKQSGKTILDFLKSDGFANRNFMQLIHDDSLTFKEDIQKAQVSGQGDSLHEHIANLAGSPAIKKGILQTVKVVDELVKVMGRHKPENIVIEMARENQTTQKGQKNSRERMKRIEEGIKELGSQILKEHPVENTQLQNEKLYLYYLQNGRDMYVDQELDINRLSDYDVDHIVPQSFLKDDSIDNKVLTRSDKARGKSDNVPSEEVVKKMKNYWRQLLNAKLITQRKFDNLTKAERGGLSELDKAGFIKRQLVETRQITKHVAQILDSRMNTKYDENDKLIREVKVITLKSKLVSDFRKDFQFYKVREINNYHHAHDAYLNAVVGTALIKKYPKLESEFVYGDYKVYDVRKMIAKSEQEIGKATAKYFFYSNIMNFFKTEITLANGEIRKRPLIETNGETGEIVWDKGRDFATVRKVLSMPQVNIVKKTEVQTGGFSKESILPKRNSDKLIARKKDWDPKKYGGFDSPTVAYSVLVVAKVEKGKSKKLKSVKELLGITIMERSSFEKNPIDFLEAKGYKEVKKDLIIKLPKYSLFELENGRKRMLASAGELQKGNELALPSKYVNFLYLASHYEKLKGSPEDNEQKQLFVEQHKHYLDEIIEQISEFSKRVILADANLDKVLSAYNKHRDKPIREQAENIIHLFTLTNLGAPAAFKYFDTTIDRKRYTSTKEVLDATLIHQSITGLYETRIDLSQLGGDGGGSSGGGGGTLNIEDEYRLHETSKEPDVSLGSTWLSDFPQAWAETGGMGLAVRQAPLIIPLKATSTPVSIKQYPMSQEARLGIKPHIQRLLDQGILVPCQSPWNTPLLPVKKPGTNDYRPVQDLREVNKRVEDIHPTVPNPYNLLSGLPPSHQWYTVLDLKDAFFCLRLHPTSQPLFAFEWRDPEMGISGQLTWTRLPQGFKNSPTLFNEALHRDLAGFRIQHPDLILLQYVDDLLLAATSELDCQQGTRALLQTLGDLGYRASAKKAQICQKQVKYLGYLLKEGQRWLTEARKETVMGQPIPKTPRQLREFLGKAGFCRLFIPGFAEMAAPLYPLTKPGTLFNWGPDQQKAFQEIKQALLTAPALGLPDLTKPFELFVDEKQGYAKGVLTQKLGPWRRPVAYLSKKLDPVAAGWPPCLRMVAAIAVLTKDAGKLTMGQPLVILAPHAVEALVKQPPDRWLSNARMTHYQALLLDTDRVQFGPVVALNPATLLPLPEEGLQHDCLDILAEAHGTRSDLMDQPLPDADHTWYTDGSSFLQEGQRKAGAAVTTETEVIWARALPAGTSAQRAELIALTQALKMAEGKKLNVYTDSRYAFATAHIHGEIYRRRGWLTSEGKEIKNKDEILALLKALFLPKRLSIIHCPGHQKGNSAEARGNRMADQAAREVATRETPETSTLLAGKRTADGSEFEKRTADGSEFESPKKKAKVE

SEQ ID NO: 2363 - protein, 2093 aa, synthetic construct
MPAAKRVKLDGGDKKYSIGLDIGTNSVGWAVITDEYKVPSKKFKVLGNTDRHSIKKNLIGALLFDSGETAEATRLKRTARRRYTRRKNRICYLQEIFSNEMAKVDDSFFHRLEESFLVEEDKKHERHPIFGNIVDEVAYHEKYPTIYHLRKKLVDSTDKADLRLIYLALAHMIKFRGHFLIEGDLNPDNSDVDKLFIQLVQTYNQLFEENPINASGVDAKAILSARLSKSRRLENLIAQLPGEKKNGLFGNLIALSLGLTPNFKSNFDLAEDAKLQLSKDTYDDDLDNLLAQIGDQYADLFLAAKNLSDAILLSDILRVNTEITKAPLSASMIKRYDEHHQDLTLLKALVRQQLPEKYKEIFFDQSKNGYAGYIDGGASQEEFYKFIKPILEKMDGTEELLVKLNREDLLRKQRTFDNGSIPHQIHLGELHAILRRQEDFYPFLKDNREKIEKILTFRIPYYVGPLARGNSRFAWMTRKSEETITPWNFEEVVDKGASAQSFIERMTNFDKNLPNEKVLPKHSLLYEYFTVYNELTKVKYVTEGMRKPAFLSGEQKKAIVDLLFKTNRKVTVKQLKEDYFKKIECFDSVEISGVEDRFNASLGTYHDLLKIIKDKDFLDNEENEDILEDIVLTLTLFEDREMIEERLKTYAHLFDDKVMKQLKRRRYTGWGRLSRKLINGIRDKQSGKTILDFLKSDGFANRNFMQLIHDDSLTFKEDIQKAQVSGQGDSLHEHIANLAGSPAIKKGILQTVKVVDELVKVMGRHKPENIVIEMARENQTTQKGQKNSRERMKRIEEGIKELGSQILKEHPVENTQLQNEKLYLYYLQNGRDMYVDQELDINRLSDYDVDHIVPQSFLKDDSIDNKVLTRSDKARGKSDNVPSEEVVKKMKNYWRQLLNAKLITQRKFDNLTKAERGGLSELDKAGFIKRQLVETRQITKHVAQILDSRMNTKYDENDKLIREVKVITLKSKLVSDFRKDFQFYKVREINNYHHAHDAYLNAVVGTALIKKYPKLESEFVYGDYKVYDVRKMIAKSEQEIGKATAKYFFYSNIMNFFKTEITLANGEIRKRPLIETNGETGEIVWDKGRDFATVRKVLSMPQVNIVKKTEVQTGGFSKESILPKRNSDKLIARKKDWDPKKYGGFDSPTVAYSVLVVAKVEKGKSKKLKSVKELLGITIMERSSFEKNPIDFLEAKGYKEVKKDLIIKLPKYSLFELENGRKRMLASAGELQKGNELALPSKYVNFLYLASHYEKLKGSPEDNEQKQLFVEQHKHYLDEIIEQISEFSKRVILADANLDKVLSAYNKHRDKPIREQAENIIHLFTLTNLGAPAAFKYFDTTIDRKRYTSTKEVLDATLIHQSITGLYETRIDLSQLGGDGGGGSEAAAKGGTLNIEDEYRLHETSKEPDVSLGSTWLSDFPQAWAETGGMGLAVRQAPLIIPLKATSTPVSIKQYPMSQEARLGIKPHIQRLLDQGILVPCQSPWNTPLLPVKKPGTNDYRPVQDLREVNKRVEDIHPTVPNPYNLLSGLPPSHQWYTVLDLKDAFFCLRLHPTSQPLFAFEWRDPEMGISGQLTWTRLPQGFKNSPTLFNEALHRDLAGFRIQHPDLILLQYVDDLLLAATSELDCQQGTRALLQTLGDLGYRASAKKAQICQKQVKYLGYLLKEGQRWLTEARKETVMGQPIPKTPRQLREFLGKAGFCRLFIPGFAEMAAPLYPLTKPGTLFNWGPDQQKAFQEIKQALLTAPALGLPDLTKPFELFVDEKQGYAKGVLTQKLGPWRRPVAYLSKKLDPVAAGWPPCLRMVAAIAVLTKDAGKLTMGQPLVILAPHAVEALVKQPPDRWLSNARMTHYQALLLDTDRVQFGPVVALNPATLLPLPEEGLQHDCLDILAEAHGTRSDLMDQPLPDADHTWYTDGSSFLQEGQRKAGAAVTTETEVIWARALPAGTSAQRAELIALTQALKMAEGKKLNVYTDSRYAFATAHIHGEIYRRRGWLTSEGKEIKNKDEILALLKALFLPKRLSIIHCPGHQKGNSAEARGNRMADQAAREVATRETPETSTLLAGKRTADGSEFEKRTADGSEFESPKKKAKVE

SEQ ID NO: 2364 - protein, 2090 aa, synthetic construct
MPAAKRVKLDGGDKKYSIGLDIGTNSVGWAVITDEYKVPSKKFKVLGNTDRHSIKKNLIGALLFDSGETAEATRLKRTARRRYTRRKNRICYLQEIFSNEMAKVDDSFFHRLEESFLVEEDKKHERHPIFGNIVDEVAYHEKYPTIYHLRKKLVDSTDKADLRLIYLALAHMIKFRGHFLIEGDLNPDNSDVDKLFIQLVQTYNQLFEENPINASGVDAKAILSARLSKSRRLENLIAQLPGEKKNGLFGNLIALSLGLTPNFKSNFDLAEDAKLQLSKDTYDDDLDNLLAQIGDQYADLFLAAKNLSDAILLSDILRVNTEITKAPLSASMIKRYDEHHQDLTLLKALVRQQLPEKYKEIFFDQSKNGYAGYIDGGASQEEFYKFIKPILEKMDGTEELLVKLNREDLLRKQRTFDNGSIPHQIHLGELHAILRRQEDFYPFLKDNREKIEKILTFRIPYYVGPLARGNSRFAWMTRKSEETITPWNFEEVVDKGASAQSFIERMTNFDKNLPNEKVLPKHSLLYEYFTVYNELTKVKYVTEGMRKPAFLSGEQKKAIVDLLFKTNRKVTVKQLKEDYFKKIECFDSVEISGVEDRFNASLGTYHDLLKIIKDKDFLDNEENEDILEDIVLTLTLFEDREMIEERLKTYAHLFDDKVMKQLKRRRYTGWGRLSRKLINGIRDKQSGKTILDFLKSDGFANRNFMQLIHDDSLTFKEDIQKAQVSGQGDSLHEHIANLAGSPAIKKGILQTVKVVDELVKVMGRHKPENIVIEMARENQTTQKGQKNSRERMKRIEEGIKELGSQILKEHPVENTQLQNEKLYLYYLQNGRDMYVDQELDINRLSDYDVDHIVPQSFLKDDSIDNKVLTRSDKARGKSDNVPSEEVVKKMKNYWRQLLNAKLITQRKFDNLTKAERGGLSELDKAGFIKRQLVETRQITKHVAQILDSRMNTKYDENDKLIREVKVITLKSKLVSDFRKDFQFYKVREINNYHHAHDAYLNAVVGTALIKKYPKLESEFVYGDYKVYDVRKMIAKSEQEIGKATAKYFFYSNIMNFFKTEITLANGEIRKRPLIETNGETGEIVWDKGRDFATVRKVLSMPQVNIVKKTEVQTGGFSKESILPKRNSDKLIARKKDWDPKKYGGFDSPTVAYSVLVVAKVEKGKSKKLKSVKELLGITIMERSSFEKNPIDFLEAKGYKEVKKDLIIKLPKYSLFELENGRKRMLASAGELQKGNELALPSKYVNFLYLASHYEKLKGSPEDNEQKQLFVEQHKHYLDEIIEQISEFSKRVILADANLDKVLSAYNKHRDKPIREQAENIIHLFTLTNLGAPAAFKYFDTTIDRKRYTSTKEVLDATLIHQSITGLYETRIDLSQLGGDGGPAPAPGGTLNIEDEYRLHETSKEPDVSLGSTWLSDFPQAWAETGGMGLAVRQAPLIIPLKATSTPVSIKQYPMSQEARLGIKPHIQRLLDQGILVPCQSPWNTPLLPVKKPGTNDYRPVQDLREVNKRVEDIHPTVPNPYNLLSGLPPSHQWYTVLDLKDAFFCLRLHPTSQPLFAFEWRDPEMGISGQLTWTRLPQGFKNSPTLFNEALHRDLAGFRIQHPDLILLQYVDDLLLAATSELDCQQGTRALLQTLGDLGYRASAKKAQICQKQVKYLGYLLKEGQRWLTEARKETVMGQPIPKTPRQLREFLGKAGFCRLFIPGFAEMAAPLYPLTKPGTLFNWGPDQQKAFQEIKQALLTAPALGLPDLTKPFELFVDEKQGYAKGVLTQKLGPWRRPVAYLSKKLDPVAAGWPPCLRMVAAIAVLTKDAGKLTMGQPLVILAPHAVEALVKQPPDRWLSNARMTHYQALLLDTDRVQFGPVVALNPATLLPLPEEGLQHDCLDILAEAHGTRSDLMDQPLPDADHTWYTDGSSFLQEGQRKAGAAVTTETEVIWARALPAGTSAQRAELIALTQALKMAEGKKLNVYTDSRYAFATAHIHGEIYRRRGWLTSEGKEIKNKDEILALLKALFLPKRLSIIHCPGHQKGNSAEARGNRMADQAAREVATRETPETSTLLAGKRTADGSEFEKRTADGSEFESPKKKAKVE

SEQ ID NO: 2365 - protein, 2094 aa, synthetic construct
MPAAKRVKLDGGDKKYSIGLDIGTNSVGWAVITDEYKVPSKKFKVLGNTDRHSIKKNLIGALLFDSGETAEATRLKRTARRRYTRRKNRICYLQEIFSNEMAKVDDSFFHRLEESFLVEEDKKHERHPIFGNIVDEVAYHEKYPTIYHLRKKLVDSTDKADLRLIYLALAHMIKFRGHFLIEGDLNPDNSDVDKLFIQLVQTYNQLFEENPINASGVDAKAILSARLSKSRRLENLIAQLPGEKKNGLFGNLIALSLGLTPNFKSNFDLAEDAKLQLSKDTYDDDLDNLLAQIGDQYADLFLAAKNLSDAILLSDILRVNTEITKAPLSASMIKRYDEHHQDLTLLKALVRQQLPEKYKEIFFDQSKNGYAGYIDGGASQEEFYKFIKPILEKMDGTEELLVKLNREDLLRKQRTFDNGSIPHQIHLGELHAILRRQEDFYPFLKDNREKIEKILTFRIPYYVGPLARGNSRFAWMTRKSEETITPWNFEEVVDKGASAQSFIERMTNFDKNLPNEKVLPKHSLLYEYFTVYNELTKVKYVTEGMRKPAFLSGEQKKAIVDLLFKTNRKVTVKQLKEDYFKKIECFDSVEISGVEDRFNASLGTYHDLLKIIKDKDFLDNEENEDILEDIVLTLTLFEDREMIEERLKTYAHLFDDKVMKQLKRRRYTGWGRLSRKLINGIRDKQSGKTILDFLKSDGFANRNFMQLIHDDSLTFKEDIQKAQVSGQGDSLHEHIANLAGSPAIKKGILQTVKVVDELVKVMGRHKPENIVIEMARENQTTQKGQKNSRERMKRIEEGIKELGSQILKEHPVENTQLQNEKLYLYYLQNGRDMYVDQELDINRLSDYDVDHIVPQSFLKDDSIDNKVLTRSDKARGKSDNVPSEEVVKKMKNYWRQLLNAKLITQRKFDNLTKAERGGLSELDKAGFIKRQLVETRQITKHVAQILDSRMNTKYDENDKLIREVKVITLKSKLVSDFRKDFQFYKVREINNYHHAHDAYLNAVVGTALIKKYPKLESEFVYGDYKVYDVRKMIAKSEQEIGKATAKYFFYSNIMNFFKTEITLANGEIRKRPLIETNGETGEIVWDKGRDFATVRKVLSMPQVNIVKKTEVQTGGFSKESILPKRNSDKLIARKKDWDPKKYGGFDSPTVAYSVLVVAKVEKGKSKKLKSVKELLGITIMERSSFEKNPIDFLEAKGYKEVKKDLIIKLPKYSLFELENGRKRMLASAGELQKGNELALPSKYVNFLYLASHYEKLKGSPEDNEQKQLFVEQHKHYLDEIIEQISEFSKRVILADANLDKVLSAYNKHRDKPIREQAENIIHLFTLTNLGAPAAFKYFDTTIDRKRYTSTKEVLDATLIHQSITGLYETRIDLSQLGGDGGGGSPAPGGGGGTLNIEDEYRLHETSKEPDVSLGSTWLSDFPQAWAETGGMGLAVRQAPLIIPLKATSTPVSIKQYPMSQEARLGIKPHIQRLLDQGILVPCQSPWNTPLLPVKKPGTNDYRPVQDLREVNKRVEDIHPTVPNPYNLLSGLPPSHQWYTVLDLKDAFFCLRLHPTSQPLFAFEWRDPEMGISGQLTWTRLPQGFKNSPTLFNEALHRDLAGFRIQHPDLILLQYVDDLLLAATSELDCQQGTRALLQTLGDLGYRASAKKAQICQKQVKYLGYLLKEGQRWLTEARKETVMGQPIPKTPRQLREFLGKAGFCRLFIPGFAEMAAPLYPLTKPGTLFNWGPDQQKAFQEIKQALLTAPALGLPDLTKPFELFVDEKQGYAKGVLTQKLGPWRRPVAYLSKKLDPVAAGWPPCLRMVAAIAVLTKDAGKLTMGQPLVILAPHAVEALVKQPPDRWLSNARMTHYQALLLDTDRVQFGPVVALNPATLLPLPEEGLQHDCLDILAEAHGTRSDLMDQPLPDADHTWYTDGSSFLQEGQRKAGAAVTTETEVIWARALPAGTSAQRAELIALTQALKMAEGKKLNVYTDSRYAFATAHIHGEIYRRRGWLTSEGKEIKNKDEILALLKALFLPKRLSIIHCPGHQKGNSAEARGNRMADQAAREVATRETPETSTLLAGKRTADGSEFEKRTADGSEFESPKKKAKVE

SEQ ID NO: 2366 - protein, 2091 aa, synthetic construct
MPAAKRVKLDGGDKKYSIGLDIGTNSVGWAVITDEYKVPSKKFKVLGNTDRHSIKKNLIGALLFDSGETAEATRLKRTARRRYTRRKNRICYLQEIFSNEMAKVDDSFFHRLEESFLVEEDKKHERHPIFGNIVDEVAYHEKYPTIYHLRKKLVDSTDKADLRLIYLALAHMIKFRGHFLIEGDLNPDNSDVDKLFIQLVQTYNQLFEENPINASGVDAKAILSARLSKSRRLENLIAQLPGEKKNGLFGNLIALSLGLTPNFKSNFDLAEDAKLQLSKDTYDDDLDNLLAQIGDQYADLFLAAKNLSDAILLSDILRVNTEITKAPLSASMIKRYDEHHQDLTLLKALVRQQLPEKYKEIFFDQSKNGYAGYIDGGASQEEFYKFIKPILEKMDGTEELLVKLNREDLLRKQRTFDNGSIPHQIHLGELHAILRRQEDFYPFLKDNREKIEKILTFRIPYYVGPLARGNSRFAWMTRKSEETITPWNFEEVVDKGASAQSFIERMTNFDKNLPNEKVLPKHSLLYEYFTVYNELTKVKYVTEGMRKPAFLSGEQKKAIVDLLFKTNRKVTVKQLKEDYFKKIECFDSVEISGVEDRFNASLGTYHDLLKIIKDKDFLDNEENEDILEDIVLTLTLFEDREMIEERLKTYAHLFDDKVMKQLKRRRYTGWGRLSRKLINGIRDKQSGKTILDFLKSDGFANRNFMQLIHDDSLTFKEDIQKAQVSGQGDSLHEHIANLAGSPAIKKGILQTVKVVDELVKVMGRHKPENIVIEMARENQTTQKGQKNSRERMKRIEEGIKELGSQILKEHPVENTQLQNEKLYLYYLQNGRDMYVDQELDINRLSDYDVDHIVPQSFLKDDSIDNKVLTRSDKARGKSDNVPSEEVVKKMKNYWRQLLNAKLITQRKFDNLTKAERGGLSELDKAGFIKRQLVETRQITKHVAQILDSRMNTKYDENDKLIREVKVITLKSKLVSDFRKDFQFYKVREINNYHHAHDAYLNAVVGTALIKKYPKLESEFVYGDYKVYDVRKMIAKSEQEIGKATAKYFFYSNIMNFFKTEITLANGEIRKRPLIETNGETGEIVWDKGRDFATVRKVLSMPQVNIVKKTEVQTGGFSKESILPKRNSDKLIARKKDWDPKKYGGFDSPTVAYSVLVVAKVEKGKSKKLKSVKELLGITIMERSSFEKNPIDFLEAKGYKEVKKDLIIKLPKYSLFELENGRKRMLASAGELQKGNELALPSKYVNFLYLASHYEKLKGSPEDNEQKQLFVEQHKHYLDEIIEQISEFSKRVILADANLDKVLSAYNKHRDKPIREQAENIIHLFTLTNLGAPAAFKYFDTTIDRKRYTSTKEVLDATLIHQSITGLYETRIDLSQLGGDGGGSSPAPGGTLNIEDEYRLHETSKEPDVSLGSTWLSDFPQAWAETGGMGLAVRQAPLIIPLKATSTPVSIKQYPMSQEARLGIKPHIQRLLDQGILVPCQSPWNTPLLPVKKPGTNDYRPVQDLREVNKRVEDIHPTVPNPYNLLSGLPPSHQWYTVLDLKDAFFCLRLHPTSQPLFAFEWRDPEMGISGQLTWTRLPQGFKNSPTLFNEALHRDLAGFRIQHPDLILLQYVDDLLLAATSELDCQQGTRALLQTLGDLGYRASAKKAQICQKQVKYLGYLLKEGQRWLTEARKETVMGQPIPKTPRQLREFLGKAGFCRLFIPGFAEMAAPLYPLTKPGTLFNWGPDQQKAFQEIKQALLTAPALGLPDLTKPFELFVDEKQGYAKGVLTQKLGPWRRPVAYLSKKLDPVAAGWPPCLRMVAAIAVLTKDAGKLTMGQPLVILAPHAVEALVKQPPDRWLSNARMTHYQALLLDTDRVQFGPVVALNPATLLPLPEEGLQHDCLDILAEAHGTRSDLMDQPLPDADHTWYTDGSSFLQEGQRKAGAAVTTETEVIWARALPAGTSAQRAELIALTQALKMAEGKKLNVYTDSRYAFATAHIHGEIYRRRGWLTSEGKEIKNKDEILALLKALFLPKRLSIIHCPGHQKGNSAEARGNRMADQAAREVATRETPETSTLLAGKRTADGSEFEKRTADGSEFESPKKKAKVE

SEQ ID NO: 2367 - protein, 2096 aa, synthetic construct
MPAAKRVKLDGGDKKYSIGLDIGTNSVGWAVITDEYKVPSKKFKVLGNTDRHSIKKNLIGALLFDSGETAEATRLKRTARRRYTRRKNRICYLQEIFSNEMAKVDDSFFHRLEESFLVEEDKKHERHPIFGNIVDEVAYHEKYPTIYHLRKKLVDSTDKADLRLIYLALAHMIKFRGHFLIEGDLNPDNSDVDKLFIQLVQTYNQLFEENPINASGVDAKAILSARLSKSRRLENLIAQLPGEKKNGLFGNLIALSLGLTPNFKSNFDLAEDAKLQLSKDTYDDDLDNLLAQIGDQYADLFLAAKNLSDAILLSDILRVNTEITKAPLSASMIKRYDEHHQDLTLLKALVRQQLPEKYKEIFFDQSKNGYAGYIDGGASQEEFYKFIKPILEKMDGTEELLVKLNREDLLRKQRTFDNGSIPHQIHLGELHAILRRQEDFYPFLKDNREKIEKILTFRIPYYVGPLARGNSRFAWMTRKSEETITPWNFEEVVDKGASAQSFIERMTNFDKNLPNEKVLPKHSLLYEYFTVYNELTKVKYVTEGMRKPAFLSGEQKKAIVDLLFKTNRKVTVKQLKEDYFKKIECFDSVEISGVEDRFNASLGTYHDLLKIIKDKDFLDNEENEDILEDIVLTLTLFEDREMIEERLKTYAHLFDDKVMKQLKRRRYTGWGRLSRKLINGIRDKQSGKTILDFLKSDGFANRNFMQLIHDDSLTFKEDIQKAQVSGQGDSLHEHIANLAGSPAIKKGILQTVKVVDELVKVMGRHKPENIVIEMARENQTTQKGQKNSRERMKRIEEGIKELGSQILKEHPVENTQLQNEKLYLYYLQNGRDMYVDQELDINRLSDYDVDHIVPQSFLKDDSIDNKVLTRSDKARGKSDNVPSEEVVKKMKNYWRQLLNAKLITQRKFDNLTKAERGGLSELDKAGFIKRQLVETRQITKHVAQILDSRMNTKYDENDKLIREVKVITLKSKLVSDFRKDFQFYKVREINNYHHAHDAYLNAVVGTALIKKYPKLESEFVYGDYKVYDVRKMIAKSEQEIGKATAKYFFYSNIMNFFKTEITLANGEIRKRPLIETNGETGEIVWDKGRDFATVRKVLSMPQVNIVKKTEVQTGGFSKESILPKRNSDKLIARKKDWDPKKYGGFDSPTVAYSVLVVAKVEKGKSKKLKSVKELLGITIMERSSFEKNPIDFLEAKGYKEVKKDLIIKLPKYSLFELENGRKRMLASAGELQKGNELALPSKYVNFLYLASHYEKLKGSPEDNEQKQLFVEQHKHYLDEIIEQISEFSKRVILADANLDKVLSAYNKHRDKPIREQAENIIHLFTLTNLGAPAAFKYFDTTIDRKRYTSTKEVLDATLIHQSITGLYETRIDLSQLGGDGGEAAAKGSSGGGGGTLNIEDEYRLHETSKEPDVSLGSTWLSDFPQAWAETGGMGLAVRQAPLIIPLKATSTPVSIKQYPMSQEARLGIKPHIQRLLDQGILVPCQSPWNTPLLPVKKPGTNDYRPVQDLREVNKRVEDIHPTVPNPYNLLSGLPPSHQWYTVLDLKDAFFCLRLHPTSQPLFAFEWRDPEMGISGQLTWTRLPQGFKNSPTLFNEALHRDLAGFRIQHPDLILLQYVDDLLLAATSELDCQQGTRALLQTLGDLGYRASAKKAQICQKQVKYLGYLLKEGQRWLTEARKETVMGQPIPKTPRQLREFLGKAGFCRLFIPGFAEMAAPLYPLTKPGTLFNWGPDQQKAFQEIKQALLTAPALGLPDLTKPFELFVDEKQGYAKGVLTQKLGPWRRPVAYLSKKLDPVAAGWPPCLRMVAAIAVLTKDAGKLTMGQPLVILAPHAVEALVKQPPDRWLSNARMTHYQALLLDTDRVQFGPVVALNPATLLPLPEEGLQHDCLDILAEAHGTRSDLMDQPLPDADHTWYTDGSSFLQEGQRKAGAAVTTETEVIWARALPAGTSAQRAELIALTQALKMAEGKKLNVYTDSRYAFATAHIHGEIYRRRGWLTSEGKEIKNKDEILALLKALFLPKRLSIIHCPGHQKGNSAEARGNRMADQAAREVATRETPETSTLLAGKRTADGSEFEKRTADGSEFESPKKKAKVE

SEQ ID NO: 2368 - protein, 2096 aa, synthetic construct
MPAAKRVKLDGGDKKYSIGLDIGTNSVGWAVITDEYKVPSKKFKVLGNTDRHSIKKNLIGALLFDSGETAEATRLKRTARRRYTRRKNRICYLQEIFSNEMAKVDDSFFHRLEESFLVEEDKKHERHPIFGNIVDEVAYHEKYPTIYHLRKKLVDSTDKADLRLIYLALAHMIKFRGHFLIEGDLNPDNSDVDKLFIQLVQTYNQLFEENPINASGVDAKAILSARLSKSRRLENLIAQLPGEKKNGLFGNLIALSLGLTPNFKSNFDLAEDAKLQLSKDTYDDDLDNLLAQIGDQYADLFLAAKNLSDAILLSDILRVNTEITKAPLSASMIKRYDEHHQDLTLLKALVRQQLPEKYKEIFFDQSKNGYAGYIDGGASQEEFYKFIKPILEKMDGTEELLVKLNREDLLRKQRTFDNGSIPHQIHLGELHAILRRQEDFYPFLKDNREKIEKILTFRIPYYVGPLARGNSRFAWMTRKSEETITPWNFEEVVDKGASAQSFIERMTNFDKNLPNEKVLPKHSLLYEYFTVYNELTKVKYVTEGMRKPAFLSGEQKKAIVDLLFKTNRKVTVKQLKEDYFKKIECFDSVEISGVEDRFNASLGTYHDLLKIIKDKDFLDNEENEDILEDIVLTLTLFEDREMIEERLKTYAHLFDDKVMKQLKRRRYTGWGRLSRKLINGIRDKQSGKTILDFLKSDGFANRNFMQLIHDDSLTFKEDIQKAQVSGQGDSLHEHIANLAGSPAIKKGILQTVKVVDELVKVMGRHKPENIVIEMARENQTTQKGQKNSRERMKRIEEGIKELGSQILKEHPVENTQLQNEKLYLYYLQNGRDMYVDQELDINRLSDYDVDHIVPQSFLKDDSIDNKVLTRSDKARGKSDNVPSEEVVKKMKNYWRQLLNAKLITQRKFDNLTKAERGGLSELDKAGFIKRQLVETRQITKHVAQILDSRMNTKYDENDKLIREVKVITLKSKLVSDFRKDFQFYKVREINNYHHAHDAYLNAVVGTALIKKYPKLESEFVYGDYKVYDVRKMIAKSEQEIGKATAKYFFYSNIMNFFKTEITLANGEIRKRPLIETNGETGEIVWDKGRDFATVRKVLSMPQVNIVKKTEVQTGGFSKESILPKRNSDKLIARKKDWDPKKYGGFDSPTVAYSVLVVAKVEKGKSKKLKSVKELLGITIMERSSFEKNPIDFLEAKGYKEVKKDLIIKLPKYSLFELENGRKRMLASAGELQKGNELALPSKYVNFLYLASHYEKLKGSPEDNEQKQLFVEQHKHYLDEIIEQISEFSKRVILADANLDKVLSAYNKHRDKPIREQAENIIHLFTLTNLGAPAAFKYFDTTIDRKRYTSTKEVLDATLIHQSITGLYETRIDLSQLGGDGGEAAAKGSSGGSGGTLNIEDEYRLHETSKEPDVSLGSTWLSDFPQAWAETGGMGLAVRQAPLIIPLKATSTPVSIKQYPMSQEARLGIKPHIQRLLDQGILVPCQSPWNTPLLPVKKPGTNDYRPVQDLREVNKRVEDIHPTVPNPYNLLSGLPPSHQWYTVLDLKDAFFCLRLHPTSQPLFAFEWRDPEMGISGQLTWTRLPQGFKNSPTLFNEALHRDLAGFRIQHPDLILLQYVDDLLLAATSELDCQQGTRALLQTLGDLGYRASAKKAQICQKQVKYLGYLLKEGQRWLTEARKETVMGQPIPKTPRQLREFLGKAGFCRLFIPGFAEMAAPLYPLTKPGTLFNWGPDQQKAFQEIKQALLTAPALGLPDLTKPFELFVDEKQGYAKGVLTQKLGPWRRPVAYLSKKLDPVAAGWPPCLRMVAAIAVLTKDAGKLTMGQPLVILAPHAVEALVKQPPDRWLSNARMTHYQALLLDTDRVQFGPVVALNPATLLPLPEEGLQHDCLDILAEAHGTRSDLMDQPLPDADHTWYTDGSSFLQEGQRKAGAAVTTETEVIWARALPAGTSAQRAELIALTQALKMAEGKKLNVYTDSRYAFATAHIHGEIYRRRGWLTSEGKEIKNKDEILALLKALFLPKRLSIIHCPGHQKGNSAEARGNRMADQAAREVATRETPETSTLLAGKRTADGSEFEKRTADGSEFESPKKKAKVE

SEQ ID NO: 2369 - protein, 2095 aa, synthetic construct
MPAAKRVKLDGGDKKYSIGLDIGTNSVGWAVITDEYKVPSKKFKVLGNTDRHSIKKNLIGALLFDSGETAEATRLKRTARRRYTRRKNRICYLQEIFSNEMAKVDDSFFHRLEESFLVEEDKKHERHPIFGNIVDEVAYHEKYPTIYHLRKKLVDSTDKADLRLIYLALAHMIKFRGHFLIEGDLNPDNSDVDKLFIQLVQTYNQLFEENPINASGVDAKAILSARLSKSRRLENLIAQLPGEKKNGLFGNLIALSLGLTPNFKSNFDLAEDAKLQLSKDTYDDDLDNLLAQIGDQYADLFLAAKNLSDAILLSDILRVNTEITKAPLSASMIKRYDEHHQDLTLLKALVRQQLPEKYKEIFFDQSKNGYAGYIDGGASQEEFYKFIKPILEKMDGTEELLVKLNREDLLRKQRTFDNGSIPHQIHLGELHAILRRQEDFYPFLKDNREKIEKILTFRIPYYVGPLARGNSRFAWMTRKSEETITPWNFEEVVDKGASAQSFIERMTNFDKNLPNEKVLPKHSLLYEYFTVYNELTKVKYVTEGMRKPAFLSGEQKKAIVDLLFKTNRKVTVKQLKEDYFKKIECFDSVEISGVEDRFNASLGTYHDLLKIIKDKDFLDNEENEDILEDIVLTLTLFEDREMIEERLKTYAHLFDDKVMKQLKRRRYTGWGRLSRKLINGIRDKQSGKTILDFLKSDGFANRNFMQLIHDDSLTFKEDIQKAQVSGQGDSLHEHIANLAGSPAIKKGILQTVKVVDELVKVMGRHKPENIVIEMARENQTTQKGQKNSRERMKRIEEGIKELGSQILKEHPVENTQLQNEKLYLYYLQNGRDMYVDQELDINRLSDYDVDHIVPQSFLKDDSIDNKVLTRSDKARGKSDNVPSEEVVKKMKNYWRQLLNAKLITQRKFDNLTKAERGGLSELDKAGFIKRQLVETRQITKHVAQILDSRMNTKYDENDKLIREVKVITLKSKLVSDFRKDFQFYKVREINNYHHAHDAYLNAVVGTALIKKYPKLESEFVYGDYKVYDVRKMIAKSEQEIGKATAKYFFYSNIMNFFKTEITLANGEIRKRPLIETNGETGEIVWDKGRDFATVRKVLSMPQVNIVKKTEVQTGGFSKESILPKRNSDKLIARKKDWDPKKYGGFDSPTVAYSVLVVAKVEKGKSKKLKSVKELLGITIMERSSFEKNPIDFLEAKGYKEVKKDLIIKLPKYSLFELENGRKRMLASAGELQKGNELALPSKYVNFLYLASHYEKLKGSPEDNEQKQLFVEQHKHYLDEIIEQISEFSKRVILADANLDKVLSAYNKHRDKPIREQAENIIHLFTLTNLGAPAAFKYFDTTIDRKRYTSTKEVLDATLIHQSITGLYETRIDLSQLGGDGGGGGGSGGGGSGGTLNIEDEYRLHETSKEPDVSLGSTWLSDFPQAWAETGGMGLAVRQAPLIIPLKATSTPVSIKQYPMSQEARLGIKPHIQRLLDQGILVPCQSPWNTPLLPVKKPGTNDYRPVQDLREVNKRVEDIHPTVPNPYNLLSGLPPSHQWYTVLDLKDAFFCLRLHPTSQPLFAFEWRDPEMGISGQLTWTRLPQGFKNSPTLFNEALHRDLAGFRIQHPDLILLQYVDDLLLAATSELDCQQGTRALLQTLGDLGYRASAKKAQICQKQVKYLGYLLKEGQRWLTEARKETVMGQPIPKTPRQLREFLGKAGFCRLFIPGFAEMAAPLYPLTKPGTLFNWGPDQQKAFQEIKQALLTAPALGLPDLTKPFELFVDEKQGYAKGVLTQKLGPWRRPVAYLSKKLDPVAAGWPPCLRMVAAIAVLTKDAGKLTMGQPLVILAPHAVEALVKQPPDRWLSNARMTHYQALLLDTDRVQFGPVVALNPATLLPLPEEGLQHDCLDILAEAHGTRSDLMDQPLPDADHTWYTDGSSFLQEGQRKAGAAVTTETEVIWARALPAGTSAQRAELIALTQALKMAEGKKLNVYTDSRYAFATAHIHGEIYRRRGWLTSEGKEIKNKDEILALLKALFLPKRLSIIHCPGHQKGNSAEARGNRMADQAAREVATRETPETSTLLAGKRTADGSEFEKRTADGSEFESPKKKAKVE

SEQ ID NO: 2370 - protein, 2096 aa, synthetic construct
MPAAKRVKLDGGDKKYSIGLDIGTNSVGWAVITDEYKVPSKKFKVLGNTDRHSIKKNLIGALLFDSGETAEATRLKRTARRRYTRRKNRICYLQEIFSNEMAKVDDSFFHRLEESFLVEEDKKHERHPIFGNIVDEVAYHEKYPTIYHLRKKLVDSTDKADLRLIYLALAHMIKFRGHFLIEGDLNPDNSDVDKLFIQLVQTYNQLFEENPINASGVDAKAILSARLSKSRRLENLIAQLPGEKKNGLFGNLIALSLGLTPNFKSNFDLAEDAKLQLSKDTYDDDLDNLLAQIGDQYADLFLAAKNLSDAILLSDILRVNTEITKAPLSASMIKRYDEHHQDLTLLKALVRQQLPEKYKEIFFDQSKNGYAGYIDGGASQEEFYKFIKPILEKMDGTEELLVKLNREDLLRKQRTFDNGSIPHQIHLGELHAILRRQEDFYPFLKDNREKIEKILTFRIPYYVGPLARGNSRFAWMTRKSEETITPWNFEEVVDKGASAQSFIERMTNFDKNLPNEKVLPKHSLLYEYFTVYNELTKVKYVTEGMRKPAFLSGEQKKAIVDLLFKTNRKVTVKQLKEDYFKKIECFDSVEISGVEDRFNASLGTYHDLLKIIKDKDFLDNEENEDILEDIVLTLTLFEDREMIEERLKTYAHLFDDKVMKQLKRRRYTGWGRLSRKLINGIRDKQSGKTILDFLKSDGFANRNFMQLIHDDSLTFKEDIQKAQVSGQGDSLHEHIANLAGSPAIKKGILQTVKVVDELVKVMGRHKPENIVIEMARENQTTQKGQKNSRERMKRIEEGIKELGSQILKEHPVENTQLQNEKLYLYYLQNGRDMYVDQELDINRLSDYDVDHIVPQSFLKDDSIDNKVLTRSDKARGKSDNVPSEEVVKKMKNYWRQLLNAKLITQRKFDNLTKAERGGLSELDKAGFIKRQLVETRQITKHVAQILDSRMNTKYDENDKLIREVKVITLKSKLVSDFRKDFQFYKVREINNYHHAHDAYLNAVVGTALIKKYPKLESEFVYGDYKVYDVRKMIAKSEQEIGKATAKYFFYSNIMNFFKTEITLANGEIRKRPLIETNGETGEIVWDKGRDFATVRKVLSMPQVNIVKKTEVQTGGFSKESILPKRNSDKLIARKKDWDPKKYGGFDSPTVAYSVLVVAKVEKGKSKKLKSVKELLGITIMERSSFEKNPIDFLEAKGYKEVKKDLIIKLPKYSLFELENGRKRMLASAGELQKGNELALPSKYVNFLYLASHYEKLKGSPEDNEQKQLFVEQHKHYLDEIIEQISEFSKRVILADANLDKVLSAYNKHRDKPIREQAENIIHLFTLTNLGAPAAFKYFDTTIDRKRYTSTKEVLDATLIHQSITGLYETRIDLSQLGGDGGEAAAKGGSGSSGGTLNIEDEYRLHETSKEPDVSLGSTWLSDFPQAWAETGGMGLAVRQAPLIIPLKATSTPVSIKQYPMSQEARLGIKPHIQRLLDQGILVPCQSPWNTPLLPVKKPGTNDYRPVQDLREVNKRVEDIHPTVPNPYNLLSGLPPSHQWYTVLDLKDAFFCLRLHPTSQPLFAFEWRDPEMGISGQLTWTRLPQGFKNSPTLFNEALHRDLAGFRIQHPDLILLQYVDDLLLAATSELDCQQGTRALLQTLGDLGYRASAKKAQICQKQVKYLGYLLKEGQRWLTEARKETVMGQPIPKTPRQLREFLGKAGFCRLFIPGFAEMAAPLYPLTKPGTLFNWGPDQQKAFQEIKQALLTAPALGLPDLTKPFELFVDEKQGYAKGVLTQKLGPWRRPVAYLSKKLDPVAAGWPPCLRMVAAIAVLTKDAGKLTMGQPLVILAPHAVEALVKQPPDRWLSNARMTHYQALLLDTDRVQFGPVVALNPATLLPLPEEGLQHDCLDILAEAHGTRSDLMDQPLPDADHTWYTDGSSFLQEGQRKAGAAVTTETEVIWARALPAGTSAQRAELIALTQALKMAEGKKLNVYTDSRYAFATAHIHGEIYRRRGWLTSEGKEIKNKDEILALLKALFLPKRLSIIHCPGHQKGNSAEARGNRMADQAAREVATRETPETSTLLAGKRTADGSEFEKRTADGSEFESPKKKAKVE

SEQ ID NO: 2371 - protein, 2094 aa, synthetic construct
MPAAKRVKLDGGDKKYSIGLDIGTNSVGWAVITDEYKVPSKKFKVLGNTDRHSIKKNLIGALLFDSGETAEATRLKRTARRRYTRRKNRICYLQEIFSNEMAKVDDSFFHRLEESFLVEEDKKHERHPIFGNIVDEVAYHEKYPTIYHLRKKLVDSTDKADLRLIYLALAHMIKFRGHFLIEGDLNPDNSDVDKLFIQLVQTYNQLFEENPINASGVDAKAILSARLSKSRRLENLIAQLPGEKKNGLFGNLIALSLGLTPNFKSNFDLAEDAKLQLSKDTYDDDLDNLLAQIGDQYADLFLAAKNLSDAILLSDILRVNTEITKAPLSASMIKRYDEHHQDLTLLKALVRQQLPEKYKEIFFDQSKNGYAGYIDGGASQEEFYKFIKPILEKMDGTEELLVKLNREDLLRKQRTFDNGSIPHQIHLGELHAILRRQEDFYPFLKDNREKIEKILTFRIPYYVGPLARGNSRFAWMTRKSEETITPWNFEEVVDKGASAQSFIERMTNFDKNLPNEKVLPKHSLLYEYFTVYNELTKVKYVTEGMRKPAFLSGEQKKAIVDLLFKTNRKVTVKQLKEDYFKKIECFDSVEISGVEDRFNASLGTYHDLLKIIKDKDFLDNEENEDILEDIVLTLTLFEDREMIEERLKTYAHLFDDKVMKQLKRRRYTGWGRLSRKLINGIRDKQSGKTILDFLKSDGFANRNFMQLIHDDSLTFKEDIQKAQVSGQGDSLHEHIANLAGSPAIKKGILQTVKVVDELVKVMGRHKPENIVIEMARENQTTQKGQKNSRERMKRIEEGIKELGSQILKEHPVENTQLQNEKLYLYYLQNGRDMYVDQELDINRLSDYDVDHIVPQSFLKDDSIDNKVLTRSDKARGKSDNVPSEEVVKKMKNYWRQLLNAKLITQRKFDNLTKAERGGLSELDKAGFIKRQLVETRQITKHVAQILDSRMNTKYDENDKLIREVKVITLKSKLVSDFRKDFQFYKVREINNYHHAHDAYLNAVVGTALIKKYPKLESEFVYGDYKVYDVRKMIAKSEQEIGKATAKYFFYSNIMNFFKTEITLANGEIRKRPLIETNGETGEIVWDKGRDFATVRKVLSMPQVNIVKKTEVQTGGFSKESILPKRNSDKLIARKKDWDPKKYGGFDSPTVAYSVLVVAKVEKGKSKKLKSVKELLGITIMERSSFEKNPIDFLEAKGYKEVKKDLIIKLPKYSLFELENGRKRMLASAGELQKGNELALPSKYVNFLYLASHYEKLKGSPEDNEQKQLFVEQHKHYLDEIIEQISEFSKRVILADANLDKVLSAYNKHRDKPIREQAENIIHLFTLTNLGAPAAFKYFDTTIDRKRYTSTKEVLDATLIHQSITGLYETRIDLSQLGGDGGGGSGGGGSSGGTLNIEDEYRLHETSKEPDVSLGSTWLSDFPQAWAETGGMGLAVRQAPLIIPLKATSTPVSIKQYPMSQEARLGIKPHIQRLLDQGILVPCQSPWNTPLLPVKKPGTNDYRPVQDLREVNKRVEDIHPTVPNPYNLLSGLPPSHQWYTVLDLKDAFFCLRLHPTSQPLFAFEWRDPEMGISGQLTWTRLPQGFKNSPTLFNEALHRDLAGFRIQHPDLILLQYVDDLLLAATSELDCQQGTRALLQTLGDLGYRASAKKAQICQKQVKYLGYLLKEGQRWLTEARKETVMGQPIPKTPRQLREFLGKAGFCRLFIPGFAEMAAPLYPLTKPGTLFNWGPDQQKAFQEIKQALLTAPALGLPDLTKPFELFVDEKQGYAKGVLTQKLGPWRRPVAYLSKKLDPVAAGWPPCLRMVAAIAVLTKDAGKLTMGQPLVILAPHAVEALVKQPPDRWLSNARMTHYQALLLDTDRVQFGPVVALNPATLLPLPEEGLQHDCLDILAEAHGTRSDLMDQPLPDADHTWYTDGSSFLQEGQRKAGAAVTTETEVIWARALPAGTSAQRAELIALTQALKMAEGKKLNVYTDSRYAFATAHIHGEIYRRRGWLTSEGKEIKNKDEILALLKALFLPKRLSIIHCPGHQKGNSAEARGNRMADQAAREVATRETPETSTLLAGKRTADGSEFEKRTADGSEFESPKKKAKVE

SEQ ID NO: 2372 - protein, 2096 aa, synthetic construct
MPAAKRVKLDGGDKKYSIGLDIGTNSVGWAVITDEYKVPSKKFKVLGNTDRHSIKKNLIGALLFDSGETAEATRLKRTARRRYTRRKNRICYLQEIFSNEMAKVDDSFFHRLEESFLVEEDKKHERHPIFGNIVDEVAYHEKYPTIYHLRKKLVDSTDKADLRLIYLALAHMIKFRGHFLIEGDLNPDNSDVDKLFIQLVQTYNQLFEENPINASGVDAKAILSARLSKSRRLENLIAQLPGEKKNGLFGNLIALSLGLTPNFKSNFDLAEDAKLQLSKDTYDDDLDNLLAQIGDQYADLFLAAKNLSDAILLSDILRVNTEITKAPLSASMIKRYDEHHQDLTLLKALVRQQLPEKYKEIFFDQSKNGYAGYIDGGASQEEFYKFIKPILEKMDGTEELLVKLNREDLLRKQRTFDNGSIPHQIHLGELHAILRRQEDFYPFLKDNREKIEKILTFRIPYYVGPLARGNSRFAWMTRKSEETITPWNFEEVVDKGASAQSFIERMTNFDKNLPNEKVLPKHSLLYEYFTVYNELTKVKYVTEGMRKPAFLSGEQKKAIVDLLFKTNRKVTVKQLKEDYFKKIECFDSVEISGVEDRFNASLGTYHDLLKIIKDKDFLDNEENEDILEDIVLTLTLFEDREMIEERLKTYAHLFDDKVMKQLKRRRYTGWGRLSRKLINGIRDKQSGKTILDFLKSDGFANRNFMQLIHDDSLTFKEDIQKAQVSGQGDSLHEHIANLAGSPAIKKGILQTVKVVDELVKVMGRHKPENIVIEMARENQTTQKGQKNSRERMKRIEEGIKELGSQILKEHPVENTQLQNEKLYLYYLQNGRDMYVDQELDINRLSDYDVDHIVPQSFLKDDSIDNKVLTRSDKARGKSDNVPSEEVVKKMKNYWRQLLNAKLITQRKFDNLTKAERGGLSELDKAGFIKRQLVETRQITKHVAQILDSRMNTKYDENDKLIREVKVITLKSKLVSDFRKDFQFYKVREINNYHHAHDAYLNAVVGTALIKKYPKLESEFVYGDYKVYDVRKMIAKSEQEIGKATAKYFFYSNIMNFFKTEITLANGEIRKRPLIETNGETGEIVWDKGRDFATVRKVLSMPQVNIVKKTEVQTGGFSKESILPKRNSDKLIARKKDWDPKKYGGFDSPTVAYSVLVVAKVEKGKSKKLKSVKELLGITIMERSSFEKNPIDFLEAKGYKEVKKDLIIKLPKYSLFELENGRKRMLASAGELQKGNELALPSKYVNFLYLASHYEKLKGSPEDNEQKQLFVEQHKHYLDEIIEQISEFSKRVILADANLDKVLSAYNKHRDKPIREQAENIIHLFTLTNLGAPAAFKYFDTTIDRKRYTSTKEVLDATLIHQSITGLYETRIDLSQLGGDGGEAAAKGGSPAPGGTLNIEDEYRLHETSKEPDVSLGSTWLSDFPQAWAETGGMGLAVRQAPLIIPLKATSTPVSIKQYPMSQEARLGIKPHIQRLLDQGILVPCQSPWNTPLLPVKKPGTNDYRPVQDLREVNKRVEDIHPTVPNPYNLLSGLPPSHQWYTVLDLKDAFFCLRLHPTSQPLFAFEWRDPEMGISGQLTWTRLPQGFKNSPTLFNEALHRDLAGFRIQHPDLILLQYVDDLLLAATSELDCQQGTRALLQTLGDLGYRASAKKAQICQKQVKYLGYLLKEGQRWLTEARKETVMGQPIPKTPRQLREFLGKAGFCRLFIPGFAEMAAPLYPLTKPGTLFNWGPDQQKAFQEIKQALLTAPALGLPDLTKPFELFVDEKQGYAKGVLTQKLGPWRRPVAYLSKKLDPVAAGWPPCLRMVAAIAVLTKDAGKLTMGQPLVILAPHAVEALVKQPPDRWLSNARMTHYQALLLDTDRVQFGPVVALNPATLLPLPEEGLQHDCLDILAEAHGTRSDLMDQPLPDADHTWYTDGSSFLQEGQRKAGAAVTTETEVIWARALPAGTSAQRAELIALTQALKMAEGKKLNVYTDSRYAFATAHIHGEIYRRRGWLTSEGKEIKNKDEILALLKALFLPKRLSIIHCPGHQKGNSAEARGNRMADQAAREVATRETPETSTLLAGKRTADGSEFEKRTADGSEFESPKKKAKVE

SEQ ID NO: 2373 - protein, 2100 aa, synthetic construct
MPAAKRVKLDGGDKKYSIGLDIGTNSVGWAVITDEYKVPSKKFKVLGNTDRHSIKKNLIGALLFDSGETAEATRLKRTARRRYTRRKNRICYLQEIFSNEMAKVDDSFFHRLEESFLVEEDKKHERHPIFGNIVDEVAYHEKYPTIYHLRKKLVDSTDKADLRLIYLALAHMIKFRGHFLIEGDLNPDNSDVDKLFIQLVQTYNQLFEENPINASGVDAKAILSARLSKSRRLENLIAQLPGEKKNGLFGNLIALSLGLTPNFKSNFDLAEDAKLQLSKDTYDDDLDNLLAQIGDQYADLFLAAKNLSDAILLSDILRVNTEITKAPLSASMIKRYDEHHQDLTLLKALVRQQLPEKYKEIFFDQSKNGYAGYIDGGASQEEFYKFIKPILEKMDGTEELLVKLNREDLLRKQRTFDNGSIPHQIHLGELHAILRRQEDFYPFLKDNREKIEKILTFRIPYYVGPLARGNSRFAWMTRKSEETITPWNFEEVVDKGASAQSFIERMTNFDKNLPNEKVLPKHSLLYEYFTVYNELTKVKYVTEGMRKPAFLSGEQKKAIVDLLFKTNRKVTVKQLKEDYFKKIECFDSVEISGVEDRFNASLGTYHDLLKIIKDKDFLDNEENEDILEDIVLTLTLFEDREMIEERLKTYAHLFDDKVMKQLKRRRYTGWGRLSRKLINGIRDKQSGKTILDFLKSDGFANRNFMQLIHDDSLTFKEDIQKAQVSGQGDSLHEHIANLAGSPAIKKGILQTVKVVDELVKVMGRHKPENIVIEMARENQTTQKGQKNSRERMKRIEEGIKELGSQILKEHPVENTQLQNEKLYLYYLQNGRDMYVDQELDINRLSDYDVDHIVPQSFLKDDSIDNKVLTRSDKARGKSDNVPSEEVVKKMKNYWRQLLNAKLITQRKFDNLTKAERGGLSELDKAGFIKRQLVETRQITKHVAQILDSRMNTKYDENDKLIREVKVITLKSKLVSDFRKDFQFYKVREINNYHHAHDAYLNAVVGTALIKKYPKLESEFVYGDYKVYDVRKMIAKSEQEIGKATAKYFFYSNIMNFFKTEITLANGEIRKRPLIETNGETGEIVWDKGRDFATVRKVLSMPQVNIVKKTEVQTGGFSKESILPKRNSDKLIARKKDWDPKKYGGFDSPTVAYSVLVVAKVEKGKSKKLKSVKELLGITIMERSSFEKNPIDFLEAKGYKEVKKDLIIKLPKYSLFELENGRKRMLASAGELQKGNELALPSKYVNFLYLASHYEKLKGSPEDNEQKQLFVEQHKHYLDEIIEQISEFSKRVILADANLDKVLSAYNKHRDKPIREQAENIIHLFTLTNLGAPAAFKYFDTTIDRKRYTSTKEVLDATLIHQSITGLYETRIDLSQLGGDGGEAAAKEAAAKEAAAKGGTLNIEDEYRLHETSKEPDVSLGSTWLSDFPQAWAETGGMGLAVRQAPLIIPLKATSTPVSIKQYPMSQEARLGIKPHIQRLLDQGILVPCQSPWNTPLLPVKKPGTNDYRPVQDLREVNKRVEDIHPTVPNPYNLLSGLPPSHQWYTVLDLKDAFFCLRLHPTSQPLFAFEWRDPEMGISGQLTWTRLPQGFKNSPTLFNEALHRDLAGFRIQHPDLILLQYVDDLLLAATSELDCQQGTRALLQTLGDLGYRASAKKAQICQKQVKYLGYLLKEGQRWLTEARKETVMGQPIPKTPRQLREFLGKAGFCRLFIPGFAEMAAPLYPLTKPGTLFNWGPDQQKAFQEIKQALLTAPALGLPDLTKPFELFVDEKQGYAKGVLTQKLGPWRRPVAYLSKKLDPVAAGWPPCLRMVAAIAVLTKDAGKLTMGQPLVILAPHAVEALVKQPPDRWLSNARMTHYQALLLDTDRVQFGPVVALNPATLLPLPEEGLQHDCLDILAEAHGTRSDLMDQPLPDADHTWYTDGSSFLQEGQRKAGAAVTTETEVIWARALPAGTSAQRAELIALTQALKMAEGKKLNVYTDSRYAFATAHIHGEIYRRRGWLTSEGKEIKNKDEILALLKALFLPKRLSIIHCPGHQKGNSAEARGNRMADQAAREVATRETPETSTLLAGKRTADGSEFEKRTADGSEFESPKKKAKVE

SEQ ID NO: 2374 - protein, 2100 aa, synthetic construct
MPAAKRVKLDGGDKKYSIGLDIGTNSVGWAVITDEYKVPSKKFKVLGNTDRHSIKKNLIGALLFDSGETAEATRLKRTARRRYTRRKNRICYLQEIFSNEMAKVDDSFFHRLEESFLVEEDKKHERHPIFGNIVDEVAYHEKYPTIYHLRKKLVDSTDKADLRLIYLALAHMIKFRGHFLIEGDLNPDNSDVDKLFIQLVQTYNQLFEENPINASGVDAKAILSARLSKSRRLENLIAQLPGEKKNGLFGNLIALSLGLTPNFKSNFDLAEDAKLQLSKDTYDDDLDNLLAQIGDQYADLFLAAKNLSDAILLSDILRVNTEITKAPLSASMIKRYDEHHQDLTLLKALVRQQLPEKYKEIFFDQSKNGYAGYIDGGASQEEFYKFIKPILEKMDGTEELLVKLNREDLLRKQRTFDNGSIPHQIHLGELHAILRRQEDFYPFLKDNREKIEKILTFRIPYYVGPLARGNSRFAWMTRKSEETITPWNFEEVVDKGASAQSFIERMTNFDKNLPNEKVLPKHSLLYEYFTVYNELTKVKYVTEGMRKPAFLSGEQKKAIVDLLFKTNRKVTVKQLKEDYFKKIECFDSVEISGVEDRFNASLGTYHDLLKIIKDKDFLDNEENEDILEDIVLTLTLFEDREMIEERLKTYAHLFDDKVMKQLKRRRYTGWGRLSRKLINGIRDKQSGKTILDFLKSDGFANRNFMQLIHDDSLTFKEDIQKAQVSGQGDSLHEHIANLAGSPAIKKGILQTVKVVDELVKVMGRHKPENIVIEMARENQTTQKGQKNSRERMKRIEEGIKELGSQILKEHPVENTQLQNEKLYLYYLQNGRDMYVDQELDINRLSDYDVDHIVPQSFLKDDSIDNKVLTRSDKARGKSDNVPSEEVVKKMKNYWRQLLNAKLITQRKFDNLTKAERGGLSELDKAGFIKRQLVETRQITKHVAQILDSRMNTKYDENDKLIREVKVITLKSKLVSDFRKDFQFYKVREINNYHHAHDAYLNAVVGTALIKKYPKLESEFVYGDYKVYDVRKMIAKSEQEIGKATAKYFFYSNIMNFFKTEITLANGEIRKRPLIETNGETGEIVWDKGRDFATVRKVLSMPQVNIVKKTEVQTGGFSKESILPKRNSDKLIARKKDWDPKKYGGFDSPTVAYSVLVVAKVEKGKSKKLKSVKELLGITIMERSSFEKNPIDFLEAKGYKEVKKDLIIKLPKYSLFELENGRKRMLASAGELQKGNELALPSKYVNFLYLASHYEKLKGSPEDNEQKQLFVEQHKHYLDEIIEQISEFSKRVILADANLDKVLSAYNKHRDKPIREQAENIIHLFTLTNLGAPAAFKYFDTTIDRKRYTSTKEVLDATLIHQSITGLYETRIDLSQLGGDGGGGGGSEAAAKGGGGSGGTLNIEDEYRLHETSKEPDVSLGSTWLSDFPQAWAETGGMGLAVRQAPLIIPLKATSTPVSIKQYPMSQEARLGIKPHIQRLLDQGILVPCQSPWNTPLLPVKKPGTNDYRPVQDLREVNKRVEDIHPTVPNPYNLLSGLPPSHQWYTVLDLKDAFFCLRLHPTSQPLFAFEWRDPEMGISGQLTWTRLPQGFKNSPTLFNEALHRDLAGFRIQHPDLILLQYVDDLLLAATSELDCQQGTRALLQTLGDLGYRASAKKAQICQKQVKYLGYLLKEGQRWLTEARKETVMGQPIPKTPRQLREFLGKAGFCRLFIPGFAEMAAPLYPLTKPGTLFNWGPDQQKAFQEIKQALLTAPALGLPDLTKPFELFVDEKQGYAKGVLTQKLGPWRRPVAYLSKKLDPVAAGWPPCLRMVAAIAVLTKDAGKLTMGQPLVILAPHAVEALVKQPPDRWLSNARMTHYQALLLDTDRVQFGPVVALNPATLLPLPEEGLQHDCLDILAEAHGTRSDLMDQPLPDADHTWYTDGSSFLQEGQRKAGAAVTTETEVIWARALPAGTSAQRAELIALTQALKMAEGKKLNVYTDSRYAFATAHIHGEIYRRRGWLTSEGKEIKNKDEILALLKALFLPKRLSIIHCPGHQKGNSAEARGNRMADQAAREVATRETPETSTLLAGKRTADGSEFEKRTADGSEFESPKKKAKVE

SEQ ID NO: 2375 - protein, 2088 aa, synthetic construct
MPAAKRVKLDGGDKKYSIGLDIGTNSVGWAVITDEYKVPSKKFKVLGNTDRHSIKKNLIGALLFDSGETAEATRLKRTARRRYTRRKNRICYLQEIFSNEMAKVDDSFFHRLEESFLVEEDKKHERHPIFGNIVDEVAYHEKYPTIYHLRKKLVDSTDKADLRLIYLALAHMIKFRGHFLIEGDLNPDNSDVDKLFIQLVQTYNQLFEENPINASGVDAKAILSARLSKSRRLENLIAQLPGEKKNGLFGNLIALSLGLTPNFKSNFDLAEDAKLQLSKDTYDDDLDNLLAQIGDQYADLFLAAKNLSDAILLSDILRVNTEITKAPLSASMIKRYDEHHQDLTLLKALVRQQLPEKYKEIFFDQSKNGYAGYIDGGASQEEFYKFIKPILEKMDGTEELLVKLNREDLLRKQRTFDNGSIPHQIHLGELHAILRRQEDFYPFLKDNREKIEKILTFRIPYYVGPLARGNSRFAWMTRKSEETITPWNFEEVVDKGASAQSFIERMTNFDKNLPNEKVLPKHSLLYEYFTVYNELTKVKYVTEGMRKPAFLSGEQKKAIVDLLFKTNRKVTVKQLKEDYFKKIECFDSVEISGVEDRFNASLGTYHDLLKIIKDKDFLDNEENEDILEDIVLTLTLFEDREMIEERLKTYAHLFDDKVMKQLKRRRYTGWGRLSRKLINGIRDKQSGKTILDFLKSDGFANRNFMQLIHDDSLTFKEDIQKAQVSGQGDSLHEHIANLAGSPAIKKGILQTVKVVDELVKVMGRHKPENIVIEMARENQTTQKGQKNSRERMKRIEEGIKELGSQILKEHPVENTQLQNEKLYLYYLQNGRDMYVDQELDINRLSDYDVDHIVPQSFLKDDSIDNKVLTRSDKARGKSDNVPSEEVVKKMKNYWRQLLNAKLITQRKFDNLTKAERGGLSELDKAGFIKRQLVETRQITKHVAQILDSRMNTKYDENDKLIREVKVITLKSKLVSDFRKDFQFYKVREINNYHHAHDAYLNAVVGTALIKKYPKLESEFVYGDYKVYDVRKMIAKSEQEIGKATAKYFFYSNIMNFFKTEITLANGEIRKRPLIETNGETGEIVWDKGRDFATVRKVLSMPQVNIVKKTEVQTGGFSKESILPKRNSDKLIARKKDWDPKKYGGFDSPTVAYSVLVVAKVEKGKSKKLKSVKELLGITIMERSSFEKNPIDFLEAKGYKEVKKDLIIKLPKYSLFELENGRKRMLASAGELQKGNELALPSKYVNFLYLASHYEKLKGSPEDNEQKQLFVEQHKHYLDEIIEQISEFSKRVILADANLDKVLSAYNKHRDKPIREQAENIIHLFTLTNLGAPAAFKYFDTTIDRKRYTSTKEVLDATLIHQSITGLYETRIDLSQLGGDGGGGGGGTLNIEDEYRLHETSKEPDVSLGSTWLSDFPQAWAETGGMGLAVRQAPLIIPLKATSTPVSIKQYPMSQEARLGIKPHIQRLLDQGILVPCQSPWNTPLLPVKKPGTNDYRPVQDLREVNKRVEDIHPTVPNPYNLLSGLPPSHQWYTVLDLKDAFFCLRLHPTSQPLFAFEWRDPEMGISGQLTWTRLPQGFKNSPTLFNEALHRDLAGFRIQHPDLILLQYVDDLLLAATSELDCQQGTRALLQTLGDLGYRASAKKAQICQKQVKYLGYLLKEGQRWLTEARKETVMGQPIPKTPRQLREFLGKAGFCRLFIPGFAEMAAPLYPLTKPGTLFNWGPDQQKAFQEIKQALLTAPALGLPDLTKPFELFVDEKQGYAKGVLTQKLGPWRRPVAYLSKKLDPVAAGWPPCLRMVAAIAVLTKDAGKLTMGQPLVILAPHAVEALVKQPPDRWLSNARMTHYQALLLDTDRVQFGPVVALNPATLLPLPEEGLQHDCLDILAEAHGTRSDLMDQPLPDADHTWYTDGSSFLQEGQRKAGAAVTTETEVIWARALPAGTSAQRAELIALTQALKMAEGKKLNVYTDSRYAFATAHIHGEIYRRRGWLTSEGKEIKNKDEILALLKALFLPKRLSIIHCPGHQKGNSAEARGNRMADQAAREVATRETPETSTLLAGKRTADGSEFEKRTADGSEFESPKKKAKVE

SEQ ID NO: 2376 - protein, 2118 aa, synthetic construct
MPAAKRVKLDGGDKKYSIGLDIGTNSVGWAVITDEYKVPSKKFKVLGNTDRHSIKKNLIGALLFDSGETAEATRLKRTARRRYTRRKNRICYLQEIFSNEMAKVDDSFFHRLEESFLVEEDKKHERHPIFGNIVDEVAYHEKYPTIYHLRKKLVDSTDKADLRLIYLALAHMIKFRGHFLIEGDLNPDNSDVDKLFIQLVQTYNQLFEENPINASGVDAKAILSARLSKSRRLENLIAQLPGEKKNGLFGNLIALSLGLTPNFKSNFDLAEDAKLQLSKDTYDDDLDNLLAQIGDQYADLFLAAKNLSDAILLSDILRVNTEITKAPLSASMIKRYDEHHQDLTLLKALVRQQLPEKYKEIFFDQSKNGYAGYIDGGASQEEFYKFIKPILEKMDGTEELLVKLNREDLLRKQRTFDNGSIPHQIHLGELHAILRRQEDFYPFLKDNREKIEKILTFRIPYYVGPLARGNSRFAWMTRKSEETITPWNFEEVVDKGASAQSFIERMTNFDKNLPNEKVLPKHSLLYEYFTVYNELTKVKYVTEGMRKPAFLSGEQKKAIVDLLFKTNRKVTVKQLKEDYFKKIECFDSVEISGVEDRFNASLGTYHDLLKIIKDKDFLDNEENEDILEDIVLTLTLFEDREMIEERLKTYAHLFDDKVMKQLKRRRYTGWGRLSRKLINGIRDKQSGKTILDFLKSDGFANRNFMQLIHDDSLTFKEDIQKAQVSGQGDSLHEHIANLAGSPAIKKGILQTVKVVDELVKVMGRHKPENIVIEMARENQTTQKGQKNSRERMKRIEEGIKELGSQILKEHPVENTQLQNEKLYLYYLQNGRDMYVDQELDINRLSDYDVDHIVPQSFLKDDSIDNKVLTRSDKARGKSDNVPSEEVVKKMKNYWRQLLNAKLITQRKFDNLTKAERGGLSELDKAGFIKRQLVETRQITKHVAQILDSRMNTKYDENDKLIREVKVITLKSKLVSDFRKDFQFYKVREINNYHHAHDAYLNAVVGTALIKKYPKLESEFVYGDYKVYDVRKMIAKSEQEIGKATAKYFFYSNIMNFFKTEITLANGEIRKRPLIETNGETGEIVWDKGRDFATVRKVLSMPQVNIVKKTEVQTGGFSKESILPKRNSDKLIARKKDWDPKKYGGFDSPTVAYSVLVVAKVEKGKSKKLKSVKELLGITIMERSSFEKNPIDFLEAKGYKEVKKDLIIKLPKYSLFELENGRKRMLASAGELQKGNELALPSKYVNFLYLASHYEKLKGSPEDNEQKQLFVEQHKHYLDEIIEQISEFSKRVILADANLDKVLSAYNKHRDKPIREQAENIIHLFTLTNLGAPAAFKYFDTTIDRKRYTSTKEVLDATLIHQSITGLYETRIDLSQLGGDGGSGGSSGGSSGSETPGTSESATPESSGGSSGGSSGGTLNIEDEYRLHETSKEPDVSLGSTWLSDFPQAWAETGGMGLAVRQAPLIIPLKATSTPVSIKQYPMSQEARLGIKPHIQRLLDQGILVPCQSPWNTPLLPVKKPGTNDYRPVQDLREVNKRVEDIHPTVPNPYNLLSGLPPSHQWYTVLDLKDAFFCLRLHPTSQPLFAFEWRDPEMGISGQLTWTRLPQGFKNSPTLFNEALHRDLAGFRIQHPDLILLQYVDDLLLAATSELDCQQGTRALLQTLGDLGYRASAKKAQICQKQVKYLGYLLKEGQRWLTEARKETVMGQPIPKTPRQLREFLGKAGFCRLFIPGFAEMAAPLYPLTKPGTLFNWGPDQQKAFQEIKQALLTAPALGLPDLTKPFELFVDEKQGYAKGVLTQKLGPWRRPVAYLSKKLDPVAAGWPPCLRMVAAIAVLTKDAGKLTMGQPLVILAPHAVEALVKQPPDRWLSNARMTHYQALLLDTDRVQFGPVVALNPATLLPLPEEGLQHDCLDILAEAHGTRSDLMDQPLPDADHTWYTDGSSFLQEGQRKAGAAVTTETEVIWARALPAGTSAQRAELIALTQALKMAEGKKLNVYTDSRYAFATAHIHGEIYRRRGWLTSEGKEIKNKDEILALLKALFLPKRLSIIHCPGHQKGNSAEARGNRMADQAAREVATRETPETSTLLAGKRTADGSEFEKRTADGSEFESPKKKAKVE

SEQ ID NO: 2377 - protein, 2096 aa, synthetic construct
MPAAKRVKLDGGDKKYSIGLDIGTNSVGWAVITDEYKVPSKKFKVLGNTDRHSIKKNLIGALLFDSGETAEATRLKRTARRRYTRRKNRICYLQEIFSNEMAKVDDSFFHRLEESFLVEEDKKHERHPIFGNIVDEVAYHEKYPTIYHLRKKLVDSTDKADLRLIYLALAHMIKFRGHFLIEGDLNPDNSDVDKLFIQLVQTYNQLFEENPINASGVDAKAILSARLSKSRRLENLIAQLPGEKKNGLFGNLIALSLGLTPNFKSNFDLAEDAKLQLSKDTYDDDLDNLLAQIGDQYADLFLAAKNLSDAILLSDILRVNTEITKAPLSASMIKRYDEHHQDLTLLKALVRQQLPEKYKEIFFDQSKNGYAGYIDGGASQEEFYKFIKPILEKMDGTEELLVKLNREDLLRKQRTFDNGSIPHQIHLGELHAILRRQEDFYPFLKDNREKIEKILTFRIPYYVGPLARGNSRFAWMTRKSEETITPWNFEEVVDKGASAQSFIERMTNFDKNLPNEKVLPKHSLLYEYFTVYNELTKVKYVTEGMRKPAFLSGEQKKAIVDLLFKTNRKVTVKQLKEDYFKKIECFDSVEISGVEDRFNASLGTYHDLLKIIKDKDFLDNEENEDILEDIVLTLTLFEDREMIEERLKTYAHLFDDKVMKQLKRRRYTGWGRLSRKLINGIRDKQSGKTILDFLKSDGFANRNFMQLIHDDSLTFKEDIQKAQVSGQGDSLHEHIANLAGSPAIKKGILQTVKVVDELVKVMGRHKPENIVIEMARENQTTQKGQKNSRERMKRIEEGIKELGSQILKEHPVENTQLQNEKLYLYYLQNGRDMYVDQELDINRLSDYDVDHIVPQSFLKDDSIDNKVLTRSDKARGKSDNVPSEEVVKKMKNYWRQLLNAKLITQRKFDNLTKAERGGLSELDKAGFIKRQLVETRQITKHVAQILDSRMNTKYDENDKLIREVKVITLKSKLVSDFRKDFQFYKVREINNYHHAHDAYLNAVVGTALIKKYPKLESEFVYGDYKVYDVRKMIAKSEQEIGKATAKYFFYSNIMNFFKTEITLANGEIRKRPLIETNGETGEIVWDKGRDFATVRKVLSMPQVNIVKKTEVQTGGFSKESILPKRNSDKLIARKKDWDPKKYGGFDSPTVAYSVLVVAKVEKGKSKKLKSVKELLGITIMERSSFEKNPIDFLEAKGYKEVKKDLIIKLPKYSLFELENGRKRMLASAGELQKGNELALPSKYVNFLYLASHYEKLKGSPEDNEQKQLFVEQHKHYLDEIIEQISEFSKRVILADANLDKVLSAYNKHRDKPIREQAENIIHLFTLTNLGAPAAFKYFDTTIDRKRYTSTKEVLDATLIHQSITGLYETRIDLSQLGGDGGPAPGGGEAAAKGGTLNIEDEYRLHETSKEPDVSLGSTWLSDFPQAWAETGGMGLAVRQAPLIIPLKATSTPVSIKQYPMSQEARLGIKPHIQRLLDQGILVPCQSPWNTPLLPVKKPGTNDYRPVQDLREVNKRVEDIHPTVPNPYNLLSGLPPSHQWYTVLDLKDAFFCLRLHPTSQPLFAFEWRDPEMGISGQLTWTRLPQGFKNSPTLFNEALHRDLAGFRIQHPDLILLQYVDDLLLAATSELDCQQGTRALLQTLGDLGYRASAKKAQICQKQVKYLGYLLKEGQRWLTEARKETVMGQPIPKTPRQLREFLGKAGFCRLFIPGFAEMAAPLYPLTKPGTLFNWGPDQQKAFQEIKQALLTAPALGLPDLTKPFELFVDEKQGYAKGVLTQKLGPWRRPVAYLSKKLDPVAAGWPPCLRMVAAIAVLTKDAGKLTMGQPLVILAPHAVEALVKQPPDRWLSNARMTHYQALLLDTDRVQFGPVVALNPATLLPLPEEGLQHDCLDILAEAHGTRSDLMDQPLPDADHTWYTDGSSFLQEGQRKAGAAVTTETEVIWARALPAGTSAQRAELIALTQALKMAEGKKLNVYTDSRYAFATAHIHGEIYRRRGWLTSEGKEIKNKDEILALLKALFLPKRLSIIHCPGHQKGNSAEARGNRMADQAAREVATRETPETSTLLAGKRTADGSEFEKRTADGSEFESPKKKAKVE

SEQ ID NO: 2378 - protein, 2090 aa, synthetic construct
MPAAKRVKLDGGDKKYSIGLDIGTNSVGWAVITDEYKVPSKKFKVLGNTDRHSIKKNLIGALLFDSGETAEATRLKRTARRRYTRRKNRICYLQEIFSNEMAKVDDSFFHRLEESFLVEEDKKHERHPIFGNIVDEVAYHEKYPTIYHLRKKLVDSTDKADLRLIYLALAHMIKFRGHFLIEGDLNPDNSDVDKLFIQLVQTYNQLFEENPINASGVDAKAILSARLSKSRRLENLIAQLPGEKKNGLFGNLIALSLGLTPNFKSNFDLAEDAKLQLSKDTYDDDLDNLLAQIGDQYADLFLAAKNLSDAILLSDILRVNTEITKAPLSASMIKRYDEHHQDLTLLKALVRQQLPEKYKEIFFDQSKNGYAGYIDGGASQEEFYKFIKPILEKMDGTEELLVKLNREDLLRKQRTFDNGSIPHQIHLGELHAILRRQEDFYPFLKDNREKIEKILTFRIPYYVGPLARGNSRFAWMTRKSEETITPWNFEEVVDKGASAQSFIERMTNFDKNLPNEKVLPKHSLLYEYFTVYNELTKVKYVTEGMRKPAFLSGEQKKAIVDLLFKTNRKVTVKQLKEDYFKKIECFDSVEISGVEDRFNASLGTYHDLLKIIKDKDFLDNEENEDILEDIVLTLTLFEDREMIEERLKTYAHLFDDKVMKQLKRRRYTGWGRLSRKLINGIRDKQSGKTILDFLKSDGFANRNFMQLIHDDSLTFKEDIQKAQVSGQGDSLHEHIANLAGSPAIKKGILQTVKVVDELVKVMGRHKPENIVIEMARENQTTQKGQKNSRERMKRIEEGIKELGSQILKEHPVENTQLQNEKLYLYYLQNGRDMYVDQELDINRLSDYDVDHIVPQSFLKDDSIDNKVLTRSDKARGKSDNVPSEEVVKKMKNYWRQLLNAKLITQRKFDNLTKAERGGLSELDKAGFIKRQLVETRQITKHVAQILDSRMNTKYDENDKLIREVKVITLKSKLVSDFRKDFQFYKVREINNYHHAHDAYLNAVVGTALIKKYPKLESEFVYGDYKVYDVRKMIAKSEQEIGKATAKYFFYSNIMNFFKTEITLANGEIRKRPLIETNGETGEIVWDKGRDFATVRKVLSMPQVNIVKKTEVQTGGFSKESILPKRNSDKLIARKKDWDPKKYGGFDSPTVAYSVLVVAKVEKGKSKKLKSVKELLGITIMERSSFEKNPIDFLEAKGYKEVKKDLIIKLPKYSLFELENGRKRMLASAGELQKGNELALPSKYVNFLYLASHYEKLKGSPEDNEQKQLFVEQHKHYLDEIIEQISEFSKRVILADANLDKVLSAYNKHRDKPIREQAENIIHLFTLTNLGAPAAFKYFDTTIDRKRYTSTKEVLDATLIHQSITGLYETRIDLSQLGGDGGGGGGGGGTLNIEDEYRLHETSKEPDVSLGSTWLSDFPQAWAETGGMGLAVRQAPLIIPLKATSTPVSIKQYPMSQEARLGIKPHIQRLLDQGILVPCQSPWNTPLLPVKKPGTNDYRPVQDLREVNKRVEDIHPTVPNPYNLLSGLPPSHQWYTVLDLKDAFFCLRLHPTSQPLFAFEWRDPEMGISGQLTWTRLPQGFKNSPTLFNEALHRDLAGFRIQHPDLILLQYVDDLLLAATSELDCQQGTRALLQTLGDLGYRASAKKAQICQKQVKYLGYLLKEGQRWLTEARKETVMGQPIPKTPRQLREFLGKAGFCRLFIPGFAEMAAPLYPLTKPGTLFNWGPDQQKAFQEIKQALLTAPALGLPDLTKPFELFVDEKQGYAKGVLTQKLGPWRRPVAYLSKKLDPVAAGWPPCLRMVAAIAVLTKDAGKLTMGQPLVILAPHAVEALVKQPPDRWLSNARMTHYQALLLDTDRVQFGPVVALNPATLLPLPEEGLQHDCLDILAEAHGTRSDLMDQPLPDADHTWYTDGSSFLQEGQRKAGAAVTTETEVIWARALPAGTSAQRAELIALTQALKMAEGKKLNVYTDSRYAFATAHIHGEIYRRRGWLTSEGKEIKNKDEILALLKALFLPKRLSIIHCPGHQKGNSAEARGNRMADQAAREVATRETPETSTLLAGKRTADGSEFEKRTADGSEFESPKKKAKVE

SEQ ID NO: 2379 - protein, 2094 aa, synthetic construct
MPAAKRVKLDGGDKKYSIGLDIGTNSVGWAVITDEYKVPSKKFKVLGNTDRHSIKKNLIGALLFDSGETAEATRLKRTARRRYTRRKNRICYLQEIFSNEMAKVDDSFFHRLEESFLVEEDKKHERHPIFGNIVDEVAYHEKYPTIYHLRKKLVDSTDKADLRLIYLALAHMIKFRGHFLIEGDLNPDNSDVDKLFIQLVQTYNQLFEENPINASGVDAKAILSARLSKSRRLENLIAQLPGEKKNGLFGNLIALSLGLTPNFKSNFDLAEDAKLQLSKDTYDDDLDNLLAQIGDQYADLFLAAKNLSDAILLSDILRVNTEITKAPLSASMIKRYDEHHQDLTLLKALVRQQLPEKYKEIFFDQSKNGYAGYIDGGASQEEFYKFIKPILEKMDGTEELLVKLNREDLLRKQRTFDNGSIPHQIHLGELHAILRRQEDFYPFLKDNREKIEKILTFRIPYYVGPLARGNSRFAWMTRKSEETITPWNFEEVVDKGASAQSFIERMTNFDKNLPNEKVLPKHSLLYEYFTVYNELTKVKYVTEGMRKPAFLSGEQKKAIVDLLFKTNRKVTVKQLKEDYFKKIECFDSVEISGVEDRFNASLGTYHDLLKIIKDKDFLDNEENEDILEDIVLTLTLFEDREMIEERLKTYAHLFDDKVMKQLKRRRYTGWGRLSRKLINGIRDKQSGKTILDFLKSDGFANRNFMQLIHDDSLTFKEDIQKAQVSGQGDSLHEHIANLAGSPAIKKGILQTVKVVDELVKVMGRHKPENIVIEMARENQTTQKGQKNSRERMKRIEEGIKELGSQILKEHPVENTQLQNEKLYLYYLQNGRDMYVDQELDINRLSDYDVDHIVPQSFLKDDSIDNKVLTRSDKARGKSDNVPSEEVVKKMKNYWRQLLNAKLITQRKFDNLTKAERGGLSELDKAGFIKRQLVETRQITKHVAQILDSRMNTKYDENDKLIREVKVITLKSKLVSDFRKDFQFYKVREINNYHHAHDAYLNAVVGTALIKKYPKLESEFVYGDYKVYDVRKMIAKSEQEIGKATAKYFFYSNIMNFFKTEITLANGEIRKRPLIETNGETGEIVWDKGRDFATVRKVLSMPQVNIVKKTEVQTGGFSKESILPKRNSDKLIARKKDWDPKKYGGFDSPTVAYSVLVVAKVEKGKSKKLKSVKELLGITIMERSSFEKNPIDFLEAKGYKEVKKDLIIKLPKYSLFELENGRKRMLASAGELQKGNELALPSKYVNFLYLASHYEKLKGSPEDNEQKQLFVEQHKHYLDEIIEQISEFSKRVILADANLDKVLSAYNKHRDKPIREQAENIIHLFTLTNLGAPAAFKYFDTTIDRKRYTSTKEVLDATLIHQSITGLYETRIDLSQLGGDGGGSSGGSGGGGGTLNIEDEYRLHETSKEPDVSLGSTWLSDFPQAWAETGGMGLAVRQAPLIIPLKATSTPVSIKQYPMSQEARLGIKPHIQRLLDQGILVPCQSPWNTPLLPVKKPGTNDYRPVQDLREVNKRVEDIHPTVPNPYNLLSGLPPSHQWYTVLDLKDAFFCLRLHPTSQPLFAFEWRDPEMGISGQLTWTRLPQGFKNSPTLFNEALHRDLAGFRIQHPDLILLQYVDDLLLAATSELDCQQGTRALLQTLGDLGYRASAKKAQICQKQVKYLGYLLKEGQRWLTEARKETVMGQPIPKTPRQLREFLGKAGFCRLFIPGFAEMAAPLYPLTKPGTLFNWGPDQQKAFQEIKQALLTAPALGLPDLTKPFELFVDEKQGYAKGVLTQKLGPWRRPVAYLSKKLDPVAAGWPPCLRMVAAIAVLTKDAGKLTMGQPLVILAPHAVEALVKQPPDRWLSNARMTHYQALLLDTDRVQFGPVVALNPATLLPLPEEGLQHDCLDILAEAHGTRSDLMDQPLPDADHTWYTDGSSFLQEGQRKAGAAVTTETEVIWARALPAGTSAQRAELIALTQALKMAEGKKLNVYTDSRYAFATAHIHGEIYRRRGWLTSEGKEIKNKDEILALLKALFLPKRLSIIHCPGHQKGNSAEARGNRMADQAAREVATRETPETSTLLAGKRTADGSEFEKRTADGSEFESPKKKAKVE

SEQ ID NO: 2380 - protein, 2094 aa, synthetic construct
MPAAKRVKLDGGDKKYSIGLDIGTNSVGWAVITDEYKVPSKKFKVLGNTDRHSIKKNLIGALLFDSGETAEATRLKRTARRRYTRRKNRICYLQEIFSNEMAKVDDSFFHRLEESFLVEEDKKHERHPIFGNIVDEVAYHEKYPTIYHLRKKLVDSTDKADLRLIYLALAHMIKFRGHFLIEGDLNPDNSDVDKLFIQLVQTYNQLFEENPINASGVDAKAILSARLSKSRRLENLIAQLPGEKKNGLFGNLIALSLGLTPNFKSNFDLAEDAKLQLSKDTYDDDLDNLLAQIGDQYADLFLAAKNLSDAILLSDILRVNTEITKAPLSASMIKRYDEHHQDLTLLKALVRQQLPEKYKEIFFDQSKNGYAGYIDGGASQEEFYKFIKPILEKMDGTEELLVKLNREDLLRKQRTFDNGSIPHQIHLGELHAILRRQEDFYPFLKDNREKIEKILTFRIPYYVGPLARGNSRFAWMTRKSEETITPWNFEEVVDKGASAQSFIERMTNFDKNLPNEKVLPKHSLLYEYFTVYNELTKVKYVTEGMRKPAFLSGEQKKAIVDLLFKTNRKVTVKQLKEDYFKKIECFDSVEISGVEDRFNASLGTYHDLLKIIKDKDFLDNEENEDILEDIVLTLTLFEDREMIEERLKTYAHLFDDKVMKQLKRRRYTGWGRLSRKLINGIRDKQSGKTILDFLKSDGFANRNFMQLIHDDSLTFKEDIQKAQVSGQGDSLHEHIANLAGSPAIKKGILQTVKVVDELVKVMGRHKPENIVIEMARENQTTQKGQKNSRERMKRIEEGIKELGSQILKEHPVENTQLQNEKLYLYYLQNGRDMYVDQELDINRLSDYDVDHIVPQSFLKDDSIDNKVLTRSDKARGKSDNVPSEEVVKKMKNYWRQLLNAKLITQRKFDNLTKAERGGLSELDKAGFIKRQLVETRQITKHVAQILDSRMNTKYDENDKLIREVKVITLKSKLVSDFRKDFQFYKVREINNYHHAHDAYLNAVVGTALIKKYPKLESEFVYGDYKVYDVRKMIAKSEQEIGKATAKYFFYSNIMNFFKTEITLANGEIRKRPLIETNGETGEIVWDKGRDFATVRKVLSMPQVNIVKKTEVQTGGFSKESILPKRNSDKLIARKKDWDPKKYGGFDSPTVAYSVLVVAKVEKGKSKKLKSVKELLGITIMERSSFEKNPIDFLEAKGYKEVKKDLIIKLPKYSLFELENGRKRMLASAGELQKGNELALPSKYVNFLYLASHYEKLKGSPEDNEQKQLFVEQHKHYLDEIIEQISEFSKRVILADANLDKVLSAYNKHRDKPIREQAENIIHLFTLTNLGAPAAFKYFDTTIDRKRYTSTKEVLDATLIHQSITGLYETRIDLSQLGGDGGPAPGSSGGSGGTLNIEDEYRLHETSKEPDVSLGSTWLSDFPQAWAETGGMGLAVRQAPLIIPLKATSTPVSIKQYPMSQEARLGIKPHIQRLLDQGILVPCQSPWNTPLLPVKKPGTNDYRPVQDLREVNKRVEDIHPTVPNPYNLLSGLPPSHQWYTVLDLKDAFFCLRLHPTSQPLFAFEWRDPEMGISGQLTWTRLPQGFKNSPTLFNEALHRDLAGFRIQHPDLILLQYVDDLLLAATSELDCQQGTRALLQTLGDLGYRASAKKAQICQKQVKYLGYLLKEGQRWLTEARKETVMGQPIPKTPRQLREFLGKAGFCRLFIPGFAEMAAPLYPLTKPGTLFNWGPDQQKAFQEIKQALLTAPALGLPDLTKPFELFVDEKQGYAKGVLTQKLGPWRRPVAYLSKKLDPVAAGWPPCLRMVAAIAVLTKDAGKLTMGQPLVILAPHAVEALVKQPPDRWLSNARMTHYQALLLDTDRVQFGPVVALNPATLLPLPEEGLQHDCLDILAEAHGTRSDLMDQPLPDADHTWYTDGSSFLQEGQRKAGAAVTTETEVIWARALPAGTSAQRAELIALTQALKMAEGKKLNVYTDSRYAFATAHIHGEIYRRRGWLTSEGKEIKNKDEILALLKALFLPKRLSIIHCPGHQKGNSAEARGNRMADQAAREVATRETPETSTLLAGKRTADGSEFEKRTADGSEFESPKKKAKVE

SEQ ID NO: 2381 - protein, 2090 aa, synthetic construct
MPAAKRVKLDGGDKKYSIGLDIGTNSVGWAVITDEYKVPSKKFKVLGNTDRHSIKKNLIGALLFDSGETAEATRLKRTARRRYTRRKNRICYLQEIFSNEMAKVDDSFFHRLEESFLVEEDKKHERHPIFGNIVDEVAYHEKYPTIYHLRKKLVDSTDKADLRLIYLALAHMIKFRGHFLIEGDLNPDNSDVDKLFIQLVQTYNQLFEENPINASGVDAKAILSARLSKSRRLENLIAQLPGEKKNGLFGNLIALSLGLTPNFKSNFDLAEDAKLQLSKDTYDDDLDNLLAQIGDQYADLFLAAKNLSDAILLSDILRVNTEITKAPLSASMIKRYDEHHQDLTLLKALVRQQLPEKYKEIFFDQSKNGYAGYIDGGASQEEFYKFIKPILEKMDGTEELLVKLNREDLLRKQRTFDNGSIPHQIHLGELHAILRRQEDFYPFLKDNREKIEKILTFRIPYYVGPLARGNSRFAWMTRKSEETITPWNFEEVVDKGASAQSFIERMTNFDKNLPNEKVLPKHSLLYEYFTVYNELTKVKYVTEGMRKPAFLSGEQKKAIVDLLFKTNRKVTVKQLKEDYFKKIECFDSVEISGVEDRFNASLGTYHDLLKIIKDKDFLDNEENEDILEDIVLTLTLFEDREMIEERLKTYAHLFDDKVMKQLKRRRYTGWGRLSRKLINGIRDKQSGKTILDFLKSDGFANRNFMQLIHDDSLTFKEDIQKAQVSGQGDSLHEHIANLAGSPAIKKGILQTVKVVDELVKVMGRHKPENIVIEMARENQTTQKGQKNSRERMKRIEEGIKELGSQILKEHPVENTQLQNEKLYLYYLQNGRDMYVDQELDINRLSDYDVDHIVPQSFLKDDSIDNKVLTRSDKARGKSDNVPSEEVVKKMKNYWRQLLNAKLITQRKFDNLTKAERGGLSELDKAGFIKRQLVETRQITKHVAQILDSRMNTKYDENDKLIREVKVITLKSKLVSDFRKDFQFYKVREINNYHHAHDAYLNAVVGTALIKKYPKLESEFVYGDYKVYDVRKMIAKSEQEIGKATAKYFFYSNIMNFFKTEITLANGEIRKRPLIETNGETGEIVWDKGRDFATVRKVLSMPQVNIVKKTEVQTGGFSKESILPKRNSDKLIARKKDWDPKKYGGFDSPTVAYSVLVVAKVEKGKSKKLKSVKELLGITIMERSSFEKNPIDFLEAKGYKEVKKDLIIKLPKYSLFELENGRKRMLASAGELQKGNELALPSKYVNFLYLASHYEKLKGSPEDNEQKQLFVEQHKHYLDEIIEQISEFSKRVILADANLDKVLSAYNKHRDKPIREQAENIIHLFTLTNLGAPAAFKYFDTTIDRKRYTSTKEVLDATLIHQSITGLYETRIDLSQLGGDGGGGGGSGGTLNIEDEYRLHETSKEPDVSLGSTWLSDFPQAWAETGGMGLAVRQAPLIIPLKATSTPVSIKQYPMSQEARLGIKPHIQRLLDQGILVPCQSPWNTPLLPVKKPGTNDYRPVQDLREVNKRVEDIHPTVPNPYNLLSGLPPSHQWYTVLDLKDAFFCLRLHPTSQPLFAFEWRDPEMGISGQLTWTRLPQGFKNSPTLFNEALHRDLAGFRIQHPDLILLQYVDDLLLAATSELDCQQGTRALLQTLGDLGYRASAKKAQICQKQVKYLGYLLKEGQRWLTEARKETVMGQPIPKTPRQLREFLGKAGFCRLFIPGFAEMAAPLYPLTKPGTLFNWGPDQQKAFQEIKQALLTAPALGLPDLTKPFELFVDEKQGYAKGVLTQKLGPWRRPVAYLSKKLDPVAAGWPPCLRMVAAIAVLTKDAGKLTMGQPLVILAPHAVEALVKQPPDRWLSNARMTHYQALLLDTDRVQFGPVVALNPATLLPLPEEGLQHDCLDILAEAHGTRSDLMDQPLPDADHTWYTDGSSFLQEGQRKAGAAVTTETEVIWARALPAGTSAQRAELIALTQALKMAEGKKLNVYTDSRYAFATAHIHGEIYRRRGWLTSEGKEIKNKDEILALLKALFLPKRLSIIHCPGHQKGNSAEARGNRMADQAAREVATRETPETSTLLAGKRTADGSEFEKRTADGSEFESPKKKAKVE

SEQ ID NO: 2382 - protein, 2093 aa, synthetic construct
MPAAKRVKLDGGDKKYSIGLDIGTNSVGWAVITDEYKVPSKKFKVLGNTDRHSIKKNLIGALLFDSGETAEATRLKRTARRRYTRRKNRICYLQEIFSNEMAKVDDSFFHRLEESFLVEEDKKHERHPIFGNIVDEVAYHEKYPTIYHLRKKLVDSTDKADLRLIYLALAHMIKFRGHFLIEGDLNPDNSDVDKLFIQLVQTYNQLFEENPINASGVDAKAILSARLSKSRRLENLIAQLPGEKKNGLFGNLIALSLGLTPNFKSNFDLAEDAKLQLSKDTYDDDLDNLLAQIGDQYADLFLAAKNLSDAILLSDILRVNTEITKAPLSASMIKRYDEHHQDLTLLKALVRQQLPEKYKEIFFDQSKNGYAGYIDGGASQEEFYKFIKPILEKMDGTEELLVKLNREDLLRKQRTFDNGSIPHQIHLGELHAILRRQEDFYPFLKDNREKIEKILTFRIPYYVGPLARGNSRFAWMTRKSEETITPWNFEEVVDKGASAQSFIERMTNFDKNLPNEKVLPKHSLLYEYFTVYNELTKVKYVTEGMRKPAFLSGEQKKAIVDLLFKTNRKVTVKQLKEDYFKKIECFDSVEISGVEDRFNASLGTYHDLLKIIKDKDFLDNEENEDILEDIVLTLTLFEDREMIEERLKTYAHLFDDKVMKQLKRRRYTGWGRLSRKLINGIRDKQSGKTILDFLKSDGFANRNFMQLIHDDSLTFKEDIQKAQVSGQGDSLHEHIANLAGSPAIKKGILQTVKVVDELVKVMGRHKPENIVIEMARENQTTQKGQKNSRERMKRIEEGIKELGSQILKEHPVENTQLQNEKLYLYYLQNGRDMYVDQELDINRLSDYDVDHIVPQSFLKDDSIDNKVLTRSDKARGKSDNVPSEEVVKKMKNYWRQLLNAKLITQRKFDNLTKAERGGLSELDKAGFIKRQLVETRQITKHVAQILDSRMNTKYDENDKLIREVKVITLKSKLVSDFRKDFQFYKVREINNYHHAHDAYLNAVVGTALIKKYPKLESEFVYGDYKVYDVRKMIAKSEQEIGKATAKYFFYSNIMNFFKTEITLANGEIRKRPLIETNGETGEIVWDKGRDFATVRKVLSMPQVNIVKKTEVQTGGFSKESILPKRNSDKLIARKKDWDPKKYGGFDSPTVAYSVLVVAKVEKGKSKKLKSVKELLGITIMERSSFEKNPIDFLEAKGYKEVKKDLIIKLPKYSLFELENGRKRMLASAGELQKGNELALPSKYVNFLYLASHYEKLKGSPEDNEQKQLFVEQHKHYLDEIIEQISEFSKRVILADANLDKVLSAYNKHRDKPIREQAENIIHLFTLTNLGAPAAFKYFDTTIDRKRYTSTKEVLDATLIHQSITGLYETRIDLSQLGGDGGGSSEAAAKGGTLNIEDEYRLHETSKEPDVSLGSTWLSDFPQAWAETGGMGLAVRQAPLIIPLKATSTPVSIKQYPMSQEARLGIKPHIQRLLDQGILVPCQSPWNTPLLPVKKPGTNDYRPVQDLREVNKRVEDIHPTVPNPYNLLSGLPPSHQWYTVLDLKDAFFCLRLHPTSQPLFAFEWRDPEMGISGQLTWTRLPQGFKNSPTLFNEALHRDLAGFRIQHPDLILLQYVDDLLLAATSELDCQQGTRALLQTLGDLGYRASAKKAQICQKQVKYLGYLLKEGQRWLTEARKETVMGQPIPKTPRQLREFLGKAGFCRLFIPGFAEMAAPLYPLTKPGTLFNWGPDQQKAFQEIKQALLTAPALGLPDLTKPFELFVDEKQGYAKGVLTQKLGPWRRPVAYLSKKLDPVAAGWPPCLRMVAAIAVLTKDAGKLTMGQPLVILAPHAVEALVKQPPDRWLSNARMTHYQALLLDTDRVQFGPVVALNPATLLPLPEEGLQHDCLDILAEAHGTRSDLMDQPLPDADHTWYTDGSSFLQEGQRKAGAAVTTETEVIWARALPAGTSAQRAELIALTQALKMAEGKKLNVYTDSRYAFATAHIHGEIYRRRGWLTSEGKEIKNKDEILALLKALFLPKRLSIIHCPGHQKGNSAEARGNRMADQAAREVATRETPETSTLLAGKRTADGSEFEKRTADGSEFESPKKKAKVE

SEQ ID NO: 2383 - protein, 2091 aa, synthetic construct
MPAAKRVKLDGGDKKYSIGLDIGTNSVGWAVITDEYKVPSKKFKVLGNTDRHSIKKNLIGALLFDSGETAEATRLKRTARRRYTRRKNRICYLQEIFSNEMAKVDDSFFHRLEESFLVEEDKKHERHPIFGNIVDEVAYHEKYPTIYHLRKKLVDSTDKADLRLIYLALAHMIKFRGHFLIEGDLNPDNSDVDKLFIQLVQTYNQLFEENPINASGVDAKAILSARLSKSRRLENLIAQLPGEKKNGLFGNLIALSLGLTPNFKSNFDLAEDAKLQLSKDTYDDDLDNLLAQIGDQYADLFLAAKNLSDAILLSDILRVNTEITKAPLSASMIKRYDEHHQDLTLLKALVRQQLPEKYKEIFFDQSKNGYAGYIDGGASQEEFYKFIKPILEKMDGTEELLVKLNREDLLRKQRTFDNGSIPHQIHLGELHAILRRQEDFYPFLKDNREKIEKILTFRIPYYVGPLARGNSRFAWMTRKSEETITPWNFEEVVDKGASAQSFIERMTNFDKNLPNEKVLPKHSLLYEYFTVYNELTKVKYVTEGMRKPAFLSGEQKKAIVDLLFKTNRKVTVKQLKEDYFKKIECFDSVEISGVEDRFNASLGTYHDLLKIIKDKDFLDNEENEDILEDIVLTLTLFEDREMIEERLKTYAHLFDDKVMKQLKRRRYTGWGRLSRKLINGIRDKQSGKTILDFLKSDGFANRNFMQLIHDDSLTFKEDIQKAQVSGQGDSLHEHIANLAGSPAIKKGILQTVKVVDELVKVMGRHKPENIVIEMARENQTTQKGQKNSRERMKRIEEGIKELGSQILKEHPVENTQLQNEKLYLYYLQNGRDMYVDQELDINRLSDYDVDHIVPQSFLKDDSIDNKVLTRSDKARGKSDNVPSEEVVKKMKNYWRQLLNAKLITQRKFDNLTKAERGGLSELDKAGFIKRQLVETRQITKHVAQILDSRMNTKYDENDKLIREVKVITLKSKLVSDFRKDFQFYKVREINNYHHAHDAYLNAVVGTALIKKYPKLESEFVYGDYKVYDVRKMIAKSEQEIGKATAKYFFYSNIMNFFKTEITLANGEIRKRPLIETNGETGEIVWDKGRDFATVRKVLSMPQVNIVKKTEVQTGGFSKESILPKRNSDKLIARKKDWDPKKYGGFDSPTVAYSVLVVAKVEKGKSKKLKSVKELLGITIMERSSFEKNPIDFLEAKGYKEVKKDLIIKLPKYSLFELENGRKRMLASAGELQKGNELALPSKYVNFLYLASHYEKLKGSPEDNEQKQLFVEQHKHYLDEIIEQISEFSKRVILADANLDKVLSAYNKHRDKPIREQAENIIHLFTLTNLGAPAAFKYFDTTIDRKRYTSTKEVLDATLIHQSITGLYETRIDLSQLGGDGGGGGGSSGGTLNIEDEYRLHETSKEPDVSLGSTWLSDFPQAWAETGGMGLAVRQAPLIIPLKATSTPVSIKQYPMSQEARLGIKPHIQRLLDQGILVPCQSPWNTPLLPVKKPGTNDYRPVQDLREVNKRVEDIHPTVPNPYNLLSGLPPSHQWYTVLDLKDAFFCLRLHPTSQPLFAFEWRDPEMGISGQLTWTRLPQGFKNSPTLFNEALHRDLAGFRIQHPDLILLQYVDDLLLAATSELDCQQGTRALLQTLGDLGYRASAKKAQICQKQVKYLGYLLKEGQRWLTEARKETVMGQPIPKTPRQLREFLGKAGFCRLFIPGFAEMAAPLYPLTKPGTLFNWGPDQQKAFQEIKQALLTAPALGLPDLTKPFELFVDEKQGYAKGVLTQKLGPWRRPVAYLSKKLDPVAAGWPPCLRMVAAIAVLTKDAGKLTMGQPLVILAPHAVEALVKQPPDRWLSNARMTHYQALLLDTDRVQFGPVVALNPATLLPLPEEGLQHDCLDILAEAHGTRSDLMDQPLPDADHTWYTDGSSFLQEGQRKAGAAVTTETEVIWARALPAGTSAQRAELIALTQALKMAEGKKLNVYTDSRYAFATAHIHGEIYRRRGWLTSEGKEIKNKDEILALLKALFLPKRLSIIHCPGHQKGNSAEARGNRMADQAAREVATRETPETSTLLAGKRTADGSEFEKRTADGSEFESPKKKAKVE

SEQ ID NO: 2384 - protein, 2096 aa, synthetic construct
MPAAKRVKLDGGDKKYSIGLDIGTNSVGWAVITDEYKVPSKKFKVLGNTDRHSIKKNLIGALLFDSGETAEATRLKRTARRRYTRRKNRICYLQEIFSNEMAKVDDSFFHRLEESFLVEEDKKHERHPIFGNIVDEVAYHEKYPTIYHLRKKLVDSTDKADLRLIYLALAHMIKFRGHFLIEGDLNPDNSDVDKLFIQLVQTYNQLFEENPINASGVDAKAILSARLSKSRRLENLIAQLPGEKKNGLFGNLIALSLGLTPNFKSNFDLAEDAKLQLSKDTYDDDLDNLLAQIGDQYADLFLAAKNLSDAILLSDILRVNTEITKAPLSASMIKRYDEHHQDLTLLKALVRQQLPEKYKEIFFDQSKNGYAGYIDGGASQEEFYKFIKPILEKMDGTEELLVKLNREDLLRKQRTFDNGSIPHQIHLGELHAILRRQEDFYPFLKDNREKIEKILTFRIPYYVGPLARGNSRFAWMTRKSEETITPWNFEEVVDKGASAQSFIERMTNFDKNLPNEKVLPKHSLLYEYFTVYNELTKVKYVTEGMRKPAFLSGEQKKAIVDLLFKTNRKVTVKQLKEDYFKKIECFDSVEISGVEDRFNASLGTYHDLLKIIKDKDFLDNEENEDILEDIVLTLTLFEDREMIEERLKTYAHLFDDKVMKQLKRRRYTGWGRLSRKLINGIRDKQSGKTILDFLKSDGFANRNFMQLIHDDSLTFKEDIQKAQVSGQGDSLHEHIANLAGSPAIKKGILQTVKVVDELVKVMGRHKPENIVIEMARENQTTQKGQKNSRERMKRIEEGIKELGSQILKEHPVENTQLQNEKLYLYYLQNGRDMYVDQELDINRLSDYDVDHIVPQSFLKDDSIDNKVLTRSDKARGKSDNVPSEEVVKKMKNYWRQLLNAKLITQRKFDNLTKAERGGLSELDKAGFIKRQLVETRQITKHVAQILDSRMNTKYDENDKLIREVKVITLKSKLVSDFRKDFQFYKVREINNYHHAHDAYLNAVVGTALIKKYPKLESEFVYGDYKVYDVRKMIAKSEQEIGKATAKYFFYSNIMNFFKTEITLANGEIRKRPLIETNGETGEIVWDKGRDFATVRKVLSMPQVNIVKKTEVQTGGFSKESILPKRNSDKLIARKKDWDPKKYGGFDSPTVAYSVLVVAKVEKGKSKKLKSVKELLGITIMERSSFEKNPIDFLEAKGYKEVKKDLIIKLPKYSLFELENGRKRMLASAGELQKGNELALPSKYVNFLYLASHYEKLKGSPEDNEQKQLFVEQHKHYLDEIIEQISEFSKRVILADANLDKVLSAYNKHRDKPIREQAENIIHLFTLTNLGAPAAFKYFDTTIDRKRYTSTKEVLDATLIHQSITGLYETRIDLSQLGGDGGGSSEAAAKGGGGGTLNIEDEYRLHETSKEPDVSLGSTWLSDFPQAWAETGGMGLAVRQAPLIIPLKATSTPVSIKQYPMSQEARLGIKPHIQRLLDQGILVPCQSPWNTPLLPVKKPGTNDYRPVQDLREVNKRVEDIHPTVPNPYNLLSGLPPSHQWYTVLDLKDAFFCLRLHPTSQPLFAFEWRDPEMGISGQLTWTRLPQGFKNSPTLFNEALHRDLAGFRIQHPDLILLQYVDDLLLAATSELDCQQGTRALLQTLGDLGYRASAKKAQICQKQVKYLGYLLKEGQRWLTEARKETVMGQPIPKTPRQLREFLGKAGFCRLFIPGFAEMAAPLYPLTKPGTLFNWGPDQQKAFQEIKQALLTAPALGLPDLTKPFELFVDEKQGYAKGVLTQKLGPWRRPVAYLSKKLDPVAAGWPPCLRMVAAIAVLTKDAGKLTMGQPLVILAPHAVEALVKQPPDRWLSNARMTHYQALLLDTDRVQFGPVVALNPATLLPLPEEGLQHDCLDILAEAHGTRSDLMDQPLPDADHTWYTDGSSFLQEGQRKAGAAVTTETEVIWARALPAGTSAQRAELIALTQALKMAEGKKLNVYTDSRYAFATAHIHGEIYRRRGWLTSEGKEIKNKDEILALLKALFLPKRLSIIHCPGHQKGNSAEARGNRMADQAAREVATRETPETSTLLAGKRTADGSEFEKRTADGSEFESPKKKAKVE

SEQ ID NO: 2385 - protein, 2096 aa, synthetic construct
MPAAKRVKLDGGDKKYSIGLDIGTNSVGWAVITDEYKVPSKKFKVLGNTDRHSIKKNLIGALLFDSGETAEATRLKRTARRRYTRRKNRICYLQEIFSNEMAKVDDSFFHRLEESFLVEEDKKHERHPIFGNIVDEVAYHEKYPTIYHLRKKLVDSTDKADLRLIYLALAHMIKFRGHFLIEGDLNPDNSDVDKLFIQLVQTYNQLFEENPINASGVDAKAILSARLSKSRRLENLIAQLPGEKKNGLFGNLIALSLGLTPNFKSNFDLAEDAKLQLSKDTYDDDLDNLLAQIGDQYADLFLAAKNLSDAILLSDILRVNTEITKAPLSASMIKRYDEHHQDLTLLKALVRQQLPEKYKEIFFDQSKNGYAGYIDGGASQEEFYKFIKPILEKMDGTEELLVKLNREDLLRKQRTFDNGSIPHQIHLGELHAILRRQEDFYPFLKDNREKIEKILTFRIPYYVGPLARGNSRFAWMTRKSEETITPWNFEEVVDKGASAQSFIERMTNFDKNLPNEKVLPKHSLLYEYFTVYNELTKVKYVTEGMRKPAFLSGEQKKAIVDLLFKTNRKVTVKQLKEDYFKKIECFDSVEISGVEDRFNASLGTYHDLLKIIKDKDFLDNEENEDILEDIVLTLTLFEDREMIEERLKTYAHLFDDKVMKQLKRRRYTGWGRLSRKLINGIRDKQSGKTILDFLKSDGFANRNFMQLIHDDSLTFKEDIQKAQVSGQGDSLHEHIANLAGSPAIKKGILQTVKVVDELVKVMGRHKPENIVIEMARENQTTQKGQKNSRERMKRIEEGIKELGSQILKEHPVENTQLQNEKLYLYYLQNGRDMYVDQELDINRLSDYDVDHIVPQSFLKDDSIDNKVLTRSDKARGKSDNVPSEEVVKKMKNYWRQLLNAKLITQRKFDNLTKAERGGLSELDKAGFIKRQLVETRQITKHVAQILDSRMNTKYDENDKLIREVKVITLKSKLVSDFRKDFQFYKVREINNYHHAHDAYLNAVVGTALIKKYPKLESEFVYGDYKVYDVRKMIAKSEQEIGKATAKYFFYSNIMNFFKTEITLANGEIRKRPLIETNGETGEIVWDKGRDFATVRKVLSMPQVNIVKKTEVQTGGFSKESILPKRNSDKLIARKKDWDPKKYGGFDSPTVAYSVLVVAKVEKGKSKKLKSVKELLGITIMERSSFEKNPIDFLEAKGYKEVKKDLIIKLPKYSLFELENGRKRMLASAGELQKGNELALPSKYVNFLYLASHYEKLKGSPEDNEQKQLFVEQHKHYLDEIIEQISEFSKRVILADANLDKVLSAYNKHRDKPIREQAENIIHLFTLTNLGAPAAFKYFDTTIDRKRYTSTKEVLDATLIHQSITGLYETRIDLSQLGGDGGGGGEAAAKPAPGGTLNIEDEYRLHETSKEPDVSLGSTWLSDFPQAWAETGGMGLAVRQAPLIIPLKATSTPVSIKQYPMSQEARLGIKPHIQRLLDQGILVPCQSPWNTPLLPVKKPGTNDYRPVQDLREVNKRVEDIHPTVPNPYNLLSGLPPSHQWYTVLDLKDAFFCLRLHPTSQPLFAFEWRDPEMGISGQLTWTRLPQGFKNSPTLFNEALHRDLAGFRIQHPDLILLQYVDDLLLAATSELDCQQGTRALLQTLGDLGYRASAKKAQICQKQVKYLGYLLKEGQRWLTEARKETVMGQPIPKTPRQLREFLGKAGFCRLFIPGFAEMAAPLYPLTKPGTLFNWGPDQQKAFQEIKQALLTAPALGLPDLTKPFELFVDEKQGYAKGVLTQKLGPWRRPVAYLSKKLDPVAAGWPPCLRMVAAIAVLTKDAGKLTMGQPLVILAPHAVEALVKQPPDRWLSNARMTHYQALLLDTDRVQFGPVVALNPATLLPLPEEGLQHDCLDILAEAHGTRSDLMDQPLPDADHTWYTDGSSFLQEGQRKAGAAVTTETEVIWARALPAGTSAQRAELIALTQALKMAEGKKLNVYTDSRYAFATAHIHGEIYRRRGWLTSEGKEIKNKDEILALLKALFLPKRLSIIHCPGHQKGNSAEARGNRMADQAAREVATRETPETSTLLAGKRTADGSEFEKRTADGSEFESPKKKAKVE

SEQ ID NO: 2386 - protein, 2096 aa, synthetic construct
MPAAKRVKLDGGDKKYSIGLDIGTNSVGWAVITDEYKVPSKKFKVLGNTDRHSIKKNLIGALLFDSGETAEATRLKRTARRRYTRRKNRICYLQEIFSNEMAKVDDSFFHRLEESFLVEEDKKHERHPIFGNIVDEVAYHEKYPTIYHLRKKLVDSTDKADLRLIYLALAHMIKFRGHFLIEGDLNPDNSDVDKLFIQLVQTYNQLFEENPINASGVDAKAILSARLSKSRRLENLIAQLPGEKKNGLFGNLIALSLGLTPNFKSNFDLAEDAKLQLSKDTYDDDLDNLLAQIGDQYADLFLAAKNLSDAILLSDILRVNTEITKAPLSASMIKRYDEHHQDLTLLKALVRQQLPEKYKEIFFDQSKNGYAGYIDGGASQEEFYKFIKPILEKMDGTEELLVKLNREDLLRKQRTFDNGSIPHQIHLGELHAILRRQEDFYPFLKDNREKIEKILTFRIPYYVGPLARGNSRFAWMTRKSEETITPWNFEEVVDKGASAQSFIERMTNFDKNLPNEKVLPKHSLLYEYFTVYNELTKVKYVTEGMRKPAFLSGEQKKAIVDLLFKTNRKVTVKQLKEDYFKKIECFDSVEISGVEDRFNASLGTYHDLLKIIKDKDFLDNEENEDILEDIVLTLTLFEDREMIEERLKTYAHLFDDKVMKQLKRRRYTGWGRLSRKLINGIRDKQSGKTILDFLKSDGFANRNFMQLIHDDSLTFKEDIQKAQVSGQGDSLHEHIANLAGSPAIKKGILQTVKVVDELVKVMGRHKPENIVIEMARENQTTQKGQKNSRERMKRIEEGIKELGSQILKEHPVENTQLQNEKLYLYYLQNGRDMYVDQELDINRLSDYDVDHIVPQSFLKDDSIDNKVLTRSDKARGKSDNVPSEEVVKKMKNYWRQLLNAKLITQRKFDNLTKAERGGLSELDKAGFIKRQLVETRQITKHVAQILDSRMNTKYDENDKLIREVKVITLKSKLVSDFRKDFQFYKVREINNYHHAHDAYLNAVVGTALIKKYPKLESEFVYGDYKVYDVRKMIAKSEQEIGKATAKYFFYSNIMNFFKTEITLANGEIRKRPLIETNGETGEIVWDKGRDFATVRKVLSMPQVNIVKKTEVQTGGFSKESILPKRNSDKLIARKKDWDPKKYGGFDSPTVAYSVLVVAKVEKGKSKKLKSVKELLGITIMERSSFEKNPIDFLEAKGYKEVKKDLIIKLPKYSLFELENGRKRMLASAGELQKGNELALPSKYVNFLYLASHYEKLKGSPEDNEQKQLFVEQHKHYLDEIIEQISEFSKRVILADANLDKVLSAYNKHRDKPIREQAENIIHLFTLTNLGAPAAFKYFDTTIDRKRYTSTKEVLDATLIHQSITGLYETRIDLSQLGGDGGGSSGGSEAAAKGGTLNIEDEYRLHETSKEPDVSLGSTWLSDFPQAWAETGGMGLAVRQAPLIIPLKATSTPVSIKQYPMSQEARLGIKPHIQRLLDQGILVPCQSPWNTPLLPVKKPGTNDYRPVQDLREVNKRVEDIHPTVPNPYNLLSGLPPSHQWYTVLDLKDAFFCLRLHPTSQPLFAFEWRDPEMGISGQLTWTRLPQGFKNSPTLFNEALHRDLAGFRIQHPDLILLQYVDDLLLAATSELDCQQGTRALLQTLGDLGYRASAKKAQICQKQVKYLGYLLKEGQRWLTEARKETVMGQPIPKTPRQLREFLGKAGFCRLFIPGFAEMAAPLYPLTKPGTLFNWGPDQQKAFQEIKQALLTAPALGLPDLTKPFELFVDEKQGYAKGVLTQKLGPWRRPVAYLSKKLDPVAAGWPPCLRMVAAIAVLTKDAGKLTMGQPLVILAPHAVEALVKQPPDRWLSNARMTHYQALLLDTDRVQFGPVVALNPATLLPLPEEGLQHDCLDILAEAHGTRSDLMDQPLPDADHTWYTDGSSFLQEGQRKAGAAVTTETEVIWARALPAGTSAQRAELIALTQALKMAEGKKLNVYTDSRYAFATAHIHGEIYRRRGWLTSEGKEIKNKDEILALLKALFLPKRLSIIHCPGHQKGNSAEARGNRMADQAAREVATRETPETSTLLAGKRTADGSEFEKRTADGSEFESPKKKAKVE

SEQ ID NO: 2387 - protein, 2094 aa, synthetic construct
MPAAKRVKLDGGDKKYSIGLDIGTNSVGWAVITDEYKVPSKKFKVLGNTDRHSIKKNLIGALLFDSGETAEATRLKRTARRRYTRRKNRICYLQEIFSNEMAKVDDSFFHRLEESFLVEEDKKHERHPIFGNIVDEVAYHEKYPTIYHLRKKLVDSTDKADLRLIYLALAHMIKFRGHFLIEGDLNPDNSDVDKLFIQLVQTYNQLFEENPINASGVDAKAILSARLSKSRRLENLIAQLPGEKKNGLFGNLIALSLGLTPNFKSNFDLAEDAKLQLSKDTYDDDLDNLLAQIGDQYADLFLAAKNLSDAILLSDILRVNTEITKAPLSASMIKRYDEHHQDLTLLKALVRQQLPEKYKEIFFDQSKNGYAGYIDGGASQEEFYKFIKPILEKMDGTEELLVKLNREDLLRKQRTFDNGSIPHQIHLGELHAILRRQEDFYPFLKDNREKIEKILTFRIPYYVGPLARGNSRFAWMTRKSEETITPWNFEEVVDKGASAQSFIERMTNFDKNLPNEKVLPKHSLLYEYFTVYNELTKVKYVTEGMRKPAFLSGEQKKAIVDLLFKTNRKVTVKQLKEDYFKKIECFDSVEISGVEDRFNASLGTYHDLLKIIKDKDFLDNEENEDILEDIVLTLTLFEDREMIEERLKTYAHLFDDKVMKQLKRRRYTGWGRLSRKLINGIRDKQSGKTILDFLKSDGFANRNFMQLIHDDSLTFKEDIQKAQVSGQGDSLHEHIANLAGSPAIKKGILQTVKVVDELVKVMGRHKPENIVIEMARENQTTQKGQKNSRERMKRIEEGIKELGSQILKEHPVENTQLQNEKLYLYYLQNGRDMYVDQELDINRLSDYDVDHIVPQSFLKDDSIDNKVLTRSDKARGKSDNVPSEEVVKKMKNYWRQLLNAKLITQRKFDNLTKAERGGLSELDKAGFIKRQLVETRQITKHVAQILDSRMNTKYDENDKLIREVKVITLKSKLVSDFRKDFQFYKVREINNYHHAHDAYLNAVVGTALIKKYPKLESEFVYGDYKVYDVRKMIAKSEQEIGKATAKYFFYSNIMNFFKTEITLANGEIRKRPLIETNGETGEIVWDKGRDFATVRKVLSMPQVNIVKKTEVQTGGFSKESILPKRNSDKLIARKKDWDPKKYGGFDSPTVAYSVLVVAKVEKGKSKKLKSVKELLGITIMERSSFEKNPIDFLEAKGYKEVKKDLIIKLPKYSLFELENGRKRMLASAGELQKGNELALPSKYVNFLYLASHYEKLKGSPEDNEQKQLFVEQHKHYLDEIIEQISEFSKRVILADANLDKVLSAYNKHRDKPIREQAENIIHLFTLTNLGAPAAFKYFDTTIDRKRYTSTKEVLDATLIHQSITGLYETRIDLSQLGGDGGGGSPAPGSSGGTLNIEDEYRLHETSKEPDVSLGSTWLSDFPQAWAETGGMGLAVRQAPLIIPLKATSTPVSIKQYPMSQEARLGIKPHIQRLLDQGILVPCQSPWNTPLLPVKKPGTNDYRPVQDLREVNKRVEDIHPTVPNPYNLLSGLPPSHQWYTVLDLKDAFFCLRLHPTSQPLFAFEWRDPEMGISGQLTWTRLPQGFKNSPTLFNEALHRDLAGFRIQHPDLILLQYVDDLLLAATSELDCQQGTRALLQTLGDLGYRASAKKAQICQKQVKYLGYLLKEGQRWLTEARKETVMGQPIPKTPRQLREFLGKAGFCRLFIPGFAEMAAPLYPLTKPGTLFNWGPDQQKAFQEIKQALLTAPALGLPDLTKPFELFVDEKQGYAKGVLTQKLGPWRRPVAYLSKKLDPVAAGWPPCLRMVAAIAVLTKDAGKLTMGQPLVILAPHAVEALVKQPPDRWLSNARMTHYQALLLDTDRVQFGPVVALNPATLLPLPEEGLQHDCLDILAEAHGTRSDLMDQPLPDADHTWYTDGSSFLQEGQRKAGAAVTTETEVIWARALPAGTSAQRAELIALTQALKMAEGKKLNVYTDSRYAFATAHIHGEIYRRRGWLTSEGKEIKNKDEILALLKALFLPKRLSIIHCPGHQKGNSAEARGNRMADQAAREVATRETPETSTLLAGKRTADGSEFEKRTADGSEFESPKKKAKVE

SEQ ID NO: 2388 - protein, 2101 aa, synthetic construct
MPAAKRVKLDGGDKKYSIGLDIGTNSVGWAVITDEYKVPSKKFKVLGNTDRHSIKKNLIGALLFDSGETAEATRLKRTARRRYTRRKNRICYLQEIFSNEMAKVDDSFFHRLEESFLVEEDKKHERHPIFGNIVDEVAYHEKYPTIYHLRKKLVDSTDKADLRLIYLALAHMIKFRGHFLIEGDLNPDNSDVDKLFIQLVQTYNQLFEENPINASGVDAKAILSARLSKSRRLENLIAQLPGEKKNGLFGNLIALSLGLTPNFKSNFDLAEDAKLQLSKDTYDDDLDNLLAQIGDQYADLFLAAKNLSDAILLSDILRVNTEITKAPLSASMIKRYDEHHQDLTLLKALVRQQLPEKYKEIFFDQSKNGYAGYIDGGASQEEFYKFIKPILEKMDGTEELLVKLNREDLLRKQRTFDNGSIPHQIHLGELHAILRRQEDFYPFLKDNREKIEKILTFRIPYYVGPLARGNSRFAWMTRKSEETITPWNFEEVVDKGASAQSFIERMTNFDKNLPNEKVLPKHSLLYEYFTVYNELTKVKYVTEGMRKPAFLSGEQKKAIVDLLFKTNRKVTVKQLKEDYFKKIECFDSVEISGVEDRFNASLGTYHDLLKIIKDKDFLDNEENEDILEDIVLTLTLFEDREMIEERLKTYAHLFDDKVMKQLKRRRYTGWGRLSRKLINGIRDKQSGKTILDFLKSDGFANRNFMQLIHDDSLTFKEDIQKAQVSGQGDSLHEHIANLAGSPAIKKGILQTVKVVDELVKVMGRHKPENIVIEMARENQTTQKGQKNSRERMKRIEEGIKELGSQILKEHPVENTQLQNEKLYLYYLQNGRDMYVDQELDINRLSDYDVDHIVPQSFLKDDSIDNKVLTRSDKARGKSDNVPSEEVVKKMKNYWRQLLNAKLITQRKFDNLTKAERGGLSELDKAGFIKRQLVETRQITKHVAQILDSRMNTKYDENDKLIREVKVITLKSKLVSDFRKDFQFYKVREINNYHHAHDAYLNAVVGTALIKKYPKLESEFVYGDYKVYDVRKMIAKSEQEIGKATAKYFFYSNIMNFFKTEITLANGEIRKRPLIETNGETGEIVWDKGRDFATVRKVLSMPQVNIVKKTEVQTGGFSKESILPKRNSDKLIARKKDWDPKKYGGFDSPTVAYSVLVVAKVEKGKSKKLKSVKELLGITIMERSSFEKNPIDFLEAKGYKEVKKDLIIKLPKYSLFELENGRKRMLASAGELQKGNELALPSKYVNFLYLASHYEKLKGSPEDNEQKQLFVEQHKHYLDEIIEQISEFSKRVILADANLDKVLSAYNKHRDKPIREQAENIIHLFTLTNLGAPAAFKYFDTTIDRKRYTSTKEVLDATLIHQSITGLYETRIDLSQLGGDGGSGSETPGTSESATPESGGTLNIEDEYRLHETSKEPDVSLGSTWLSDFPQAWAETGGMGLAVRQAPLIIPLKATSTPVSIKQYPMSQEARLGIKPHIQRLLDQGILVPCQSPWNTPLLPVKKPGTNDYRPVQDLREVNKRVEDIHPTVPNPYNLLSGLPPSHQWYTVLDLKDAFFCLRLHPTSQPLFAFEWRDPEMGISGQLTWTRLPQGFKNSPTLFNEALHRDLAGFRIQHPDLILLQYVDDLLLAATSELDCQQGTRALLQTLGDLGYRASAKKAQICQKQVKYLGYLLKEGQRWLTEARKETVMGQPIPKTPRQLREFLGKAGFCRLFIPGFAEMAAPLYPLTKPGTLFNWGPDQQKAFQEIKQALLTAPALGLPDLTKPFELFVDEKQGYAKGVLTQKLGPWRRPVAYLSKKLDPVAAGWPPCLRMVAAIAVLTKDAGKLTMGQPLVILAPHAVEALVKQPPDRWLSNARMTHYQALLLDTDRVQFGPVVALNPATLLPLPEEGLQHDCLDILAEAHGTRSDLMDQPLPDADHTWYTDGSSFLQEGQRKAGAAVTTETEVIWARALPAGTSAQRAELIALTQALKMAEGKKLNVYTDSRYAFATAHIHGEIYRRRGWLTSEGKEIKNKDEILALLKALFLPKRLSIIHCPGHQKGNSAEARGNRMADQAAREVATRETPETSTLLAGKRTADGSEFEKRTADGSEFESPKKKAKVE

SEQ ID NO: 2389 - protein, 2091 aa, synthetic construct
MPAAKRVKLDGGDKKYSIGLDIGTNSVGWAVITDEYKVPSKKFKVLGNTDRHSIKKNLIGALLFDSGETAEATRLKRTARRRYTRRKNRICYLQEIFSNEMAKVDDSFFHRLEESFLVEEDKKHERHPIFGNIVDEVAYHEKYPTIYHLRKKLVDSTDKADLRLIYLALAHMIKFRGHFLIEGDLNPDNSDVDKLFIQLVQTYNQLFEENPINASGVDAKAILSARLSKSRRLENLIAQLPGEKKNGLFGNLIALSLGLTPNFKSNFDLAEDAKLQLSKDTYDDDLDNLLAQIGDQYADLFLAAKNLSDAILLSDILRVNTEITKAPLSASMIKRYDEHHQDLTLLKALVRQQLPEKYKEIFFDQSKNGYAGYIDGGASQEEFYKFIKPILEKMDGTEELLVKLNREDLLRKQRTFDNGSIPHQIHLGELHAILRRQEDFYPFLKDNREKIEKILTFRIPYYVGPLARGNSRFAWMTRKSEETITPWNFEEVVDKGASAQSFIERMTNFDKNLPNEKVLPKHSLLYEYFTVYNELTKVKYVTEGMRKPAFLSGEQKKAIVDLLFKTNRKVTVKQLKEDYFKKIECFDSVEISGVEDRFNASLGTYHDLLKIIKDKDFLDNEENEDILEDIVLTLTLFEDREMIEERLKTYAHLFDDKVMKQLKRRRYTGWGRLSRKLINGIRDKQSGKTILDFLKSDGFANRNFMQLIHDDSLTFKEDIQKAQVSGQGDSLHEHIANLAGSPAIKKGILQTVKVVDELVKVMGRHKPENIVIEMARENQTTQKGQKNSRERMKRIEEGIKELGSQILKEHPVENTQLQNEKLYLYYLQNGRDMYVDQELDINRLSDYDVDHIVPQSFLKDDSIDNKVLTRSDKARGKSDNVPSEEVVKKMKNYWRQLLNAKLITQRKFDNLTKAERGGLSELDKAGFIKRQLVETRQITKHVAQILDSRMNTKYDENDKLIREVKVITLKSKLVSDFRKDFQFYKVREINNYHHAHDAYLNAVVGTALIKKYPKLESEFVYGDYKVYDVRKMIAKSEQEIGKATAKYFFYSNIMNFFKTEITLANGEIRKRPLIETNGETGEIVWDKGRDFATVRKVLSMPQVNIVKKTEVQTGGFSKESILPKRNSDKLIARKKDWDPKKYGGFDSPTVAYSVLVVAKVEKGKSKKLKSVKELLGITIMERSSFEKNPIDFLEAKGYKEVKKDLIIKLPKYSLFELENGRKRMLASAGELQKGNELALPSKYVNFLYLASHYEKLKGSPEDNEQKQLFVEQHKHYLDEIIEQISEFSKRVILADANLDKVLSAYNKHRDKPIREQAENIIHLFTLTNLGAPAAFKYFDTTIDRKRYTSTKEVLDATLIHQSITGLYETRIDLSQLGGDGGGGSPAPGGTLNIEDEYRLHETSKEPDVSLGSTWLSDFPQAWAETGGMGLAVRQAPLIIPLKATSTPVSIKQYPMSQEARLGIKPHIQRLLDQGILVPCQSPWNTPLLPVKKPGTNDYRPVQDLREVNKRVEDIHPTVPNPYNLLSGLPPSHQWYTVLDLKDAFFCLRLHPTSQPLFAFEWRDPEMGISGQLTWTRLPQGFKNSPTLFNEALHRDLAGFRIQHPDLILLQYVDDLLLAATSELDCQQGTRALLQTLGDLGYRASAKKAQICQKQVKYLGYLLKEGQRWLTEARKETVMGQPIPKTPRQLREFLGKAGFCRLFIPGFAEMAAPLYPLTKPGTLFNWGPDQQKAFQEIKQALLTAPALGLPDLTKPFELFVDEKQGYAKGVLTQKLGPWRRPVAYLSKKLDPVAAGWPPCLRMVAAIAVLTKDAGKLTMGQPLVILAPHAVEALVKQPPDRWLSNARMTHYQALLLDTDRVQFGPVVALNPATLLPLPEEGLQHDCLDILAEAHGTRSDLMDQPLPDADHTWYTDGSSFLQEGQRKAGAAVTTETEVIWARALPAGTSAQRAELIALTQALKMAEGKKLNVYTDSRYAFATAHIHGEIYRRRGWLTSEGKEIKNKDEILALLKALFLPKRLSIIHCPGHQKGNSAEARGNRMADQAAREVATRETPETSTLLAGKRTADGSEFEKRTADGSEFESPKKKAKVE

SEQ ID NO: 2390 - protein, 2096 aa, synthetic construct
MPAAKRVKLDGGDKKYSIGLDIGTNSVGWAVITDEYKVPSKKFKVLGNTDRHSIKKNLIGALLFDSGETAEATRLKRTARRRYTRRKNRICYLQEIFSNEMAKVDDSFFHRLEESFLVEEDKKHERHPIFGNIVDEVAYHEKYPTIYHLRKKLVDSTDKADLRLIYLALAHMIKFRGHFLIEGDLNPDNSDVDKLFIQLVQTYNQLFEENPINASGVDAKAILSARLSKSRRLENLIAQLPGEKKNGLFGNLIALSLGLTPNFKSNFDLAEDAKLQLSKDTYDDDLDNLLAQIGDQYADLFLAAKNLSDAILLSDILRVNTEITKAPLSASMIKRYDEHHQDLTLLKALVRQQLPEKYKEIFFDQSKNGYAGYIDGGASQEEFYKFIKPILEKMDGTEELLVKLNREDLLRKQRTFDNGSIPHQIHLGELHAILRRQEDFYPFLKDNREKIEKILTFRIPYYVGPLARGNSRFAWMTRKSEETITPWNFEEVVDKGASAQSFIERMTNFDKNLPNEKVLPKHSLLYEYFTVYNELTKVKYVTEGMRKPAFLSGEQKKAIVDLLFKTNRKVTVKQLKEDYFKKIECFDSVEISGVEDRFNASLGTYHDLLKIIKDKDFLDNEENEDILEDIVLTLTLFEDREMIEERLKTYAHLFDDKVMKQLKRRRYTGWGRLSRKLINGIRDKQSGKTILDFLKSDGFANRNFMQLIHDDSLTFKEDIQKAQVSGQGDSLHEHIANLAGSPAIKKGILQTVKVVDELVKVMGRHKPENIVIEMARENQTTQKGQKNSRERMKRIEEGIKELGSQILKEHPVENTQLQNEKLYLYYLQNGRDMYVDQELDINRLSDYDVDHIVPQSFLKDDSIDNKVLTRSDKARGKSDNVPSEEVVKKMKNYWRQLLNAKLITQRKFDNLTKAERGGLSELDKAGFIKRQLVETRQITKHVAQILDSRMNTKYDENDKLIREVKVITLKSKLVSDFRKDFQFYKVREINNYHHAHDAYLNAVVGTALIKKYPKLESEFVYGDYKVYDVRKMIAKSEQEIGKATAKYFFYSNIMNFFKTEITLANGEIRKRPLIETNGETGEIVWDKGRDFATVRKVLSMPQVNIVKKTEVQTGGFSKESILPKRNSDKLIARKKDWDPKKYGGFDSPTVAYSVLVVAKVEKGKSKKLKSVKELLGITIMERSSFEKNPIDFLEAKGYKEVKKDLIIKLPKYSLFELENGRKRMLASAGELQKGNELALPSKYVNFLYLASHYEKLKGSPEDNEQKQLFVEQHKHYLDEIIEQISEFSKRVILADANLDKVLSAYNKHRDKPIREQAENIIHLFTLTNLGAPAAFKYFDTTIDRKRYTSTKEVLDATLIHQSITGLYETRIDLSQLGGDGGGSSGGGEAAAKGGTLNIEDEYRLHETSKEPDVSLGSTWLSDFPQAWAETGGMGLAVRQAPLIIPLKATSTPVSIKQYPMSQEARLGIKPHIQRLLDQGILVPCQSPWNTPLLPVKKPGTNDYRPVQDLREVNKRVEDIHPTVPNPYNLLSGLPPSHQWYTVLDLKDAFFCLRLHPTSQPLFAFEWRDPEMGISGQLTWTRLPQGFKNSPTLFNEALHRDLAGFRIQHPDLILLQYVDDLLLAATSELDCQQGTRALLQTLGDLGYRASAKKAQICQKQVKYLGYLLKEGQRWLTEARKETVMGQPIPKTPRQLREFLGKAGFCRLFIPGFAEMAAPLYPLTKPGTLFNWGPDQQKAFQEIKQALLTAPALGLPDLTKPFELFVDEKQGYAKGVLTQKLGPWRRPVAYLSKKLDPVAAGWPPCLRMVAAIAVLTKDAGKLTMGQPLVILAPHAVEALVKQPPDRWLSNARMTHYQALLLDTDRVQFGPVVALNPATLLPLPEEGLQHDCLDILAEAHGTRSDLMDQPLPDADHTWYTDGSSFLQEGQRKAGAAVTTETEVIWARALPAGTSAQRAELIALTQALKMAEGKKLNVYTDSRYAFATAHIHGEIYRRRGWLTSEGKEIKNKDEILALLKALFLPKRLSIIHCPGHQKGNSAEARGNRMADQAAREVATRETPETSTLLAGKRTADGSEFEKRTADGSEFESPKKKAKVE

SEQ ID NO: 2391 - protein, 2096 aa, synthetic construct
MPAAKRVKLDGGDKKYSIGLDIGTNSVGWAVITDEYKVPSKKFKVLGNTDRHSIKKNLIGALLFDSGETAEATRLKRTARRRYTRRKNRICYLQEIFSNEMAKVDDSFFHRLEESFLVEEDKKHERHPIFGNIVDEVAYHEKYPTIYHLRKKLVDSTDKADLRLIYLALAHMIKFRGHFLIEGDLNPDNSDVDKLFIQLVQTYNQLFEENPINASGVDAKAILSARLSKSRRLENLIAQLPGEKKNGLFGNLIALSLGLTPNFKSNFDLAEDAKLQLSKDTYDDDLDNLLAQIGDQYADLFLAAKNLSDAILLSDILRVNTEITKAPLSASMIKRYDEHHQDLTLLKALVRQQLPEKYKEIFFDQSKNGYAGYIDGGASQEEFYKFIKPILEKMDGTEELLVKLNREDLLRKQRTFDNGSIPHQIHLGELHAILRRQEDFYPFLKDNREKIEKILTFRIPYYVGPLARGNSRFAWMTRKSEETITPWNFEEVVDKGASAQSFIERMTNFDKNLPNEKVLPKHSLLYEYFTVYNELTKVKYVTEGMRKPAFLSGEQKKAIVDLLFKTNRKVTVKQLKEDYFKKIECFDSVEISGVEDRFNASLGTYHDLLKIIKDKDFLDNEENEDILEDIVLTLTLFEDREMIEERLKTYAHLFDDKVMKQLKRRRYTGWGRLSRKLINGIRDKQSGKTILDFLKSDGFANRNFMQLIHDDSLTFKEDIQKAQVSGQGDSLHEHIANLAGSPAIKKGILQTVKVVDELVKVMGRHKPENIVIEMARENQTTQKGQKNSRERMKRIEEGIKELGSQILKEHPVENTQLQNEKLYLYYLQNGRDMYVDQELDINRLSDYDVDHIVPQSFLKDDSIDNKVLTRSDKARGKSDNVPSEEVVKKMKNYWRQLLNAKLITQRKFDNLTKAERGGLSELDKAGFIKRQLVETRQITKHVAQILDSRMNTKYDENDKLIREVKVITLKSKLVSDFRKDFQFYKVREINNYHHAHDAYLNAVVGTALIKKYPKLESEFVYGDYKVYDVRKMIAKSEQEIGKATAKYFFYSNIMNFFKTEITLANGEIRKRPLIETNGETGEIVWDKGRDFATVRKVLSMPQVNIVKKTEVQTGGFSKESILPKRNSDKLIARKKDWDPKKYGGFDSPTVAYSVLVVAKVEKGKSKKLKSVKELLGITIMERSSFEKNPIDFLEAKGYKEVKKDLIIKLPKYSLFELENGRKRMLASAGELQKGNELALPSKYVNFLYLASHYEKLKGSPEDNEQKQLFVEQHKHYLDEIIEQISEFSKRVILADANLDKVLSAYNKHRDKPIREQAENIIHLFTLTNLGAPAAFKYFDTTIDRKRYTSTKEVLDATLIHQSITGLYETRIDLSQLGGDGGEAAAKGGGPAPGGTLNIEDEYRLHETSKEPDVSLGSTWLSDFPQAWAETGGMGLAVRQAPLIIPLKATSTPVSIKQYPMSQEARLGIKPHIQRLLDQGILVPCQSPWNTPLLPVKKPGTNDYRPVQDLREVNKRVEDIHPTVPNPYNLLSGLPPSHQWYTVLDLKDAFFCLRLHPTSQPLFAFEWRDPEMGISGQLTWTRLPQGFKNSPTLFNEALHRDLAGFRIQHPDLILLQYVDDLLLAATSELDCQQGTRALLQTLGDLGYRASAKKAQICQKQVKYLGYLLKEGQRWLTEARKETVMGQPIPKTPRQLREFLGKAGFCRLFIPGFAEMAAPLYPLTKPGTLFNWGPDQQKAFQEIKQALLTAPALGLPDLTKPFELFVDEKQGYAKGVLTQKLGPWRRPVAYLSKKLDPVAAGWPPCLRMVAAIAVLTKDAGKLTMGQPLVILAPHAVEALVKQPPDRWLSNARMTHYQALLLDTDRVQFGPVVALNPATLLPLPEEGLQHDCLDILAEAHGTRSDLMDQPLPDADHTWYTDGSSFLQEGQRKAGAAVTTETEVIWARALPAGTSAQRAELIALTQALKMAEGKKLNVYTDSRYAFATAHIHGEIYRRRGWLTSEGKEIKNKDEILALLKALFLPKRLSIIHCPGHQKGNSAEARGNRMADQAAREVATRETPETSTLLAGKRTADGSEFEKRTADGSEFESPKKKAKVE

SEQ ID NO: 2392 - protein, 2096 aa, synthetic construct
MPAAKRVKLDGGDKKYSIGLDIGTNSVGWAVITDEYKVPSKKFKVLGNTDRHSIKKNLIGALLFDSGETAEATRLKRTARRRYTRRKNRICYLQEIFSNEMAKVDDSFFHRLEESFLVEEDKKHERHPIFGNIVDEVAYHEKYPTIYHLRKKLVDSTDKADLRLIYLALAHMIKFRGHFLIEGDLNPDNSDVDKLFIQLVQTYNQLFEENPINASGVDAKAILSARLSKSRRLENLIAQLPGEKKNGLFGNLIALSLGLTPNFKSNFDLAEDAKLQLSKDTYDDDLDNLLAQIGDQYADLFLAAKNLSDAILLSDILRVNTEITKAPLSASMIKRYDEHHQDLTLLKALVRQQLPEKYKEIFFDQSKNGYAGYIDGGASQEEFYKFIKPILEKMDGTEELLVKLNREDLLRKQRTFDNGSIPHQIHLGELHAILRRQEDFYPFLKDNREKIEKILTFRIPYYVGPLARGNSRFAWMTRKSEETITPWNFEEVVDKGASAQSFIERMTNFDKNLPNEKVLPKHSLLYEYFTVYNELTKVKYVTEGMRKPAFLSGEQKKAIVDLLFKTNRKVTVKQLKEDYFKKIECFDSVEISGVEDRFNASLGTYHDLLKIIKDKDFLDNEENEDILEDIVLTLTLFEDREMIEERLKTYAHLFDDKVMKQLKRRRYTGWGRLSRKLINGIRDKQSGKTILDFLKSDGFANRNFMQLIHDDSLTFKEDIQKAQVSGQGDSLHEHIANLAGSPAIKKGILQTVKVVDELVKVMGRHKPENIVIEMARENQTTQKGQKNSRERMKRIEEGIKELGSQILKEHPVENTQLQNEKLYLYYLQNGRDMYVDQELDINRLSDYDVDHIVPQSFLKDDSIDNKVLTRSDKARGKSDNVPSEEVVKKMKNYWRQLLNAKLITQRKFDNLTKAERGGLSELDKAGFIKRQLVETRQITKHVAQILDSRMNTKYDENDKLIREVKVITLKSKLVSDFRKDFQFYKVREINNYHHAHDAYLNAVVGTALIKKYPKLESEFVYGDYKVYDVRKMIAKSEQEIGKATAKYFFYSNIMNFFKTEITLANGEIRKRPLIETNGETGEIVWDKGRDFATVRKVLSMPQVNIVKKTEVQTGGFSKESILPKRNSDKLIARKKDWDPKKYGGFDSPTVAYSVLVVAKVEKGKSKKLKSVKELLGITIMERSSFEKNPIDFLEAKGYKEVKKDLIIKLPKYSLFELENGRKRMLASAGELQKGNELALPSKYVNFLYLASHYEKLKGSPEDNEQKQLFVEQHKHYLDEIIEQISEFSKRVILADANLDKVLSAYNKHRDKPIREQAENIIHLFTLTNLGAPAAFKYFDTTIDRKRYTSTKEVLDATLIHQSITGLYETRIDLSQLGGDGGGGGPAPEAAAKGGTLNIEDEYRLHETSKEPDVSLGSTWLSDFPQAWAETGGMGLAVRQAPLIIPLKATSTPVSIKQYPMSQEARLGIKPHIQRLLDQGILVPCQSPWNTPLLPVKKPGTNDYRPVQDLREVNKRVEDIHPTVPNPYNLLSGLPPSHQWYTVLDLKDAFFCLRLHPTSQPLFAFEWRDPEMGISGQLTWTRLPQGFKNSPTLFNEALHRDLAGFRIQHPDLILLQYVDDLLLAATSELDCQQGTRALLQTLGDLGYRASAKKAQICQKQVKYLGYLLKEGQRWLTEARKETVMGQPIPKTPRQLREFLGKAGFCRLFIPGFAEMAAPLYPLTKPGTLFNWGPDQQKAFQEIKQALLTAPALGLPDLTKPFELFVDEKQGYAKGVLTQKLGPWRRPVAYLSKKLDPVAAGWPPCLRMVAAIAVLTKDAGKLTMGQPLVILAPHAVEALVKQPPDRWLSNARMTHYQALLLDTDRVQFGPVVALNPATLLPLPEEGLQHDCLDILAEAHGTRSDLMDQPLPDADHTWYTDGSSFLQEGQRKAGAAVTTETEVIWARALPAGTSAQRAELIALTQALKMAEGKKLNVYTDSRYAFATAHIHGEIYRRRGWLTSEGKEIKNKDEILALLKALFLPKRLSIIHCPGHQKGNSAEARGNRMADQAAREVATRETPETSTLLAGKRTADGSEFEKRTADGSEFESPKKKAKVE

SEQ ID NO: 2393 - protein, 2094 aa, synthetic construct
MPAAKRVKLDGGDKKYSIGLDIGTNSVGWAVITDEYKVPSKKFKVLGNTDRHSIKKNLIGALLFDSGETAEATRLKRTARRRYTRRKNRICYLQEIFSNEMAKVDDSFFHRLEESFLVEEDKKHERHPIFGNIVDEVAYHEKYPTIYHLRKKLVDSTDKADLRLIYLALAHMIKFRGHFLIEGDLNPDNSDVDKLFIQLVQTYNQLFEENPINASGVDAKAILSARLSKSRRLENLIAQLPGEKKNGLFGNLIALSLGLTPNFKSNFDLAEDAKLQLSKDTYDDDLDNLLAQIGDQYADLFLAAKNLSDAILLSDILRVNTEITKAPLSASMIKRYDEHHQDLTLLKALVRQQLPEKYKEIFFDQSKNGYAGYIDGGASQEEFYKFIKPILEKMDGTEELLVKLNREDLLRKQRTFDNGSIPHQIHLGELHAILRRQEDFYPFLKDNREKIEKILTFRIPYYVGPLARGNSRFAWMTRKSEETITPWNFEEVVDKGASAQSFIERMTNFDKNLPNEKVLPKHSLLYEYFTVYNELTKVKYVTEGMRKPAFLSGEQKKAIVDLLFKTNRKVTVKQLKEDYFKKIECFDSVEISGVEDRFNASLGTYHDLLKIIKDKDFLDNEENEDILEDIVLTLTLFEDREMIEERLKTYAHLFDDKVMKQLKRRRYTGWGRLSRKLINGIRDKQSGKTILDFLKSDGFANRNFMQLIHDDSLTFKEDIQKAQVSGQGDSLHEHIANLAGSPAIKKGILQTVKVVDELVKVMGRHKPENIVIEMARENQTTQKGQKNSRERMKRIEEGIKELGSQILKEHPVENTQLQNEKLYLYYLQNGRDMYVDQELDINRLSDYDVDHIVPQSFLKDDSIDNKVLTRSDKARGKSDNVPSEEVVKKMKNYWRQLLNAKLITQRKFDNLTKAERGGLSELDKAGFIKRQLVETRQITKHVAQILDSRMNTKYDENDKLIREVKVITLKSKLVSDFRKDFQFYKVREINNYHHAHDAYLNAVVGTALIKKYPKLESEFVYGDYKVYDVRKMIAKSEQEIGKATAKYFFYSNIMNFFKTEITLANGEIRKRPLIETNGETGEIVWDKGRDFATVRKVLSMPQVNIVKKTEVQTGGFSKESILPKRNSDKLIARKKDWDPKKYGGFDSPTVAYSVLVVAKVEKGKSKKLKSVKELLGITIMERSSFEKNPIDFLEAKGYKEVKKDLIIKLPKYSLFELENGRKRMLASAGELQKGNELALPSKYVNFLYLASHYEKLKGSPEDNEQKQLFVEQHKHYLDEIIEQISEFSKRVILADANLDKVLSAYNKHRDKPIREQAENIIHLFTLTNLGAPAAFKYFDTTIDRKRYTSTKEVLDATLIHQSITGLYETRIDLSQLGGDGGGSSGSSGSSGGTLNIEDEYRLHETSKEPDVSLGSTWLSDFPQAWAETGGMGLAVRQAPLIIPLKATSTPVSIKQYPMSQEARLGIKPHIQRLLDQGILVPCQSPWNTPLLPVKKPGTNDYRPVQDLREVNKRVEDIHPTVPNPYNLLSGLPPSHQWYTVLDLKDAFFCLRLHPTSQPLFAFEWRDPEMGISGQLTWTRLPQGFKNSPTLFNEALHRDLAGFRIQHPDLILLQYVDDLLLAATSELDCQQGTRALLQTLGDLGYRASAKKAQICQKQVKYLGYLLKEGQRWLTEARKETVMGQPIPKTPRQLREFLGKAGFCRLFIPGFAEMAAPLYPLTKPGTLFNWGPDQQKAFQEIKQALLTAPALGLPDLTKPFELFVDEKQGYAKGVLTQKLGPWRRPVAYLSKKLDPVAAGWPPCLRMVAAIAVLTKDAGKLTMGQPLVILAPHAVEALVKQPPDRWLSNARMTHYQALLLDTDRVQFGPVVALNPATLLPLPEEGLQHDCLDILAEAHGTRSDLMDQPLPDADHTWYTDGSSFLQEGQRKAGAAVTTETEVIWARALPAGTSAQRAELIALTQALKMAEGKKLNVYTDSRYAFATAHIHGEIYRRRGWLTSEGKEIKNKDEILALLKALFLPKRLSIIHCPGHQKGNSAEARGNRMADQAAREVATRETPETSTLLAGKRTADGSEFEKRTADGSEFESPKKKAKVE

SEQ ID NO: 2394 - protein, 2092 aa, synthetic construct
MPAAKRVKLDGGDKKYSIGLDIGTNSVGWAVITDEYKVPSKKFKVLGNTDRHSIKKNLIGALLFDSGETAEATRLKRTARRRYTRRKNRICYLQEIFSNEMAKVDDSFFHRLEESFLVEEDKKHERHPIFGNIVDEVAYHEKYPTIYHLRKKLVDSTDKADLRLIYLALAHMIKFRGHFLIEGDLNPDNSDVDKLFIQLVQTYNQLFEENPINASGVDAKAILSARLSKSRRLENLIAQLPGEKKNGLFGNLIALSLGLTPNFKSNFDLAEDAKLQLSKDTYDDDLDNLLAQIGDQYADLFLAAKNLSDAILLSDILRVNTEITKAPLSASMIKRYDEHHQDLTLLKALVRQQLPEKYKEIFFDQSKNGYAGYIDGGASQEEFYKFIKPILEKMDGTEELLVKLNREDLLRKQRTFDNGSIPHQIHLGELHAILRRQEDFYPFLKDNREKIEKILTFRIPYYVGPLARGNSRFAWMTRKSEETITPWNFEEVVDKGASAQSFIERMTNFDKNLPNEKVLPKHSLLYEYFTVYNELTKVKYVTEGMRKPAFLSGEQKKAIVDLLFKTNRKVTVKQLKEDYFKKIECFDSVEISGVEDRFNASLGTYHDLLKIIKDKDFLDNEENEDILEDIVLTLTLFEDREMIEERLKTYAHLFDDKVMKQLKRRRYTGWGRLSRKLINGIRDKQSGKTILDFLKSDGFANRNFMQLIHDDSLTFKEDIQKAQVSGQGDSLHEHIANLAGSPAIKKGILQTVKVVDELVKVMGRHKPENIVIEMARENQTTQKGQKNSRERMKRIEEGIKELGSQILKEHPVENTQLQNEKLYLYYLQNGRDMYVDQELDINRLSDYDVDHIVPQSFLKDDSIDNKVLTRSDKARGKSDNVPSEEVVKKMKNYWRQLLNAKLITQRKFDNLTKAERGGLSELDKAGFIKRQLVETRQITKHVAQILDSRMNTKYDENDKLIREVKVITLKSKLVSDFRKDFQFYKVREINNYHHAHDAYLNAVVGTALIKKYPKLESEFVYGDYKVYDVRKMIAKSEQEIGKATAKYFFYSNIMNFFKTEITLANGEIRKRPLIETNGETGEIVWDKGRDFATVRKVLSMPQVNIVKKTEVQTGGFSKESILPKRNSDKLIARKKDWDPKKYGGFDSPTVAYSVLVVAKVEKGKSKKLKSVKELLGITIMERSSFEKNPIDFLEAKGYKEVKKDLIIKLPKYSLFELENGRKRMLASAGELQKGNELALPSKYVNFLYLASHYEKLKGSPEDNEQKQLFVEQHKHYLDEIIEQISEFSKRVILADANLDKVLSAYNKHRDKPIREQAENIIHLFTLTNLGAPAAFKYFDTTIDRKRYTSTKEVLDATLIHQSITGLYETRIDLSQLGGDGGPAPAPAPGGTLNIEDEYRLHETSKEPDVSLGSTWLSDFPQAWAETGGMGLAVRQAPLIIPLKATSTPVSIKQYPMSQEARLGIKPHIQRLLDQGILVPCQSPWNTPLLPVKKPGTNDYRPVQDLREVNKRVEDIHPTVPNPYNLLSGLPPSHQWYTVLDLKDAFFCLRLHPTSQPLFAFEWRDPEMGISGQLTWTRLPQGFKNSPTLFNEALHRDLAGFRIQHPDLILLQYVDDLLLAATSELDCQQGTRALLQTLGDLGYRASAKKAQICQKQVKYLGYLLKEGQRWLTEARKETVMGQPIPKTPRQLREFLGKAGFCRLFIPGFAEMAAPLYPLTKPGTLFNWGPDQQKAFQEIKQALLTAPALGLPDLTKPFELFVDEKQGYAKGVLTQKLGPWRRPVAYLSKKLDPVAAGWPPCLRMVAAIAVLTKDAGKLTMGQPLVILAPHAVEALVKQPPDRWLSNARMTHYQALLLDTDRVQFGPVVALNPATLLPLPEEGLQHDCLDILAEAHGTRSDLMDQPLPDADHTWYTDGSSFLQEGQRKAGAAVTTETEVIWARALPAGTSAQRAELIALTQALKMAEGKKLNVYTDSRYAFATAHIHGEIYRRRGWLTSEGKEIKNKDEILALLKALFLPKRLSIIHCPGHQKGNSAEARGNRMADQAAREVATRETPETSTLLAGKRTADGSEFEKRTADGSEFESPKKKAKVE

SEQ ID NO: 2395 - protein, 2091 aa, synthetic construct
MPAAKRVKLDGGDKKYSIGLDIGTNSVGWAVITDEYKVPSKKFKVLGNTDRHSIKKNLIGALLFDSGETAEATRLKRTARRRYTRRKNRICYLQEIFSNEMAKVDDSFFHRLEESFLVEEDKKHERHPIFGNIVDEVAYHEKYPTIYHLRKKLVDSTDKADLRLIYLALAHMIKFRGHFLIEGDLNPDNSDVDKLFIQLVQTYNQLFEENPINASGVDAKAILSARLSKSRRLENLIAQLPGEKKNGLFGNLIALSLGLTPNFKSNFDLAEDAKLQLSKDTYDDDLDNLLAQIGDQYADLFLAAKNLSDAILLSDILRVNTEITKAPLSASMIKRYDEHHQDLTLLKALVRQQLPEKYKEIFFDQSKNGYAGYIDGGASQEEFYKFIKPILEKMDGTEELLVKLNREDLLRKQRTFDNGSIPHQIHLGELHAILRRQEDFYPFLKDNREKIEKILTFRIPYYVGPLARGNSRFAWMTRKSEETITPWNFEEVVDKGASAQSFIERMTNFDKNLPNEKVLPKHSLLYEYFTVYNELTKVKYVTEGMRKPAFLSGEQKKAIVDLLFKTNRKVTVKQLKEDYFKKIECFDSVEISGVEDRFNASLGTYHDLLKIIKDKDFLDNEENEDILEDIVLTLTLFEDREMIEERLKTYAHLFDDKVMKQLKRRRYTGWGRLSRKLINGIRDKQSGKTILDFLKSDGFANRNFMQLIHDDSLTFKEDIQKAQVSGQGDSLHEHIANLAGSPAIKKGILQTVKVVDELVKVMGRHKPENIVIEMARENQTTQKGQKNSRERMKRIEEGIKELGSQILKEHPVENTQLQNEKLYLYYLQNGRDMYVDQELDINRLSDYDVDHIVPQSFLKDDSIDNKVLTRSDKARGKSDNVPSEEVVKKMKNYWRQLLNAKLITQRKFDNLTKAERGGLSELDKAGFIKRQLVETRQITKHVAQILDSRMNTKYDENDKLIREVKVITLKSKLVSDFRKDFQFYKVREINNYHHAHDAYLNAVVGTALIKKYPKLESEFVYGDYKVYDVRKMIAKSEQEIGKATAKYFFYSNIMNFFKTEITLANGEIRKRPLIETNGETGEIVWDKGRDFATVRKVLSMPQVNIVKKTEVQTGGFSKESILPKRNSDKLIARKKDWDPKKYGGFDSPTVAYSVLVVAKVEKGKSKKLKSVKELLGITIMERSSFEKNPIDFLEAKGYKEVKKDLIIKLPKYSLFELENGRKRMLASAGELQKGNELALPSKYVNFLYLASHYEKLKGSPEDNEQKQLFVEQHKHYLDEIIEQISEFSKRVILADANLDKVLSAYNKHRDKPIREQAENIIHLFTLTNLGAPAAFKYFDTTIDRKRYTSTKEVLDATLIHQSITGLYETRIDLSQLGGDGGPAPGGGGGTLNIEDEYRLHETSKEPDVSLGSTWLSDFPQAWAETGGMGLAVRQAPLIIPLKATSTPVSIKQYPMSQEARLGIKPHIQRLLDQGILVPCQSPWNTPLLPVKKPGTNDYRPVQDLREVNKRVEDIHPTVPNPYNLLSGLPPSHQWYTVLDLKDAFFCLRLHPTSQPLFAFEWRDPEMGISGQLTWTRLPQGFKNSPTLFNEALHRDLAGFRIQHPDLILLQYVDDLLLAATSELDCQQGTRALLQTLGDLGYRASAKKAQICQKQVKYLGYLLKEGQRWLTEARKETVMGQPIPKTPRQLREFLGKAGFCRLFIPGFAEMAAPLYPLTKPGTLFNWGPDQQKAFQEIKQALLTAPALGLPDLTKPFELFVDEKQGYAKGVLTQKLGPWRRPVAYLSKKLDPVAAGWPPCLRMVAAIAVLTKDAGKLTMGQPLVILAPHAVEALVKQPPDRWLSNARMTHYQALLLDTDRVQFGPVVALNPATLLPLPEEGLQHDCLDILAEAHGTRSDLMDQPLPDADHTWYTDGSSFLQEGQRKAGAAVTTETEVIWARALPAGTSAQRAELIALTQALKMAEGKKLNVYTDSRYAFATAHIHGEIYRRRGWLTSEGKEIKNKDEILALLKALFLPKRLSIIHCPGHQKGNSAEARGNRMADQAAREVATRETPETSTLLAGKRTADGSEFEKRTADGSEFESPKKKAKVE

SEQ ID NO: 2396 - protein, 2097 aa, synthetic construct
MPAAKRVKLDGGDKKYSIGLDIGTNSVGWAVITDEYKVPSKKFKVLGNTDRHSIKKNLIGALLFDSGETAEATRLKRTARRRYTRRKNRICYLQEIFSNEMAKVDDSFFHRLEESFLVEEDKKHERHPIFGNIVDEVAYHEKYPTIYHLRKKLVDSTDKADLRLIYLALAHMIKFRGHFLIEGDLNPDNSDVDKLFIQLVQTYNQLFEENPINASGVDAKAILSARLSKSRRLENLIAQLPGEKKNGLFGNLIALSLGLTPNFKSNFDLAEDAKLQLSKDTYDDDLDNLLAQIGDQYADLFLAAKNLSDAILLSDILRVNTEITKAPLSASMIKRYDEHHQDLTLLKALVRQQLPEKYKEIFFDQSKNGYAGYIDGGASQEEFYKFIKPILEKMDGTEELLVKLNREDLLRKQRTFDNGSIPHQIHLGELHAILRRQEDFYPFLKDNREKIEKILTFRIPYYVGPLARGNSRFAWMTRKSEETITPWNFEEVVDKGASAQSFIERMTNFDKNLPNEKVLPKHSLLYEYFTVYNELTKVKYVTEGMRKPAFLSGEQKKAIVDLLFKTNRKVTVKQLKEDYFKKIECFDSVEISGVEDRFNASLGTYHDLLKIIKDKDFLDNEENEDILEDIVLTLTLFEDREMIEERLKTYAHLFDDKVMKQLKRRRYTGWGRLSRKLINGIRDKQSGKTILDFLKSDGFANRNFMQLIHDDSLTFKEDIQKAQVSGQGDSLHEHIANLAGSPAIKKGILQTVKVVDELVKVMGRHKPENIVIEMARENQTTQKGQKNSRERMKRIEEGIKELGSQILKEHPVENTQLQNEKLYLYYLQNGRDMYVDQELDINRLSDYDVDHIVPQSFLKDDSIDNKVLTRSDKARGKSDNVPSEEVVKKMKNYWRQLLNAKLITQRKFDNLTKAERGGLSELDKAGFIKRQLVETRQITKHVAQILDSRMNTKYDENDKLIREVKVITLKSKLVSDFRKDFQFYKVREINNYHHAHDAYLNAVVGTALIKKYPKLESEFVYGDYKVYDVRKMIAKSEQEIGKATAKYFFYSNIMNFFKTEITLANGEIRKRPLIETNGETGEIVWDKGRDFATVRKVLSMPQVNIVKKTEVQTGGFSKESILPKRNSDKLIARKKDWDPKKYGGFDSPTVAYSVLVVAKVEKGKSKKLKSVKELLGITIMERSSFEKNPIDFLEAKGYKEVKKDLIIKLPKYSLFELENGRKRMLASAGELQKGNELALPSKYVNFLYLASHYEKLKGSPEDNEQKQLFVEQHKHYLDEIIEQISEFSKRVILADANLDKVLSAYNKHRDKPIREQAENIIHLFTLTNLGAPAAFKYFDTTIDRKRYTSTKEVLDATLIHQSITGLYETRIDLSQLGGDGGGSSGSSGSSGSSGGTLNIEDEYRLHETSKEPDVSLGSTWLSDFPQAWAETGGMGLAVRQAPLIIPLKATSTPVSIKQYPMSQEARLGIKPHIQRLLDQGILVPCQSPWNTPLLPVKKPGTNDYRPVQDLREVNKRVEDIHPTVPNPYNLLSGLPPSHQWYTVLDLKDAFFCLRLHPTSQPLFAFEWRDPEMGISGQLTWTRLPQGFKNSPTLFNEALHRDLAGFRIQHPDLILLQYVDDLLLAATSELDCQQGTRALLQTLGDLGYRASAKKAQICQKQVKYLGYLLKEGQRWLTEARKETVMGQPIPKTPRQLREFLGKAGFCRLFIPGFAEMAAPLYPLTKPGTLFNWGPDQQKAFQEIKQALLTAPALGLPDLTKPFELFVDEKQGYAKGVLTQKLGPWRRPVAYLSKKLDPVAAGWPPCLRMVAAIAVLTKDAGKLTMGQPLVILAPHAVEALVKQPPDRWLSNARMTHYQALLLDTDRVQFGPVVALNPATLLPLPEEGLQHDCLDILAEAHGTRSDLMDQPLPDADHTWYTDGSSFLQEGQRKAGAAVTTETEVIWARALPAGTSAQRAELIALTQALKMAEGKKLNVYTDSRYAFATAHIHGEIYRRRGWLTSEGKEIKNKDEILALLKALFLPKRLSIIHCPGHQKGNSAEARGNRMADQAAREVATRETPETSTLLAGKRTADGSEFEKRTADGSEFESPKKKAKVE

SEQ ID NO: 2397 - protein, 2091 aa, synthetic construct
MPAAKRVKLDGGDKKYSIGLDIGTNSVGWAVITDEYKVPSKKFKVLGNTDRHSIKKNLIGALLFDSGETAEATRLKRTARRRYTRRKNRICYLQEIFSNEMAKVDDSFFHRLEESFLVEEDKKHERHPIFGNIVDEVAYHEKYPTIYHLRKKLVDSTDKADLRLIYLALAHMIKFRGHFLIEGDLNPDNSDVDKLFIQLVQTYNQLFEENPINASGVDAKAILSARLSKSRRLENLIAQLPGEKKNGLFGNLIALSLGLTPNFKSNFDLAEDAKLQLSKDTYDDDLDNLLAQIGDQYADLFLAAKNLSDAILLSDILRVNTEITKAPLSASMIKRYDEHHQDLTLLKALVRQQLPEKYKEIFFDQSKNGYAGYIDGGASQEEFYKFIKPILEKMDGTEELLVKLNREDLLRKQRTFDNGSIPHQIHLGELHAILRRQEDFYPFLKDNREKIEKILTFRIPYYVGPLARGNSRFAWMTRKSEETITPWNFEEVVDKGASAQSFIERMTNFDKNLPNEKVLPKHSLLYEYFTVYNELTKVKYVTEGMRKPAFLSGEQKKAIVDLLFKTNRKVTVKQLKEDYFKKIECFDSVEISGVEDRFNASLGTYHDLLKIIKDKDFLDNEENEDILEDIVLTLTLFEDREMIEERLKTYAHLFDDKVMKQLKRRRYTGWGRLSRKLINGIRDKQSGKTILDFLKSDGFANRNFMQLIHDDSLTFKEDIQKAQVSGQGDSLHEHIANLAGSPAIKKGILQTVKVVDELVKVMGRHKPENIVIEMARENQTTQKGQKNSRERMKRIEEGIKELGSQILKEHPVENTQLQNEKLYLYYLQNGRDMYVDQELDINRLSDYDVDHIVPQSFLKDDSIDNKVLTRSDKARGKSDNVPSEEVVKKMKNYWRQLLNAKLITQRKFDNLTKAERGGLSELDKAGFIKRQLVETRQITKHVAQILDSRMNTKYDENDKLIREVKVITLKSKLVSDFRKDFQFYKVREINNYHHAHDAYLNAVVGTALIKKYPKLESEFVYGDYKVYDVRKMIAKSEQEIGKATAKYFFYSNIMNFFKTEITLANGEIRKRPLIETNGETGEIVWDKGRDFATVRKVLSMPQVNIVKKTEVQTGGFSKESILPKRNSDKLIARKKDWDPKKYGGFDSPTVAYSVLVVAKVEKGKSKKLKSVKELLGITIMERSSFEKNPIDFLEAKGYKEVKKDLIIKLPKYSLFELENGRKRMLASAGELQKGNELALPSKYVNFLYLASHYEKLKGSPEDNEQKQLFVEQHKHYLDEIIEQISEFSKRVILADANLDKVLSAYNKHRDKPIREQAENIIHLFTLTNLGAPAAFKYFDTTIDRKRYTSTKEVLDATLIHQSITGLYETRIDLSQLGGDGGGGGGGSGGTLNIEDEYRLHETSKEPDVSLGSTWLSDFPQAWAETGGMGLAVRQAPLIIPLKATSTPVSIKQYPMSQEARLGIKPHIQRLLDQGILVPCQSPWNTPLLPVKKPGTNDYRPVQDLREVNKRVEDIHPTVPNPYNLLSGLPPSHQWYTVLDLKDAFFCLRLHPTSQPLFAFEWRDPEMGISGQLTWTRLPQGFKNSPTLFNEALHRDLAGFRIQHPDLILLQYVDDLLLAATSELDCQQGTRALLQTLGDLGYRASAKKAQICQKQVKYLGYLLKEGQRWLTEARKETVMGQPIPKTPRQLREFLGKAGFCRLFIPGFAEMAAPLYPLTKPGTLFNWGPDQQKAFQEIKQALLTAPALGLPDLTKPFELFVDEKQGYAKGVLTQKLGPWRRPVAYLSKKLDPVAAGWPPCLRMVAAIAVLTKDAGKLTMGQPLVILAPHAVEALVKQPPDRWLSNARMTHYQALLLDTDRVQFGPVVALNPATLLPLPEEGLQHDCLDILAEAHGTRSDLMDQPLPDADHTWYTDGSSFLQEGQRKAGAAVTTETEVIWARALPAGTSAQRAELIALTQALKMAEGKKLNVYTDSRYAFATAHIHGEIYRRRGWLTSEGKEIKNKDEILALLKALFLPKRLSIIHCPGHQKGNSAEARGNRMADQAAREVATRETPETSTLLAGKRTADGSEFEKRTADGSEFESPKKKAKVE

SEQ ID NO: 2398 - protein, 2091 aa, synthetic construct
MPAAKRVKLDGGDKKYSIGLDIGTNSVGWAVITDEYKVPSKKFKVLGNTDRHSIKKNLIGALLFDSGETAEATRLKRTARRRYTRRKNRICYLQEIFSNEMAKVDDSFFHRLEESFLVEEDKKHERHPIFGNIVDEVAYHEKYPTIYHLRKKLVDSTDKADLRLIYLALAHMIKFRGHFLIEGDLNPDNSDVDKLFIQLVQTYNQLFEENPINASGVDAKAILSARLSKSRRLENLIAQLPGEKKNGLFGNLIALSLGLTPNFKSNFDLAEDAKLQLSKDTYDDDLDNLLAQIGDQYADLFLAAKNLSDAILLSDILRVNTEITKAPLSASMIKRYDEHHQDLTLLKALVRQQLPEKYKEIFFDQSKNGYAGYIDGGASQEEFYKFIKPILEKMDGTEELLVKLNREDLLRKQRTFDNGSIPHQIHLGELHAILRRQEDFYPFLKDNREKIEKILTFRIPYYVGPLARGNSRFAWMTRKSEETITPWNFEEVVDKGASAQSFIERMTNFDKNLPNEKVLPKHSLLYEYFTVYNELTKVKYVTEGMRKPAFLSGEQKKAIVDLLFKTNRKVTVKQLKEDYFKKIECFDSVEISGVEDRFNASLGTYHDLLKIIKDKDFLDNEENEDILEDIVLTLTLFEDREMIEERLKTYAHLFDDKVMKQLKRRRYTGWGRLSRKLINGIRDKQSGKTILDFLKSDGFANRNFMQLIHDDSLTFKEDIQKAQVSGQGDSLHEHIANLAGSPAIKKGILQTVKVVDELVKVMGRHKPENIVIEMARENQTTQKGQKNSRERMKRIEEGIKELGSQILKEHPVENTQLQNEKLYLYYLQNGRDMYVDQELDINRLSDYDVDHIVPQSFLKDDSIDNKVLTRSDKARGKSDNVPSEEVVKKMKNYWRQLLNAKLITQRKFDNLTKAERGGLSELDKAGFIKRQLVETRQITKHVAQILDSRMNTKYDENDKLIREVKVITLKSKLVSDFRKDFQFYKVREINNYHHAHDAYLNAVVGTALIKKYPKLESEFVYGDYKVYDVRKMIAKSEQEIGKATAKYFFYSNIMNFFKTEITLANGEIRKRPLIETNGETGEIVWDKGRDFATVRKVLSMPQVNIVKKTEVQTGGFSKESILPKRNSDKLIARKKDWDPKKYGGFDSPTVAYSVLVVAKVEKGKSKKLKSVKELLGITIMERSSFEKNPIDFLEAKGYKEVKKDLIIKLPKYSLFELENGRKRMLASAGELQKGNELALPSKYVNFLYLASHYEKLKGSPEDNEQKQLFVEQHKHYLDEIIEQISEFSKRVILADANLDKVLSAYNKHRDKPIREQAENIIHLFTLTNLGAPAAFKYFDTTIDRKRYTSTKEVLDATLIHQSITGLYETRIDLSQLGGDGGGGSGGSGGTLNIEDEYRLHETSKEPDVSLGSTWLSDFPQAWAETGGMGLAVRQAPLIIPLKATSTPVSIKQYPMSQEARLGIKPHIQRLLDQGILVPCQSPWNTPLLPVKKPGTNDYRPVQDLREVNKRVEDIHPTVPNPYNLLSGLPPSHQWYTVLDLKDAFFCLRLHPTSQPLFAFEWRDPEMGISGQLTWTRLPQGFKNSPTLFNEALHRDLAGFRIQHPDLILLQYVDDLLLAATSELDCQQGTRALLQTLGDLGYRASAKKAQICQKQVKYLGYLLKEGQRWLTEARKETVMGQPIPKTPRQLREFLGKAGFCRLFIPGFAEMAAPLYPLTKPGTLFNWGPDQQKAFQEIKQALLTAPALGLPDLTKPFELFVDEKQGYAKGVLTQKLGPWRRPVAYLSKKLDPVAAGWPPCLRMVAAIAVLTKDAGKLTMGQPLVILAPHAVEALVKQPPDRWLSNARMTHYQALLLDTDRVQFGPVVALNPATLLPLPEEGLQHDCLDILAEAHGTRSDLMDQPLPDADHTWYTDGSSFLQEGQRKAGAAVTTETEVIWARALPAGTSAQRAELIALTQALKMAEGKKLNVYTDSRYAFATAHIHGEIYRRRGWLTSEGKEIKNKDEILALLKALFLPKRLSIIHCPGHQKGNSAEARGNRMADQAAREVATRETPETSTLLAGKRTADGSEFEKRTADGSEFESPKKKAKVE

SEQ ID NO: 2399 - protein, 2094 aa, synthetic construct
MPAAKRVKLDGGDKKYSIGLDIGTNSVGWAVITDEYKVPSKKFKVLGNTDRHSIKKNLIGALLFDSGETAEATRLKRTARRRYTRRKNRICYLQEIFSNEMAKVDDSFFHRLEESFLVEEDKKHERHPIFGNIVDEVAYHEKYPTIYHLRKKLVDSTDKADLRLIYLALAHMIKFRGHFLIEGDLNPDNSDVDKLFIQLVQTYNQLFEENPINASGVDAKAILSARLSKSRRLENLIAQLPGEKKNGLFGNLIALSLGLTPNFKSNFDLAEDAKLQLSKDTYDDDLDNLLAQIGDQYADLFLAAKNLSDAILLSDILRVNTEITKAPLSASMIKRYDEHHQDLTLLKALVRQQLPEKYKEIFFDQSKNGYAGYIDGGASQEEFYKFIKPILEKMDGTEELLVKLNREDLLRKQRTFDNGSIPHQIHLGELHAILRRQEDFYPFLKDNREKIEKILTFRIPYYVGPLARGNSRFAWMTRKSEETITPWNFEEVVDKGASAQSFIERMTNFDKNLPNEKVLPKHSLLYEYFTVYNELTKVKYVTEGMRKPAFLSGEQKKAIVDLLFKTNRKVTVKQLKEDYFKKIECFDSVEISGVEDRFNASLGTYHDLLKIIKDKDFLDNEENEDILEDIVLTLTLFEDREMIEERLKTYAHLFDDKVMKQLKRRRYTGWGRLSRKLINGIRDKQSGKTILDFLKSDGFANRNFMQLIHDDSLTFKEDIQKAQVSGQGDSLHEHIANLAGSPAIKKGILQTVKVVDELVKVMGRHKPENIVIEMARENQTTQKGQKNSRERMKRIEEGIKELGSQILKEHPVENTQLQNEKLYLYYLQNGRDMYVDQELDINRLSDYDVDHIVPQSFLKDDSIDNKVLTRSDKARGKSDNVPSEEVVKKMKNYWRQLLNAKLITQRKFDNLTKAERGGLSELDKAGFIKRQLVETRQITKHVAQILDSRMNTKYDENDKLIREVKVITLKSKLVSDFRKDFQFYKVREINNYHHAHDAYLNAVVGTALIKKYPKLESEFVYGDYKVYDVRKMIAKSEQEIGKATAKYFFYSNIMNFFKTEITLANGEIRKRPLIETNGETGEIVWDKGRDFATVRKVLSMPQVNIVKKTEVQTGGFSKESILPKRNSDKLIARKKDWDPKKYGGFDSPTVAYSVLVVAKVEKGKSKKLKSVKELLGITIMERSSFEKNPIDFLEAKGYKEVKKDLIIKLPKYSLFELENGRKRMLASAGELQKGNELALPSKYVNFLYLASHYEKLKGSPEDNEQKQLFVEQHKHYLDEIIEQISEFSKRVILADANLDKVLSAYNKHRDKPIREQAENIIHLFTLTNLGAPAAFKYFDTTIDRKRYTSTKEVLDATLIHQSITGLYETRIDLSQLGGDGGGSSGGSPAPGGTLNIEDEYRLHETSKEPDVSLGSTWLSDFPQAWAETGGMGLAVRQAPLIIPLKATSTPVSIKQYPMSQEARLGIKPHIQRLLDQGILVPCQSPWNTPLLPVKKPGTNDYRPVQDLREVNKRVEDIHPTVPNPYNLLSGLPPSHQWYTVLDLKDAFFCLRLHPTSQPLFAFEWRDPEMGISGQLTWTRLPQGFKNSPTLFNEALHRDLAGFRIQHPDLILLQYVDDLLLAATSELDCQQGTRALLQTLGDLGYRASAKKAQICQKQVKYLGYLLKEGQRWLTEARKETVMGQPIPKTPRQLREFLGKAGFCRLFIPGFAEMAAPLYPLTKPGTLFNWGPDQQKAFQEIKQALLTAPALGLPDLTKPFELFVDEKQGYAKGVLTQKLGPWRRPVAYLSKKLDPVAAGWPPCLRMVAAIAVLTKDAGKLTMGQPLVILAPHAVEALVKQPPDRWLSNARMTHYQALLLDTDRVQFGPVVALNPATLLPLPEEGLQHDCLDILAEAHGTRSDLMDQPLPDADHTWYTDGSSFLQEGQRKAGAAVTTETEVIWARALPAGTSAQRAELIALTQALKMAEGKKLNVYTDSRYAFATAHIHGEIYRRRGWLTSEGKEIKNKDEILALLKALFLPKRLSIIHCPGHQKGNSAEARGNRMADQAAREVATRETPETSTLLAGKRTADGSEFEKRTADGSEFESPKKKAKVE

SEQ ID NO: 2400 - protein, 2096 aa, synthetic construct
MPAAKRVKLDGGDKKYSIGLDIGTNSVGWAVITDEYKVPSKKFKVLGNTDRHSIKKNLIGALLFDSGETAEATRLKRTARRRYTRRKNRICYLQEIFSNEMAKVDDSFFHRLEESFLVEEDKKHERHPIFGNIVDEVAYHEKYPTIYHLRKKLVDSTDKADLRLIYLALAHMIKFRGHFLIEGDLNPDNSDVDKLFIQLVQTYNQLFEENPINASGVDAKAILSARLSKSRRLENLIAQLPGEKKNGLFGNLIALSLGLTPNFKSNFDLAEDAKLQLSKDTYDDDLDNLLAQIGDQYADLFLAAKNLSDAILLSDILRVNTEITKAPLSASMIKRYDEHHQDLTLLKALVRQQLPEKYKEIFFDQSKNGYAGYIDGGASQEEFYKFIKPILEKMDGTEELLVKLNREDLLRKQRTFDNGSIPHQIHLGELHAILRRQEDFYPFLKDNREKIEKILTFRIPYYVGPLARGNSRFAWMTRKSEETITPWNFEEVVDKGASAQSFIERMTNFDKNLPNEKVLPKHSLLYEYFTVYNELTKVKYVTEGMRKPAFLSGEQKKAIVDLLFKTNRKVTVKQLKEDYFKKIECFDSVEISGVEDRFNASLGTYHDLLKIIKDKDFLDNEENEDILEDIVLTLTLFEDREMIEERLKTYAHLFDDKVMKQLKRRRYTGWGRLSRKLINGIRDKQSGKTILDFLKSDGFANRNFMQLIHDDSLTFKEDIQKAQVSGQGDSLHEHIANLAGSPAIKKGILQTVKVVDELVKVMGRHKPENIVIEMARENQTTQKGQKNSRERMKRIEEGIKELGSQILKEHPVENTQLQNEKLYLYYLQNGRDMYVDQELDINRLSDYDVDHIVPQSFLKDDSIDNKVLTRSDKARGKSDNVPSEEVVKKMKNYWRQLLNAKLITQRKFDNLTKAERGGLSELDKAGFIKRQLVETRQITKHVAQILDSRMNTKYDENDKLIREVKVITLKSKLVSDFRKDFQFYKVREINNYHHAHDAYLNAVVGTALIKKYPKLESEFVYGDYKVYDVRKMIAKSEQEIGKATAKYFFYSNIMNFFKTEITLANGEIRKRPLIETNGETGEIVWDKGRDFATVRKVLSMPQVNIVKKTEVQTGGFSKESILPKRNSDKLIARKKDWDPKKYGGFDSPTVAYSVLVVAKVEKGKSKKLKSVKELLGITIMERSSFEKNPIDFLEAKGYKEVKKDLIIKLPKYSLFELENGRKRMLASAGELQKGNELALPSKYVNFLYLASHYEKLKGSPEDNEQKQLFVEQHKHYLDEIIEQISEFSKRVILADANLDKVLSAYNKHRDKPIREQAENIIHLFTLTNLGAPAAFKYFDTTIDRKRYTSTKEVLDATLIHQSITGLYETRIDLSQLGGDGGPAPEAAAKGGGGGTLNIEDEYRLHETSKEPDVSLGSTWLSDFPQAWAETGGMGLAVRQAPLIIPLKATSTPVSIKQYPMSQEARLGIKPHIQRLLDQGILVPCQSPWNTPLLPVKKPGTNDYRPVQDLREVNKRVEDIHPTVPNPYNLLSGLPPSHQWYTVLDLKDAFFCLRLHPTSQPLFAFEWRDPEMGISGQLTWTRLPQGFKNSPTLFNEALHRDLAGFRIQHPDLILLQYVDDLLLAATSELDCQQGTRALLQTLGDLGYRASAKKAQICQKQVKYLGYLLKEGQRWLTEARKETVMGQPIPKTPRQLREFLGKAGFCRLFIPGFAEMAAPLYPLTKPGTLFNWGPDQQKAFQEIKQALLTAPALGLPDLTKPFELFVDEKQGYAKGVLTQKLGPWRRPVAYLSKKLDPVAAGWPPCLRMVAAIAVLTKDAGKLTMGQPLVILAPHAVEALVKQPPDRWLSNARMTHYQALLLDTDRVQFGPVVALNPATLLPLPEEGLQHDCLDILAEAHGTRSDLMDQPLPDADHTWYTDGSSFLQEGQRKAGAAVTTETEVIWARALPAGTSAQRAELIALTQALKMAEGKKLNVYTDSRYAFATAHIHGEIYRRRGWLTSEGKEIKNKDEILALLKALFLPKRLSIIHCPGHQKGNSAEARGNRMADQAAREVATRETPETSTLLAGKRTADGSEFEKRTADGSEFESPKKKAKVE

SEQ ID NO: 2401 - protein, 2094 aa, synthetic construct
MPAAKRVKLDGGDKKYSIGLDIGTNSVGWAVITDEYKVPSKKFKVLGNTDRHSIKKNLIGALLFDSGETAEATRLKRTARRRYTRRKNRICYLQEIFSNEMAKVDDSFFHRLEESFLVEEDKKHERHPIFGNIVDEVAYHEKYPTIYHLRKKLVDSTDKADLRLIYLALAHMIKFRGHFLIEGDLNPDNSDVDKLFIQLVQTYNQLFEENPINASGVDAKAILSARLSKSRRLENLIAQLPGEKKNGLFGNLIALSLGLTPNFKSNFDLAEDAKLQLSKDTYDDDLDNLLAQIGDQYADLFLAAKNLSDAILLSDILRVNTEITKAPLSASMIKRYDEHHQDLTLLKALVRQQLPEKYKEIFFDQSKNGYAGYIDGGASQEEFYKFIKPILEKMDGTEELLVKLNREDLLRKQRTFDNGSIPHQIHLGELHAILRRQEDFYPFLKDNREKIEKILTFRIPYYVGPLARGNSRFAWMTRKSEETITPWNFEEVVDKGASAQSFIERMTNFDKNLPNEKVLPKHSLLYEYFTVYNELTKVKYVTEGMRKPAFLSGEQKKAIVDLLFKTNRKVTVKQLKEDYFKKIECFDSVEISGVEDRFNASLGTYHDLLKIIKDKDFLDNEENEDILEDIVLTLTLFEDREMIEERLKTYAHLFDDKVMKQLKRRRYTGWGRLSRKLINGIRDKQSGKTILDFLKSDGFANRNFMQLIHDDSLTFKEDIQKAQVSGQGDSLHEHIANLAGSPAIKKGILQTVKVVDELVKVMGRHKPENIVIEMARENQTTQKGQKNSRERMKRIEEGIKELGSQILKEHPVENTQLQNEKLYLYYLQNGRDMYVDQELDINRLSDYDVDHIVPQSFLKDDSIDNKVLTRSDKARGKSDNVPSEEVVKKMKNYWRQLLNAKLITQRKFDNLTKAERGGLSELDKAGFIKRQLVETRQITKHVAQILDSRMNTKYDENDKLIREVKVITLKSKLVSDFRKDFQFYKVREINNYHHAHDAYLNAVVGTALIKKYPKLESEFVYGDYKVYDVRKMIAKSEQEIGKATAKYFFYSNIMNFFKTEITLANGEIRKRPLIETNGETGEIVWDKGRDFATVRKVLSMPQVNIVKKTEVQTGGFSKESILPKRNSDKLIARKKDWDPKKYGGFDSPTVAYSVLVVAKVEKGKSKKLKSVKELLGITIMERSSFEKNPIDFLEAKGYKEVKKDLIIKLPKYSLFELENGRKRMLASAGELQKGNELALPSKYVNFLYLASHYEKLKGSPEDNEQKQLFVEQHKHYLDEIIEQISEFSKRVILADANLDKVLSAYNKHRDKPIREQAENIIHLFTLTNLGAPAAFKYFDTTIDRKRYTSTKEVLDATLIHQSITGLYETRIDLSQLGGDGGPAPGGGGGSGGTLNIEDEYRLHETSKEPDVSLGSTWLSDFPQAWAETGGMGLAVRQAPLIIPLKATSTPVSIKQYPMSQEARLGIKPHIQRLLDQGILVPCQSPWNTPLLPVKKPGTNDYRPVQDLREVNKRVEDIHPTVPNPYNLLSGLPPSHQWYTVLDLKDAFFCLRLHPTSQPLFAFEWRDPEMGISGQLTWTRLPQGFKNSPTLFNEALHRDLAGFRIQHPDLILLQYVDDLLLAATSELDCQQGTRALLQTLGDLGYRASAKKAQICQKQVKYLGYLLKEGQRWLTEARKETVMGQPIPKTPRQLREFLGKAGFCRLFIPGFAEMAAPLYPLTKPGTLFNWGPDQQKAFQEIKQALLTAPALGLPDLTKPFELFVDEKQGYAKGVLTQKLGPWRRPVAYLSKKLDPVAAGWPPCLRMVAAIAVLTKDAGKLTMGQPLVILAPHAVEALVKQPPDRWLSNARMTHYQALLLDTDRVQFGPVVALNPATLLPLPEEGLQHDCLDILAEAHGTRSDLMDQPLPDADHTWYTDGSSFLQEGQRKAGAAVTTETEVIWARALPAGTSAQRAELIALTQALKMAEGKKLNVYTDSRYAFATAHIHGEIYRRRGWLTSEGKEIKNKDEILALLKALFLPKRLSIIHCPGHQKGNSAEARGNRMADQAAREVATRETPETSTLLAGKRTADGSEFEKRTADGSEFESPKKKAKVE

SEQ ID NO: 2402 - protein, 2094 aa, synthetic construct
MPAAKRVKLDGGDKKYSIGLDIGTNSVGWAVITDEYKVPSKKFKVLGNTDRHSIKKNLIGALLFDSGETAEATRLKRTARRRYTRRKNRICYLQEIFSNEMAKVDDSFFHRLEESFLVEEDKKHERHPIFGNIVDEVAYHEKYPTIYHLRKKLVDSTDKADLRLIYLALAHMIKFRGHFLIEGDLNPDNSDVDKLFIQLVQTYNQLFEENPINASGVDAKAILSARLSKSRRLENLIAQLPGEKKNGLFGNLIALSLGLTPNFKSNFDLAEDAKLQLSKDTYDDDLDNLLAQIGDQYADLFLAAKNLSDAILLSDILRVNTEITKAPLSASMIKRYDEHHQDLTLLKALVRQQLPEKYKEIFFDQSKNGYAGYIDGGASQEEFYKFIKPILEKMDGTEELLVKLNREDLLRKQRTFDNGSIPHQIHLGELHAILRRQEDFYPFLKDNREKIEKILTFRIPYYVGPLARGNSRFAWMTRKSEETITPWNFEEVVDKGASAQSFIERMTNFDKNLPNEKVLPKHSLLYEYFTVYNELTKVKYVTEGMRKPAFLSGEQKKAIVDLLFKTNRKVTVKQLKEDYFKKIECFDSVEISGVEDRFNASLGTYHDLLKIIKDKDFLDNEENEDILEDIVLTLTLFEDREMIEERLKTYAHLFDDKVMKQLKRRRYTGWGRLSRKLINGIRDKQSGKTILDFLKSDGFANRNFMQLIHDDSLTFKEDIQKAQVSGQGDSLHEHIANLAGSPAIKKGILQTVKVVDELVKVMGRHKPENIVIEMARENQTTQKGQKNSRERMKRIEEGIKELGSQILKEHPVENTQLQNEKLYLYYLQNGRDMYVDQELDINRLSDYDVDHIVPQSFLKDDSIDNKVLTRSDKARGKSDNVPSEEVVKKMKNYWRQLLNAKLITQRKFDNLTKAERGGLSELDKAGFIKRQLVETRQITKHVAQILDSRMNTKYDENDKLIREVKVITLKSKLVSDFRKDFQFYKVREINNYHHAHDAYLNAVVGTALIKKYPKLESEFVYGDYKVYDVRKMIAKSEQEIGKATAKYFFYSNIMNFFKTEITLANGEIRKRPLIETNGETGEIVWDKGRDFATVRKVLSMPQVNIVKKTEVQTGGFSKESILPKRNSDKLIARKKDWDPKKYGGFDSPTVAYSVLVVAKVEKGKSKKLKSVKELLGITIMERSSFEKNPIDFLEAKGYKEVKKDLIIKLPKYSLFELENGRKRMLASAGELQKGNELALPSKYVNFLYLASHYEKLKGSPEDNEQKQLFVEQHKHYLDEIIEQISEFSKRVILADANLDKVLSAYNKHRDKPIREQAENIIHLFTLTNLGAPAAFKYFDTTIDRKRYTSTKEVLDATLIHQSITGLYETRIDLSQLGGDGGGSSGGGPAPGGTLNIEDEYRLHETSKEPDVSLGSTWLSDFPQAWAETGGMGLAVRQAPLIIPLKATSTPVSIKQYPMSQEARLGIKPHIQRLLDQGILVPCQSPWNTPLLPVKKPGTNDYRPVQDLREVNKRVEDIHPTVPNPYNLLSGLPPSHQWYTVLDLKDAFFCLRLHPTSQPLFAFEWRDPEMGISGQLTWTRLPQGFKNSPTLFNEALHRDLAGFRIQHPDLILLQYVDDLLLAATSELDCQQGTRALLQTLGDLGYRASAKKAQICQKQVKYLGYLLKEGQRWLTEARKETVMGQPIPKTPRQLREFLGKAGFCRLFIPGFAEMAAPLYPLTKPGTLFNWGPDQQKAFQEIKQALLTAPALGLPDLTKPFELFVDEKQGYAKGVLTQKLGPWRRPVAYLSKKLDPVAAGWPPCLRMVAAIAVLTKDAGKLTMGQPLVILAPHAVEALVKQPPDRWLSNARMTHYQALLLDTDRVQFGPVVALNPATLLPLPEEGLQHDCLDILAEAHGTRSDLMDQPLPDADHTWYTDGSSFLQEGQRKAGAAVTTETEVIWARALPAGTSAQRAELIALTQALKMAEGKKLNVYTDSRYAFATAHIHGEIYRRRGWLTSEGKEIKNKDEILALLKALFLPKRLSIIHCPGHQKGNSAEARGNRMADQAAREVATRETPETSTLLAGKRTADGSEFEKRTADGSEFESPKKKAKVE

SEQ ID NO: 2403 - protein, 2094 aa, synthetic construct
MPAAKRVKLDGGDKKYSIGLDIGTNSVGWAVITDEYKVPSKKFKVLGNTDRHSIKKNLIGALLFDSGETAEATRLKRTARRRYTRRKNRICYLQEIFSNEMAKVDDSFFHRLEESFLVEEDKKHERHPIFGNIVDEVAYHEKYPTIYHLRKKLVDSTDKADLRLIYLALAHMIKFRGHFLIEGDLNPDNSDVDKLFIQLVQTYNQLFEENPINASGVDAKAILSARLSKSRRLENLIAQLPGEKKNGLFGNLIALSLGLTPNFKSNFDLAEDAKLQLSKDTYDDDLDNLLAQIGDQYADLFLAAKNLSDAILLSDILRVNTEITKAPLSASMIKRYDEHHQDLTLLKALVRQQLPEKYKEIFFDQSKNGYAGYIDGGASQEEFYKFIKPILEKMDGTEELLVKLNREDLLRKQRTFDNGSIPHQIHLGELHAILRRQEDFYPFLKDNREKIEKILTFRIPYYVGPLARGNSRFAWMTRKSEETITPWNFEEVVDKGASAQSFIERMTNFDKNLPNEKVLPKHSLLYEYFTVYNELTKVKYVTEGMRKPAFLSGEQKKAIVDLLFKTNRKVTVKQLKEDYFKKIECFDSVEISGVEDRFNASLGTYHDLLKIIKDKDFLDNEENEDILEDIVLTLTLFEDREMIEERLKTYAHLFDDKVMKQLKRRRYTGWGRLSRKLINGIRDKQSGKTILDFLKSDGFANRNFMQLIHDDSLTFKEDIQKAQVSGQGDSLHEHIANLAGSPAIKKGILQTVKVVDELVKVMGRHKPENIVIEMARENQTTQKGQKNSRERMKRIEEGIKELGSQILKEHPVENTQLQNEKLYLYYLQNGRDMYVDQELDINRLSDYDVDHIVPQSFLKDDSIDNKVLTRSDKARGKSDNVPSEEVVKKMKNYWRQLLNAKLITQRKFDNLTKAERGGLSELDKAGFIKRQLVETRQITKHVAQILDSRMNTKYDENDKLIREVKVITLKSKLVSDFRKDFQFYKVREINNYHHAHDAYLNAVVGTALIKKYPKLESEFVYGDYKVYDVRKMIAKSEQEIGKATAKYFFYSNIMNFFKTEITLANGEIRKRPLIETNGETGEIVWDKGRDFATVRKVLSMPQVNIVKKTEVQTGGFSKESILPKRNSDKLIARKKDWDPKKYGGFDSPTVAYSVLVVAKVEKGKSKKLKSVKELLGITIMERSSFEKNPIDFLEAKGYKEVKKDLIIKLPKYSLFELENGRKRMLASAGELQKGNELALPSKYVNFLYLASHYEKLKGSPEDNEQKQLFVEQHKHYLDEIIEQISEFSKRVILADANLDKVLSAYNKHRDKPIREQAENIIHLFTLTNLGAPAAFKYFDTTIDRKRYTSTKEVLDATLIHQSITGLYETRIDLSQLGGDGGPAPGGSGGGGGTLNIEDEYRLHETSKEPDVSLGSTWLSDFPQAWAETGGMGLAVRQAPLIIPLKATSTPVSIKQYPMSQEARLGIKPHIQRLLDQGILVPCQSPWNTPLLPVKKPGTNDYRPVQDLREVNKRVEDIHPTVPNPYNLLSGLPPSHQWYTVLDLKDAFFCLRLHPTSQPLFAFEWRDPEMGISGQLTWTRLPQGFKNSPTLFNEALHRDLAGFRIQHPDLILLQYVDDLLLAATSELDCQQGTRALLQTLGDLGYRASAKKAQICQKQVKYLGYLLKEGQRWLTEARKETVMGQPIPKTPRQLREFLGKAGFCRLFIPGFAEMAAPLYPLTKPGTLFNWGPDQQKAFQEIKQALLTAPALGLPDLTKPFELFVDEKQGYAKGVLTQKLGPWRRPVAYLSKKLDPVAAGWPPCLRMVAAIAVLTKDAGKLTMGQPLVILAPHAVEALVKQPPDRWLSNARMTHYQALLLDTDRVQFGPVVALNPATLLPLPEEGLQHDCLDILAEAHGTRSDLMDQPLPDADHTWYTDGSSFLQEGQRKAGAAVTTETEVIWARALPAGTSAQRAELIALTQALKMAEGKKLNVYTDSRYAFATAHIHGEIYRRRGWLTSEGKEIKNKDEILALLKALFLPKRLSIIHCPGHQKGNSAEARGNRMADQAAREVATRETPETSTLLAGKRTADGSEFEKRTADGSEFESPKKKAKVE

SEQ ID NO: 2404 - protein, 2096 aa, synthetic construct
MPAAKRVKLDGGDKKYSIGLDIGTNSVGWAVITDEYKVPSKKFKVLGNTDRHSIKKNLIGALLFDSGETAEATRLKRTARRRYTRRKNRICYLQEIFSNEMAKVDDSFFHRLEESFLVEEDKKHERHPIFGNIVDEVAYHEKYPTIYHLRKKLVDSTDKADLRLIYLALAHMIKFRGHFLIEGDLNPDNSDVDKLFIQLVQTYNQLFEENPINASGVDAKAILSARLSKSRRLENLIAQLPGEKKNGLFGNLIALSLGLTPNFKSNFDLAEDAKLQLSKDTYDDDLDNLLAQIGDQYADLFLAAKNLSDAILLSDILRVNTEITKAPLSASMIKRYDEHHQDLTLLKALVRQQLPEKYKEIFFDQSKNGYAGYIDGGASQEEFYKFIKPILEKMDGTEELLVKLNREDLLRKQRTFDNGSIPHQIHLGELHAILRRQEDFYPFLKDNREKIEKILTFRIPYYVGPLARGNSRFAWMTRKSEETITPWNFEEVVDKGASAQSFIERMTNFDKNLPNEKVLPKHSLLYEYFTVYNELTKVKYVTEGMRKPAFLSGEQKKAIVDLLFKTNRKVTVKQLKEDYFKKIECFDSVEISGVEDRFNASLGTYHDLLKIIKDKDFLDNEENEDILEDIVLTLTLFEDREMIEERLKTYAHLFDDKVMKQLKRRRYTGWGRLSRKLINGIRDKQSGKTILDFLKSDGFANRNFMQLIHDDSLTFKEDIQKAQVSGQGDSLHEHIANLAGSPAIKKGILQTVKVVDELVKVMGRHKPENIVIEMARENQTTQKGQKNSRERMKRIEEGIKELGSQILKEHPVENTQLQNEKLYLYYLQNGRDMYVDQELDINRLSDYDVDHIVPQSFLKDDSIDNKVLTRSDKARGKSDNVPSEEVVKKMKNYWRQLLNAKLITQRKFDNLTKAERGGLSELDKAGFIKRQLVETRQITKHVAQILDSRMNTKYDENDKLIREVKVITLKSKLVSDFRKDFQFYKVREINNYHHAHDAYLNAVVGTALIKKYPKLESEFVYGDYKVYDVRKMIAKSEQEIGKATAKYFFYSNIMNFFKTEITLANGEIRKRPLIETNGETGEIVWDKGRDFATVRKVLSMPQVNIVKKTEVQTGGFSKESILPKRNSDKLIARKKDWDPKKYGGFDSPTVAYSVLVVAKVEKGKSKKLKSVKELLGITIMERSSFEKNPIDFLEAKGYKEVKKDLIIKLPKYSLFELENGRKRMLASAGELQKGNELALPSKYVNFLYLASHYEKLKGSPEDNEQKQLFVEQHKHYLDEIIEQISEFSKRVILADANLDKVLSAYNKHRDKPIREQAENIIHLFTLTNLGAPAAFKYFDTTIDRKRYTSTKEVLDATLIHQSITGLYETRIDLSQLGGDGGGGSGSSEAAAKGGTLNIEDEYRLHETSKEPDVSLGSTWLSDFPQAWAETGGMGLAVRQAPLIIPLKATSTPVSIKQYPMSQEARLGIKPHIQRLLDQGILVPCQSPWNTPLLPVKKPGTNDYRPVQDLREVNKRVEDIHPTVPNPYNLLSGLPPSHQWYTVLDLKDAFFCLRLHPTSQPLFAFEWRDPEMGISGQLTWTRLPQGFKNSPTLFNEALHRDLAGFRIQHPDLILLQYVDDLLLAATSELDCQQGTRALLQTLGDLGYRASAKKAQICQKQVKYLGYLLKEGQRWLTEARKETVMGQPIPKTPRQLREFLGKAGFCRLFIPGFAEMAAPLYPLTKPGTLFNWGPDQQKAFQEIKQALLTAPALGLPDLTKPFELFVDEKQGYAKGVLTQKLGPWRRPVAYLSKKLDPVAAGWPPCLRMVAAIAVLTKDAGKLTMGQPLVILAPHAVEALVKQPPDRWLSNARMTHYQALLLDTDRVQFGPVVALNPATLLPLPEEGLQHDCLDILAEAHGTRSDLMDQPLPDADHTWYTDGSSFLQEGQRKAGAAVTTETEVIWARALPAGTSAQRAELIALTQALKMAEGKKLNVYTDSRYAFATAHIHGEIYRRRGWLTSEGKEIKNKDEILALLKALFLPKRLSIIHCPGHQKGNSAEARGNRMADQAAREVATRETPETSTLLAGKRTADGSEFEKRTADGSEFESPKKKAKVE

SEQ ID NO: 2405 - protein, 2100 aa, synthetic construct
MPAAKRVKLDGGDKKYSIGLDIGTNSVGWAVITDEYKVPSKKFKVLGNTDRHSIKKNLIGALLFDSGETAEATRLKRTARRRYTRRKNRICYLQEIFSNEMAKVDDSFFHRLEESFLVEEDKKHERHPIFGNIVDEVAYHEKYPTIYHLRKKLVDSTDKADLRLIYLALAHMIKFRGHFLIEGDLNPDNSDVDKLFIQLVQTYNQLFEENPINASGVDAKAILSARLSKSRRLENLIAQLPGEKKNGLFGNLIALSLGLTPNFKSNFDLAEDAKLQLSKDTYDDDLDNLLAQIGDQYADLFLAAKNLSDAILLSDILRVNTEITKAPLSASMIKRYDEHHQDLTLLKALVRQQLPEKYKEIFFDQSKNGYAGYIDGGASQEEFYKFIKPILEKMDGTEELLVKLNREDLLRKQRTFDNGSIPHQIHLGELHAILRRQEDFYPFLKDNREKIEKILTFRIPYYVGPLARGNSRFAWMTRKSEETITPWNFEEVVDKGASAQSFIERMTNFDKNLPNEKVLPKHSLLYEYFTVYNELTKVKYVTEGMRKPAFLSGEQKKAIVDLLFKTNRKVTVKQLKEDYFKKIECFDSVEISGVEDRFNASLGTYHDLLKIIKDKDFLDNEENEDILEDIVLTLTLFEDREMIEERLKTYAHLFDDKVMKQLKRRRYTGWGRLSRKLINGIRDKQSGKTILDFLKSDGFANRNFMQLIHDDSLTFKEDIQKAQVSGQGDSLHEHIANLAGSPAIKKGILQTVKVVDELVKVMGRHKPENIVIEMARENQTTQKGQKNSRERMKRIEEGIKELGSQILKEHPVENTQLQNEKLYLYYLQNGRDMYVDQELDINRLSDYDVDHIVPQSFLKDDSIDNKVLTRSDKARGKSDNVPSEEVVKKMKNYWRQLLNAKLITQRKFDNLTKAERGGLSELDKAGFIKRQLVETRQITKHVAQILDSRMNTKYDENDKLIREVKVITLKSKLVSDFRKDFQFYKVREINNYHHAHDAYLNAVVGTALIKKYPKLESEFVYGDYKVYDVRKMIAKSEQEIGKATAKYFFYSNIMNFFKTEITLANGEIRKRPLIETNGETGEIVWDKGRDFATVRKVLSMPQVNIVKKTEVQTGGFSKESILPKRNSDKLIARKKDWDPKKYGGFDSPTVAYSVLVVAKVEKGKSKKLKSVKELLGITIMERSSFEKNPIDFLEAKGYKEVKKDLIIKLPKYSLFELENGRKRMLASAGELQKGNELALPSKYVNFLYLASHYEKLKGSPEDNEQKQLFVEQHKHYLDEIIEQISEFSKRVILADANLDKVLSAYNKHRDKPIREQAENIIHLFTLTNLGAPAAFKYFDTTIDRKRYTSTKEVLDATLIHQSITGLYETRIDLSQLGGDGGGSSGSSGSSGSSGSSGGTLNIEDEYRLHETSKEPDVSLGSTWLSDFPQAWAETGGMGLAVRQAPLIIPLKATSTPVSIKQYPMSQEARLGIKPHIQRLLDQGILVPCQSPWNTPLLPVKKPGTNDYRPVQDLREVNKRVEDIHPTVPNPYNLLSGLPPSHQWYTVLDLKDAFFCLRLHPTSQPLFAFEWRDPEMGISGQLTWTRLPQGFKNSPTLFNEALHRDLAGFRIQHPDLILLQYVDDLLLAATSELDCQQGTRALLQTLGDLGYRASAKKAQICQKQVKYLGYLLKEGQRWLTEARKETVMGQPIPKTPRQLREFLGKAGFCRLFIPGFAEMAAPLYPLTKPGTLFNWGPDQQKAFQEIKQALLTAPALGLPDLTKPFELFVDEKQGYAKGVLTQKLGPWRRPVAYLSKKLDPVAAGWPPCLRMVAAIAVLTKDAGKLTMGQPLVILAPHAVEALVKQPPDRWLSNARMTHYQALLLDTDRVQFGPVVALNPATLLPLPEEGLQHDCLDILAEAHGTRSDLMDQPLPDADHTWYTDGSSFLQEGQRKAGAAVTTETEVIWARALPAGTSAQRAELIALTQALKMAEGKKLNVYTDSRYAFATAHIHGEIYRRRGWLTSEGKEIKNKDEILALLKALFLPKRLSIIHCPGHQKGNSAEARGNRMADQAAREVATRETPETSTLLAGKRTADGSEFEKRTADGSEFESPKKKAKVE

SEQ ID NO: 2406 - protein, 2091 aa, synthetic construct
MPAAKRVKLDGGDKKYSIGLDIGTNSVGWAVITDEYKVPSKKFKVLGNTDRHSIKKNLIGALLFDSGETAEATRLKRTARRRYTRRKNRICYLQEIFSNEMAKVDDSFFHRLEESFLVEEDKKHERHPIFGNIVDEVAYHEKYPTIYHLRKKLVDSTDKADLRLIYLALAHMIKFRGHFLIEGDLNPDNSDVDKLFIQLVQTYNQLFEENPINASGVDAKAILSARLSKSRRLENLIAQLPGEKKNGLFGNLIALSLGLTPNFKSNFDLAEDAKLQLSKDTYDDDLDNLLAQIGDQYADLFLAAKNLSDAILLSDILRVNTEITKAPLSASMIKRYDEHHQDLTLLKALVRQQLPEKYKEIFFDQSKNGYAGYIDGGASQEEFYKFIKPILEKMDGTEELLVKLNREDLLRKQRTFDNGSIPHQIHLGELHAILRRQEDFYPFLKDNREKIEKILTFRIPYYVGPLARGNSRFAWMTRKSEETITPWNFEEVVDKGASAQSFIERMTNFDKNLPNEKVLPKHSLLYEYFTVYNELTKVKYVTEGMRKPAFLSGEQKKAIVDLLFKTNRKVTVKQLKEDYFKKIECFDSVEISGVEDRFNASLGTYHDLLKIIKDKDFLDNEENEDILEDIVLTLTLFEDREMIEERLKTYAHLFDDKVMKQLKRRRYTGWGRLSRKLINGIRDKQSGKTILDFLKSDGFANRNFMQLIHDDSLTFKEDIQKAQVSGQGDSLHEHIANLAGSPAIKKGILQTVKVVDELVKVMGRHKPENIVIEMARENQTTQKGQKNSRERMKRIEEGIKELGSQILKEHPVENTQLQNEKLYLYYLQNGRDMYVDQELDINRLSDYDVDHIVPQSFLKDDSIDNKVLTRSDKARGKSDNVPSEEVVKKMKNYWRQLLNAKLITQRKFDNLTKAERGGLSELDKAGFIKRQLVETRQITKHVAQILDSRMNTKYDENDKLIREVKVITLKSKLVSDFRKDFQFYKVREINNYHHAHDAYLNAVVGTALIKKYPKLESEFVYGDYKVYDVRKMIAKSEQEIGKATAKYFFYSNIMNFFKTEITLANGEIRKRPLIETNGETGEIVWDKGRDFATVRKVLSMPQVNIVKKTEVQTGGFSKESILPKRNSDKLIARKKDWDPKKYGGFDSPTVAYSVLVVAKVEKGKSKKLKSVKELLGITIMERSSFEKNPIDFLEAKGYKEVKKDLIIKLPKYSLFELENGRKRMLASAGELQKGNELALPSKYVNFLYLASHYEKLKGSPEDNEQKQLFVEQHKHYLDEIIEQISEFSKRVILADANLDKVLSAYNKHRDKPIREQAENIIHLFTLTNLGAPAAFKYFDTTIDRKRYTSTKEVLDATLIHQSITGLYETRIDLSQLGGDGGGSSGGSGGTLNIEDEYRLHETSKEPDVSLGSTWLSDFPQAWAETGGMGLAVRQAPLIIPLKATSTPVSIKQYPMSQEARLGIKPHIQRLLDQGILVPCQSPWNTPLLPVKKPGTNDYRPVQDLREVNKRVEDIHPTVPNPYNLLSGLPPSHQWYTVLDLKDAFFCLRLHPTSQPLFAFEWRDPEMGISGQLTWTRLPQGFKNSPTLFNEALHRDLAGFRIQHPDLILLQYVDDLLLAATSELDCQQGTRALLQTLGDLGYRASAKKAQICQKQVKYLGYLLKEGQRWLTEARKETVMGQPIPKTPRQLREFLGKAGFCRLFIPGFAEMAAPLYPLTKPGTLFNWGPDQQKAFQEIKQALLTAPALGLPDLTKPFELFVDEKQGYAKGVLTQKLGPWRRPVAYLSKKLDPVAAGWPPCLRMVAAIAVLTKDAGKLTMGQPLVILAPHAVEALVKQPPDRWLSNARMTHYQALLLDTDRVQFGPVVALNPATLLPLPEEGLQHDCLDILAEAHGTRSDLMDQPLPDADHTWYTDGSSFLQEGQRKAGAAVTTETEVIWARALPAGTSAQRAELIALTQALKMAEGKKLNVYTDSRYAFATAHIHGEIYRRRGWLTSEGKEIKNKDEILALLKALFLPKRLSIIHCPGHQKGNSAEARGNRMADQAAREVATRETPETSTLLAGKRTADGSEFEKRTADGSEFESPKKKAKVE

SEQ ID NO: 2407 - protein, 2094 aa, synthetic construct
MPAAKRVKLDGGDKKYSIGLDIGTNSVGWAVITDEYKVPSKKFKVLGNTDRHSIKKNLIGALLFDSGETAEATRLKRTARRRYTRRKNRICYLQEIFSNEMAKVDDSFFHRLEESFLVEEDKKHERHPIFGNIVDEVAYHEKYPTIYHLRKKLVDSTDKADLRLIYLALAHMIKFRGHFLIEGDLNPDNSDVDKLFIQLVQTYNQLFEENPINASGVDAKAILSARLSKSRRLENLIAQLPGEKKNGLFGNLIALSLGLTPNFKSNFDLAEDAKLQLSKDTYDDDLDNLLAQIGDQYADLFLAAKNLSDAILLSDILRVNTEITKAPLSASMIKRYDEHHQDLTLLKALVRQQLPEKYKEIFFDQSKNGYAGYIDGGASQEEFYKFIKPILEKMDGTEELLVKLNREDLLRKQRTFDNGSIPHQIHLGELHAILRRQEDFYPFLKDNREKIEKILTFRIPYYVGPLARGNSRFAWMTRKSEETITPWNFEEVVDKGASAQSFIERMTNFDKNLPNEKVLPKHSLLYEYFTVYNELTKVKYVTEGMRKPAFLSGEQKKAIVDLLFKTNRKVTVKQLKEDYFKKIECFDSVEISGVEDRFNASLGTYHDLLKIIKDKDFLDNEENEDILEDIVLTLTLFEDREMIEERLKTYAHLFDDKVMKQLKRRRYTGWGRLSRKLINGIRDKQSGKTILDFLKSDGFANRNFMQLIHDDSLTFKEDIQKAQVSGQGDSLHEHIANLAGSPAIKKGILQTVKVVDELVKVMGRHKPENIVIEMARENQTTQKGQKNSRERMKRIEEGIKELGSQILKEHPVENTQLQNEKLYLYYLQNGRDMYVDQELDINRLSDYDVDHIVPQSFLKDDSIDNKVLTRSDKARGKSDNVPSEEVVKKMKNYWRQLLNAKLITQRKFDNLTKAERGGLSELDKAGFIKRQLVETRQITKHVAQILDSRMNTKYDENDKLIREVKVITLKSKLVSDFRKDFQFYKVREINNYHHAHDAYLNAVVGTALIKKYPKLESEFVYGDYKVYDVRKMIAKSEQEIGKATAKYFFYSNIMNFFKTEITLANGEIRKRPLIETNGETGEIVWDKGRDFATVRKVLSMPQVNIVKKTEVQTGGFSKESILPKRNSDKLIARKKDWDPKKYGGFDSPTVAYSVLVVAKVEKGKSKKLKSVKELLGITIMERSSFEKNPIDFLEAKGYKEVKKDLIIKLPKYSLFELENGRKRMLASAGELQKGNELALPSKYVNFLYLASHYEKLKGSPEDNEQKQLFVEQHKHYLDEIIEQISEFSKRVILADANLDKVLSAYNKHRDKPIREQAENIIHLFTLTNLGAPAAFKYFDTTIDRKRYTSTKEVLDATLIHQSITGLYETRIDLSQLGGDGGGSSPAPGGSGGTLNIEDEYRLHETSKEPDVSLGSTWLSDFPQAWAETGGMGLAVRQAPLIIPLKATSTPVSIKQYPMSQEARLGIKPHIQRLLDQGILVPCQSPWNTPLLPVKKPGTNDYRPVQDLREVNKRVEDIHPTVPNPYNLLSGLPPSHQWYTVLDLKDAFFCLRLHPTSQPLFAFEWRDPEMGISGQLTWTRLPQGFKNSPTLFNEALHRDLAGFRIQHPDLILLQYVDDLLLAATSELDCQQGTRALLQTLGDLGYRASAKKAQICQKQVKYLGYLLKEGQRWLTEARKETVMGQPIPKTPRQLREFLGKAGFCRLFIPGFAEMAAPLYPLTKPGTLFNWGPDQQKAFQEIKQALLTAPALGLPDLTKPFELFVDEKQGYAKGVLTQKLGPWRRPVAYLSKKLDPVAAGWPPCLRMVAAIAVLTKDAGKLTMGQPLVILAPHAVEALVKQPPDRWLSNARMTHYQALLLDTDRVQFGPVVALNPATLLPLPEEGLQHDCLDILAEAHGTRSDLMDQPLPDADHTWYTDGSSFLQEGQRKAGAAVTTETEVIWARALPAGTSAQRAELIALTQALKMAEGKKLNVYTDSRYAFATAHIHGEIYRRRGWLTSEGKEIKNKDEILALLKALFLPKRLSIIHCPGHQKGNSAEARGNRMADQAAREVATRETPETSTLLAGKRTADGSEFEKRTADGSEFESPKKKAKVE

SEQ ID NO: 2408 - protein, 2096 aa, synthetic construct
MPAAKRVKLDGGDKKYSIGLDIGTNSVGWAVITDEYKVPSKKFKVLGNTDRHSIKKNLIGALLFDSGETAEATRLKRTARRRYTRRKNRICYLQEIFSNEMAKVDDSFFHRLEESFLVEEDKKHERHPIFGNIVDEVAYHEKYPTIYHLRKKLVDSTDKADLRLIYLALAHMIKFRGHFLIEGDLNPDNSDVDKLFIQLVQTYNQLFEENPINASGVDAKAILSARLSKSRRLENLIAQLPGEKKNGLFGNLIALSLGLTPNFKSNFDLAEDAKLQLSKDTYDDDLDNLLAQIGDQYADLFLAAKNLSDAILLSDILRVNTEITKAPLSASMIKRYDEHHQDLTLLKALVRQQLPEKYKEIFFDQSKNGYAGYIDGGASQEEFYKFIKPILEKMDGTEELLVKLNREDLLRKQRTFDNGSIPHQIHLGELHAILRRQEDFYPFLKDNREKIEKILTFRIPYYVGPLARGNSRFAWMTRKSEETITPWNFEEVVDKGASAQSFIERMTNFDKNLPNEKVLPKHSLLYEYFTVYNELTKVKYVTEGMRKPAFLSGEQKKAIVDLLFKTNRKVTVKQLKEDYFKKIECFDSVEISGVEDRFNASLGTYHDLLKIIKDKDFLDNEENEDILEDIVLTLTLFEDREMIEERLKTYAHLFDDKVMKQLKRRRYTGWGRLSRKLINGIRDKQSGKTILDFLKSDGFANRNFMQLIHDDSLTFKEDIQKAQVSGQGDSLHEHIANLAGSPAIKKGILQTVKVVDELVKVMGRHKPENIVIEMARENQTTQKGQKNSRERMKRIEEGIKELGSQILKEHPVENTQLQNEKLYLYYLQNGRDMYVDQELDINRLSDYDVDHIVPQSFLKDDSIDNKVLTRSDKARGKSDNVPSEEVVKKMKNYWRQLLNAKLITQRKFDNLTKAERGGLSELDKAGFIKRQLVETRQITKHVAQILDSRMNTKYDENDKLIREVKVITLKSKLVSDFRKDFQFYKVREINNYHHAHDAYLNAVVGTALIKKYPKLESEFVYGDYKVYDVRKMIAKSEQEIGKATAKYFFYSNIMNFFKTEITLANGEIRKRPLIETNGETGEIVWDKGRDFATVRKVLSMPQVNIVKKTEVQTGGFSKESILPKRNSDKLIARKKDWDPKKYGGFDSPTVAYSVLVVAKVEKGKSKKLKSVKELLGITIMERSSFEKNPIDFLEAKGYKEVKKDLIIKLPKYSLFELENGRKRMLASAGELQKGNELALPSKYVNFLYLASHYEKLKGSPEDNEQKQLFVEQHKHYLDEIIEQISEFSKRVILADANLDKVLSAYNKHRDKPIREQAENIIHLFTLTNLGAPAAFKYFDTTIDRKRYTSTKEVLDATLIHQSITGLYETRIDLSQLGGDGGGGSEAAAKGSSGGTLNIEDEYRLHETSKEPDVSLGSTWLSDFPQAWAETGGMGLAVRQAPLIIPLKATSTPVSIKQYPMSQEARLGIKPHIQRLLDQGILVPCQSPWNTPLLPVKKPGTNDYRPVQDLREVNKRVEDIHPTVPNPYNLLSGLPPSHQWYTVLDLKDAFFCLRLHPTSQPLFAFEWRDPEMGISGQLTWTRLPQGFKNSPTLFNEALHRDLAGFRIQHPDLILLQYVDDLLLAATSELDCQQGTRALLQTLGDLGYRASAKKAQICQKQVKYLGYLLKEGQRWLTEARKETVMGQPIPKTPRQLREFLGKAGFCRLFIPGFAEMAAPLYPLTKPGTLFNWGPDQQKAFQEIKQALLTAPALGLPDLTKPFELFVDEKQGYAKGVLTQKLGPWRRPVAYLSKKLDPVAAGWPPCLRMVAAIAVLTKDAGKLTMGQPLVILAPHAVEALVKQPPDRWLSNARMTHYQALLLDTDRVQFGPVVALNPATLLPLPEEGLQHDCLDILAEAHGTRSDLMDQPLPDADHTWYTDGSSFLQEGQRKAGAAVTTETEVIWARALPAGTSAQRAELIALTQALKMAEGKKLNVYTDSRYAFATAHIHGEIYRRRGWLTSEGKEIKNKDEILALLKALFLPKRLSIIHCPGHQKGNSAEARGNRMADQAAREVATRETPETSTLLAGKRTADGSEFEKRTADGSEFESPKKKAKVE

SEQ ID NO: 2409 - protein, 2094 aa, synthetic construct
MPAAKRVKLDGGDKKYSIGLDIGTNSVGWAVITDEYKVPSKKFKVLGNTDRHSIKKNLIGALLFDSGETAEATRLKRTARRRYTRRKNRICYLQEIFSNEMAKVDDSFFHRLEESFLVEEDKKHERHPIFGNIVDEVAYHEKYPTIYHLRKKLVDSTDKADLRLIYLALAHMIKFRGHFLIEGDLNPDNSDVDKLFIQLVQTYNQLFEENPINASGVDAKAILSARLSKSRRLENLIAQLPGEKKNGLFGNLIALSLGLTPNFKSNFDLAEDAKLQLSKDTYDDDLDNLLAQIGDQYADLFLAAKNLSDAILLSDILRVNTEITKAPLSASMIKRYDEHHQDLTLLKALVRQQLPEKYKEIFFDQSKNGYAGYIDGGASQEEFYKFIKPILEKMDGTEELLVKLNREDLLRKQRTFDNGSIPHQIHLGELHAILRRQEDFYPFLKDNREKIEKILTFRIPYYVGPLARGNSRFAWMTRKSEETITPWNFEEVVDKGASAQSFIERMTNFDKNLPNEKVLPKHSLLYEYFTVYNELTKVKYVTEGMRKPAFLSGEQKKAIVDLLFKTNRKVTVKQLKEDYFKKIECFDSVEISGVEDRFNASLGTYHDLLKIIKDKDFLDNEENEDILEDIVLTLTLFEDREMIEERLKTYAHLFDDKVMKQLKRRRYTGWGRLSRKLINGIRDKQSGKTILDFLKSDGFANRNFMQLIHDDSLTFKEDIQKAQVSGQGDSLHEHIANLAGSPAIKKGILQTVKVVDELVKVMGRHKPENIVIEMARENQTTQKGQKNSRERMKRIEEGIKELGSQILKEHPVENTQLQNEKLYLYYLQNGRDMYVDQELDINRLSDYDVDHIVPQSFLKDDSIDNKVLTRSDKARGKSDNVPSEEVVKKMKNYWRQLLNAKLITQRKFDNLTKAERGGLSELDKAGFIKRQLVETRQITKHVAQILDSRMNTKYDENDKLIREVKVITLKSKLVSDFRKDFQFYKVREINNYHHAHDAYLNAVVGTALIKKYPKLESEFVYGDYKVYDVRKMIAKSEQEIGKATAKYFFYSNIMNFFKTEITLANGEIRKRPLIETNGETGEIVWDKGRDFATVRKVLSMPQVNIVKKTEVQTGGFSKESILPKRNSDKLIARKKDWDPKKYGGFDSPTVAYSVLVVAKVEKGKSKKLKSVKELLGITIMERSSFEKNPIDFLEAKGYKEVKKDLIIKLPKYSLFELENGRKRMLASAGELQKGNELALPSKYVNFLYLASHYEKLKGSPEDNEQKQLFVEQHKHYLDEIIEQISEFSKRVILADANLDKVLSAYNKHRDKPIREQAENIIHLFTLTNLGAPAAFKYFDTTIDRKRYTSTKEVLDATLIHQSITGLYETRIDLSQLGGDGGGGGGSSGGSGGTLNIEDEYRLHETSKEPDVSLGSTWLSDFPQAWAETGGMGLAVRQAPLIIPLKATSTPVSIKQYPMSQEARLGIKPHIQRLLDQGILVPCQSPWNTPLLPVKKPGTNDYRPVQDLREVNKRVEDIHPTVPNPYNLLSGLPPSHQWYTVLDLKDAFFCLRLHPTSQPLFAFEWRDPEMGISGQLTWTRLPQGFKNSPTLFNEALHRDLAGFRIQHPDLILLQYVDDLLLAATSELDCQQGTRALLQTLGDLGYRASAKKAQICQKQVKYLGYLLKEGQRWLTEARKETVMGQPIPKTPRQLREFLGKAGFCRLFIPGFAEMAAPLYPLTKPGTLFNWGPDQQKAFQEIKQALLTAPALGLPDLTKPFELFVDEKQGYAKGVLTQKLGPWRRPVAYLSKKLDPVAAGWPPCLRMVAAIAVLTKDAGKLTMGQPLVILAPHAVEALVKQPPDRWLSNARMTHYQALLLDTDRVQFGPVVALNPATLLPLPEEGLQHDCLDILAEAHGTRSDLMDQPLPDADHTWYTDGSSFLQEGQRKAGAAVTTETEVIWARALPAGTSAQRAELIALTQALKMAEGKKLNVYTDSRYAFATAHIHGEIYRRRGWLTSEGKEIKNKDEILALLKALFLPKRLSIIHCPGHQKGNSAEARGNRMADQAAREVATRETPETSTLLAGKRTADGSEFEKRTADGSEFESPKKKAKVE

SEQ ID NO: 2410 - protein, 2110 aa, synthetic construct
MPAAKRVKLDGGDKKYSIGLDIGTNSVGWAVITDEYKVPSKKFKVLGNTDRHSIKKNLIGALLFDSGETAEATRLKRTARRRYTRRKNRICYLQEIFSNEMAKVDDSFFHRLEESFLVEEDKKHERHPIFGNIVDEVAYHEKYPTIYHLRKKLVDSTDKADLRLIYLALAHMIKFRGHFLIEGDLNPDNSDVDKLFIQLVQTYNQLFEENPINASGVDAKAILSARLSKSRRLENLIAQLPGEKKNGLFGNLIALSLGLTPNFKSNFDLAEDAKLQLSKDTYDDDLDNLLAQIGDQYADLFLAAKNLSDAILLSDILRVNTEITKAPLSASMIKRYDEHHQDLTLLKALVRQQLPEKYKEIFFDQSKNGYAGYIDGGASQEEFYKFIKPILEKMDGTEELLVKLNREDLLRKQRTFDNGSIPHQIHLGELHAILRRQEDFYPFLKDNREKIEKILTFRIPYYVGPLARGNSRFAWMTRKSEETITPWNFEEVVDKGASAQSFIERMTNFDKNLPNEKVLPKHSLLYEYFTVYNELTKVKYVTEGMRKPAFLSGEQKKAIVDLLFKTNRKVTVKQLKEDYFKKIECFDSVEISGVEDRFNASLGTYHDLLKIIKDKDFLDNEENEDILEDIVLTLTLFEDREMIEERLKTYAHLFDDKVMKQLKRRRYTGWGRLSRKLINGIRDKQSGKTILDFLKSDGFANRNFMQLIHDDSLTFKEDIQKAQVSGQGDSLHEHIANLAGSPAIKKGILQTVKVVDELVKVMGRHKPENIVIEMARENQTTQKGQKNSRERMKRIEEGIKELGSQILKEHPVENTQLQNEKLYLYYLQNGRDMYVDQELDINRLSDYDVDHIVPQSFLKDDSIDNKVLTRSDKARGKSDNVPSEEVVKKMKNYWRQLLNAKLITQRKFDNLTKAERGGLSELDKAGFIKRQLVETRQITKHVAQILDSRMNTKYDENDKLIREVKVITLKSKLVSDFRKDFQFYKVREINNYHHAHDAYLNAVVGTALIKKYPKLESEFVYGDYKVYDVRKMIAKSEQEIGKATAKYFFYSNIMNFFKTEITLANGEIRKRPLIETNGETGEIVWDKGRDFATVRKVLSMPQVNIVKKTEVQTGGFSKESILPKRNSDKLIARKKDWDPKKYGGFDSPTVAYSVLVVAKVEKGKSKKLKSVKELLGITIMERSSFEKNPIDFLEAKGYKEVKKDLIIKLPKYSLFELENGRKRMLASAGELQKGNELALPSKYVNFLYLASHYEKLKGSPEDNEQKQLFVEQHKHYLDEIIEQISEFSKRVILADANLDKVLSAYNKHRDKPIREQAENIIHLFTLTNLGAPAAFKYFDTTIDRKRYTSTKEVLDATLIHQSITGLYETRIDLSQLGGDGGGGGGSGGGGSGGGGSGGGGSGGGGSGGTLNIEDEYRLHETSKEPDVSLGSTWLSDFPQAWAETGGMGLAVRQAPLIIPLKATSTPVSIKQYPMSQEARLGIKPHIQRLLDQGILVPCQSPWNTPLLPVKKPGTNDYRPVQDLREVNKRVEDIHPTVPNPYNLLSGLPPSHQWYTVLDLKDAFFCLRLHPTSQPLFAFEWRDPEMGISGQLTWTRLPQGFKNSPTLFNEALHRDLAGFRIQHPDLILLQYVDDLLLAATSELDCQQGTRALLQTLGDLGYRASAKKAQICQKQVKYLGYLLKEGQRWLTEARKETVMGQPIPKTPRQLREFLGKAGFCRLFIPGFAEMAAPLYPLTKPGTLFNWGPDQQKAFQEIKQALLTAPALGLPDLTKPFELFVDEKQGYAKGVLTQKLGPWRRPVAYLSKKLDPVAAGWPPCLRMVAAIAVLTKDAGKLTMGQPLVILAPHAVEALVKQPPDRWLSNARMTHYQALLLDTDRVQFGPVVALNPATLLPLPEEGLQHDCLDILAEAHGTRSDLMDQPLPDADHTWYTDGSSFLQEGQRKAGAAVTTETEVIWARALPAGTSAQRAELIALTQALKMAEGKKLNVYTDSRYAFATAHIHGEIYRRRGWLTSEGKEIKNKDEILALLKALFLPKRLSIIHCPGHQKGNSAEARGNRMADQAAREVATRETPETSTLLAGKRTADGSEFEKRTADGSEFESPKKKAKVE

SEQ ID NO: 2411 - protein, 2091 aa, synthetic construct
MPAAKRVKLDGGDKKYSIGLDIGTNSVGWAVITDEYKVPSKKFKVLGNTDRHSIKKNLIGALLFDSGETAEATRLKRTARRRYTRRKNRICYLQEIFSNEMAKVDDSFFHRLEESFLVEEDKKHERHPIFGNIVDEVAYHEKYPTIYHLRKKLVDSTDKADLRLIYLALAHMIKFRGHFLIEGDLNPDNSDVDKLFIQLVQTYNQLFEENPINASGVDAKAILSARLSKSRRLENLIAQLPGEKKNGLFGNLIALSLGLTPNFKSNFDLAEDAKLQLSKDTYDDDLDNLLAQIGDQYADLFLAAKNLSDAILLSDILRVNTEITKAPLSASMIKRYDEHHQDLTLLKALVRQQLPEKYKEIFFDQSKNGYAGYIDGGASQEEFYKFIKPILEKMDGTEELLVKLNREDLLRKQRTFDNGSIPHQIHLGELHAILRRQEDFYPFLKDNREKIEKILTFRIPYYVGPLARGNSRFAWMTRKSEETITPWNFEEVVDKGASAQSFIERMTNFDKNLPNEKVLPKHSLLYEYFTVYNELTKVKYVTEGMRKPAFLSGEQKKAIVDLLFKTNRKVTVKQLKEDYFKKIECFDSVEISGVEDRFNASLGTYHDLLKIIKDKDFLDNEENEDILEDIVLTLTLFEDREMIEERLKTYAHLFDDKVMKQLKRRRYTGWGRLSRKLINGIRDKQSGKTILDFLKSDGFANRNFMQLIHDDSLTFKEDIQKAQVSGQGDSLHEHIANLAGSPAIKKGILQTVKVVDELVKVMGRHKPENIVIEMARENQTTQKGQKNSRERMKRIEEGIKELGSQILKEHPVENTQLQNEKLYLYYLQNGRDMYVDQELDINRLSDYDVDHIVPQSFLKDDSIDNKVLTRSDKARGKSDNVPSEEVVKKMKNYWRQLLNAKLITQRKFDNLTKAERGGLSELDKAGFIKRQLVETRQITKHVAQILDSRMNTKYDENDKLIREVKVITLKSKLVSDFRKDFQFYKVREINNYHHAHDAYLNAVVGTALIKKYPKLESEFVYGDYKVYDVRKMIAKSEQEIGKATAKYFFYSNIMNFFKTEITLANGEIRKRPLIETNGETGEIVWDKGRDFATVRKVLSMPQVNIVKKTEVQTGGFSKESILPKRNSDKLIARKKDWDPKKYGGFDSPTVAYSVLVVAKVEKGKSKKLKSVKELLGITIMERSSFEKNPIDFLEAKGYKEVKKDLIIKLPKYSLFELENGRKRMLASAGELQKGNELALPSKYVNFLYLASHYEKLKGSPEDNEQKQLFVEQHKHYLDEIIEQISEFSKRVILADANLDKVLSAYNKHRDKPIREQAENIIHLFTLTNLGAPAAFKYFDTTIDRKRYTSTKEVLDATLIHQSITGLYETRIDLSQLGGDGGGSSGSSGGTLNIEDEYRLHETSKEPDVSLGSTWLSDFPQAWAETGGMGLAVRQAPLIIPLKATSTPVSIKQYPMSQEARLGIKPHIQRLLDQGILVPCQSPWNTPLLPVKKPGTNDYRPVQDLREVNKRVEDIHPTVPNPYNLLSGLPPSHQWYTVLDLKDAFFCLRLHPTSQPLFAFEWRDPEMGISGQLTWTRLPQGFKNSPTLFNEALHRDLAGFRIQHPDLILLQYVDDLLLAATSELDCQQGTRALLQTLGDLGYRASAKKAQICQKQVKYLGYLLKEGQRWLTEARKETVMGQPIPKTPRQLREFLGKAGFCRLFIPGFAEMAAPLYPLTKPGTLFNWGPDQQKAFQEIKQALLTAPALGLPDLTKPFELFVDEKQGYAKGVLTQKLGPWRRPVAYLSKKLDPVAAGWPPCLRMVAAIAVLTKDAGKLTMGQPLVILAPHAVEALVKQPPDRWLSNARMTHYQALLLDTDRVQFGPVVALNPATLLPLPEEGLQHDCLDILAEAHGTRSDLMDQPLPDADHTWYTDGSSFLQEGQRKAGAAVTTETEVIWARALPAGTSAQRAELIALTQALKMAEGKKLNVYTDSRYAFATAHIHGEIYRRRGWLTSEGKEIKNKDEILALLKALFLPKRLSIIHCPGHQKGNSAEARGNRMADQAAREVATRETPETSTLLAGKRTADGSEFEKRTADGSEFESPKKKAKVE

SEQ ID NO: 2412 - protein, 2096 aa, synthetic construct
MPAAKRVKLDGGDKKYSIGLDIGTNSVGWAVITDEYKVPSKKFKVLGNTDRHSIKKNLIGALLFDSGETAEATRLKRTARRRYTRRKNRICYLQEIFSNEMAKVDDSFFHRLEESFLVEEDKKHERHPIFGNIVDEVAYHEKYPTIYHLRKKLVDSTDKADLRLIYLALAHMIKFRGHFLIEGDLNPDNSDVDKLFIQLVQTYNQLFEENPINASGVDAKAILSARLSKSRRLENLIAQLPGEKKNGLFGNLIALSLGLTPNFKSNFDLAEDAKLQLSKDTYDDDLDNLLAQIGDQYADLFLAAKNLSDAILLSDILRVNTEITKAPLSASMIKRYDEHHQDLTLLKALVRQQLPEKYKEIFFDQSKNGYAGYIDGGASQEEFYKFIKPILEKMDGTEELLVKLNREDLLRKQRTFDNGSIPHQIHLGELHAILRRQEDFYPFLKDNREKIEKILTFRIPYYVGPLARGNSRFAWMTRKSEETITPWNFEEVVDKGASAQSFIERMTNFDKNLPNEKVLPKHSLLYEYFTVYNELTKVKYVTEGMRKPAFLSGEQKKAIVDLLFKTNRKVTVKQLKEDYFKKIECFDSVEISGVEDRFNASLGTYHDLLKIIKDKDFLDNEENEDILEDIVLTLTLFEDREMIEERLKTYAHLFDDKVMKQLKRRRYTGWGRLSRKLINGIRDKQSGKTILDFLKSDGFANRNFMQLIHDDSLTFKEDIQKAQVSGQGDSLHEHIANLAGSPAIKKGILQTVKVVDELVKVMGRHKPENIVIEMARENQTTQKGQKNSRERMKRIEEGIKELGSQILKEHPVENTQLQNEKLYLYYLQNGRDMYVDQELDINRLSDYDVDHIVPQSFLKDDSIDNKVLTRSDKARGKSDNVPSEEVVKKMKNYWRQLLNAKLITQRKFDNLTKAERGGLSELDKAGFIKRQLVETRQITKHVAQILDSRMNTKYDENDKLIREVKVITLKSKLVSDFRKDFQFYKVREINNYHHAHDAYLNAVVGTALIKKYPKLESEFVYGDYKVYDVRKMIAKSEQEIGKATAKYFFYSNIMNFFKTEITLANGEIRKRPLIETNGETGEIVWDKGRDFATVRKVLSMPQVNIVKKTEVQTGGFSKESILPKRNSDKLIARKKDWDPKKYGGFDSPTVAYSVLVVAKVEKGKSKKLKSVKELLGITIMERSSFEKNPIDFLEAKGYKEVKKDLIIKLPKYSLFELENGRKRMLASAGELQKGNELALPSKYVNFLYLASHYEKLKGSPEDNEQKQLFVEQHKHYLDEIIEQISEFSKRVILADANLDKVLSAYNKHRDKPIREQAENIIHLFTLTNLGAPAAFKYFDTTIDRKRYTSTKEVLDATLIHQSITGLYETRIDLSQLGGDGGEAAAKGGGGSSGGTLNIEDEYRLHETSKEPDVSLGSTWLSDFPQAWAETGGMGLAVRQAPLIIPLKATSTPVSIKQYPMSQEARLGIKPHIQRLLDQGILVPCQSPWNTPLLPVKKPGTNDYRPVQDLREVNKRVEDIHPTVPNPYNLLSGLPPSHQWYTVLDLKDAFFCLRLHPTSQPLFAFEWRDPEMGISGQLTWTRLPQGFKNSPTLFNEALHRDLAGFRIQHPDLILLQYVDDLLLAATSELDCQQGTRALLQTLGDLGYRASAKKAQICQKQVKYLGYLLKEGQRWLTEARKETVMGQPIPKTPRQLREFLGKAGFCRLFIPGFAEMAAPLYPLTKPGTLFNWGPDQQKAFQEIKQALLTAPALGLPDLTKPFELFVDEKQGYAKGVLTQKLGPWRRPVAYLSKKLDPVAAGWPPCLRMVAAIAVLTKDAGKLTMGQPLVILAPHAVEALVKQPPDRWLSNARMTHYQALLLDTDRVQFGPVVALNPATLLPLPEEGLQHDCLDILAEAHGTRSDLMDQPLPDADHTWYTDGSSFLQEGQRKAGAAVTTETEVIWARALPAGTSAQRAELIALTQALKMAEGKKLNVYTDSRYAFATAHIHGEIYRRRGWLTSEGKEIKNKDEILALLKALFLPKRLSIIHCPGHQKGNSAEARGNRMADQAAREVATRETPETSTLLAGKRTADGSEFEKRTADGSEFESPKKKAKVE

SEQ ID NO: 2413 - protein, 2096 aa, synthetic construct
MPAAKRVKLDGGDKKYSIGLDIGTNSVGWAVITDEYKVPSKKFKVLGNTDRHSIKKNLIGALLFDSGETAEATRLKRTARRRYTRRKNRICYLQEIFSNEMAKVDDSFFHRLEESFLVEEDKKHERHPIFGNIVDEVAYHEKYPTIYHLRKKLVDSTDKADLRLIYLALAHMIKFRGHFLIEGDLNPDNSDVDKLFIQLVQTYNQLFEENPINASGVDAKAILSARLSKSRRLENLIAQLPGEKKNGLFGNLIALSLGLTPNFKSNFDLAEDAKLQLSKDTYDDDLDNLLAQIGDQYADLFLAAKNLSDAILLSDILRVNTEITKAPLSASMIKRYDEHHQDLTLLKALVRQQLPEKYKEIFFDQSKNGYAGYIDGGASQEEFYKFIKPILEKMDGTEELLVKLNREDLLRKQRTFDNGSIPHQIHLGELHAILRRQEDFYPFLKDNREKIEKILTFRIPYYVGPLARGNSRFAWMTRKSEETITPWNFEEVVDKGASAQSFIERMTNFDKNLPNEKVLPKHSLLYEYFTVYNELTKVKYVTEGMRKPAFLSGEQKKAIVDLLFKTNRKVTVKQLKEDYFKKIECFDSVEISGVEDRFNASLGTYHDLLKIIKDKDFLDNEENEDILEDIVLTLTLFEDREMIEERLKTYAHLFDDKVMKQLKRRRYTGWGRLSRKLINGIRDKQSGKTILDFLKSDGFANRNFMQLIHDDSLTFKEDIQKAQVSGQGDSLHEHIANLAGSPAIKKGILQTVKVVDELVKVMGRHKPENIVIEMARENQTTQKGQKNSRERMKRIEEGIKELGSQILKEHPVENTQLQNEKLYLYYLQNGRDMYVDQELDINRLSDYDVDHIVPQSFLKDDSIDNKVLTRSDKARGKSDNVPSEEVVKKMKNYWRQLLNAKLITQRKFDNLTKAERGGLSELDKAGFIKRQLVETRQITKHVAQILDSRMNTKYDENDKLIREVKVITLKSKLVSDFRKDFQFYKVREINNYHHAHDAYLNAVVGTALIKKYPKLESEFVYGDYKVYDVRKMIAKSEQEIGKATAKYFFYSNIMNFFKTEITLANGEIRKRPLIETNGETGEIVWDKGRDFATVRKVLSMPQVNIVKKTEVQTGGFSKESILPKRNSDKLIARKKDWDPKKYGGFDSPTVAYSVLVVAKVEKGKSKKLKSVKELLGITIMERSSFEKNPIDFLEAKGYKEVKKDLIIKLPKYSLFELENGRKRMLASAGELQKGNELALPSKYVNFLYLASHYEKLKGSPEDNEQKQLFVEQHKHYLDEIIEQISEFSKRVILADANLDKVLSAYNKHRDKPIREQAENIIHLFTLTNLGAPAAFKYFDTTIDRKRYTSTKEVLDATLIHQSITGLYETRIDLSQLGGDGGGGSGGGEAAAKGGTLNIEDEYRLHETSKEPDVSLGSTWLSDFPQAWAETGGMGLAVRQAPLIIPLKATSTPVSIKQYPMSQEARLGIKPHIQRLLDQGILVPCQSPWNTPLLPVKKPGTNDYRPVQDLREVNKRVEDIHPTVPNPYNLLSGLPPSHQWYTVLDLKDAFFCLRLHPTSQPLFAFEWRDPEMGISGQLTWTRLPQGFKNSPTLFNEALHRDLAGFRIQHPDLILLQYVDDLLLAATSELDCQQGTRALLQTLGDLGYRASAKKAQICQKQVKYLGYLLKEGQRWLTEARKETVMGQPIPKTPRQLREFLGKAGFCRLFIPGFAEMAAPLYPLTKPGTLFNWGPDQQKAFQEIKQALLTAPALGLPDLTKPFELFVDEKQGYAKGVLTQKLGPWRRPVAYLSKKLDPVAAGWPPCLRMVAAIAVLTKDAGKLTMGQPLVILAPHAVEALVKQPPDRWLSNARMTHYQALLLDTDRVQFGPVVALNPATLLPLPEEGLQHDCLDILAEAHGTRSDLMDQPLPDADHTWYTDGSSFLQEGQRKAGAAVTTETEVIWARALPAGTSAQRAELIALTQALKMAEGKKLNVYTDSRYAFATAHIHGEIYRRRGWLTSEGKEIKNKDEILALLKALFLPKRLSIIHCPGHQKGNSAEARGNRMADQAAREVATRETPETSTLLAGKRTADGSEFEKRTADGSEFESPKKKAKVE

SEQ ID NO: 2414 - protein, 2094 aa, synthetic construct
MPAAKRVKLDGGDKKYSIGLDIGTNSVGWAVITDEYKVPSKKFKVLGNTDRHSIKKNLIGALLFDSGETAEATRLKRTARRRYTRRKNRICYLQEIFSNEMAKVDDSFFHRLEESFLVEEDKKHERHPIFGNIVDEVAYHEKYPTIYHLRKKLVDSTDKADLRLIYLALAHMIKFRGHFLIEGDLNPDNSDVDKLFIQLVQTYNQLFEENPINASGVDAKAILSARLSKSRRLENLIAQLPGEKKNGLFGNLIALSLGLTPNFKSNFDLAEDAKLQLSKDTYDDDLDNLLAQIGDQYADLFLAAKNLSDAILLSDILRVNTEITKAPLSASMIKRYDEHHQDLTLLKALVRQQLPEKYKEIFFDQSKNGYAGYIDGGASQEEFYKFIKPILEKMDGTEELLVKLNREDLLRKQRTFDNGSIPHQIHLGELHAILRRQEDFYPFLKDNREKIEKILTFRIPYYVGPLARGNSRFAWMTRKSEETITPWNFEEVVDKGASAQSFIERMTNFDKNLPNEKVLPKHSLLYEYFTVYNELTKVKYVTEGMRKPAFLSGEQKKAIVDLLFKTNRKVTVKQLKEDYFKKIECFDSVEISGVEDRFNASLGTYHDLLKIIKDKDFLDNEENEDILEDIVLTLTLFEDREMIEERLKTYAHLFDDKVMKQLKRRRYTGWGRLSRKLINGIRDKQSGKTILDFLKSDGFANRNFMQLIHDDSLTFKEDIQKAQVSGQGDSLHEHIANLAGSPAIKKGILQTVKVVDELVKVMGRHKPENIVIEMARENQTTQKGQKNSRERMKRIEEGIKELGSQILKEHPVENTQLQNEKLYLYYLQNGRDMYVDQELDINRLSDYDVDHIVPQSFLKDDSIDNKVLTRSDKARGKSDNVPSEEVVKKMKNYWRQLLNAKLITQRKFDNLTKAERGGLSELDKAGFIKRQLVETRQITKHVAQILDSRMNTKYDENDKLIREVKVITLKSKLVSDFRKDFQFYKVREINNYHHAHDAYLNAVVGTALIKKYPKLESEFVYGDYKVYDVRKMIAKSEQEIGKATAKYFFYSNIMNFFKTEITLANGEIRKRPLIETNGETGEIVWDKGRDFATVRKVLSMPQVNIVKKTEVQTGGFSKESILPKRNSDKLIARKKDWDPKKYGGFDSPTVAYSVLVVAKVEKGKSKKLKSVKELLGITIMERSSFEKNPIDFLEAKGYKEVKKDLIIKLPKYSLFELENGRKRMLASAGELQKGNELALPSKYVNFLYLASHYEKLKGSPEDNEQKQLFVEQHKHYLDEIIEQISEFSKRVILADANLDKVLSAYNKHRDKPIREQAENIIHLFTLTNLGAPAAFKYFDTTIDRKRYTSTKEVLDATLIHQSITGLYETRIDLSQLGGDGGPAPGSSGGGGGTLNIEDEYRLHETSKEPDVSLGSTWLSDFPQAWAETGGMGLAVRQAPLIIPLKATSTPVSIKQYPMSQEARLGIKPHIQRLLDQGILVPCQSPWNTPLLPVKKPGTNDYRPVQDLREVNKRVEDIHPTVPNPYNLLSGLPPSHQWYTVLDLKDAFFCLRLHPTSQPLFAFEWRDPEMGISGQLTWTRLPQGFKNSPTLFNEALHRDLAGFRIQHPDLILLQYVDDLLLAATSELDCQQGTRALLQTLGDLGYRASAKKAQICQKQVKYLGYLLKEGQRWLTEARKETVMGQPIPKTPRQLREFLGKAGFCRLFIPGFAEMAAPLYPLTKPGTLFNWGPDQQKAFQEIKQALLTAPALGLPDLTKPFELFVDEKQGYAKGVLTQKLGPWRRPVAYLSKKLDPVAAGWPPCLRMVAAIAVLTKDAGKLTMGQPLVILAPHAVEALVKQPPDRWLSNARMTHYQALLLDTDRVQFGPVVALNPATLLPLPEEGLQHDCLDILAEAHGTRSDLMDQPLPDADHTWYTDGSSFLQEGQRKAGAAVTTETEVIWARALPAGTSAQRAELIALTQALKMAEGKKLNVYTDSRYAFATAHIHGEIYRRRGWLTSEGKEIKNKDEILALLKALFLPKRLSIIHCPGHQKGNSAEARGNRMADQAAREVATRETPETSTLLAGKRTADGSEFEKRTADGSEFESPKKKAKVE

SEQ ID NO: 2415 - protein, 2089 aa, synthetic construct
MPAAKRVKLDGGDKKYSIGLDIGTNSVGWAVITDEYKVPSKKFKVLGNTDRHSIKKNLIGALLFDSGETAEATRLKRTARRRYTRRKNRICYLQEIFSNEMAKVDDSFFHRLEESFLVEEDKKHERHPIFGNIVDEVAYHEKYPTIYHLRKKLVDSTDKADLRLIYLALAHMIKFRGHFLIEGDLNPDNSDVDKLFIQLVQTYNQLFEENPINASGVDAKAILSARLSKSRRLENLIAQLPGEKKNGLFGNLIALSLGLTPNFKSNFDLAEDAKLQLSKDTYDDDLDNLLAQIGDQYADLFLAAKNLSDAILLSDILRVNTEITKAPLSASMIKRYDEHHQDLTLLKALVRQQLPEKYKEIFFDQSKNGYAGYIDGGASQEEFYKFIKPILEKMDGTEELLVKLNREDLLRKQRTFDNGSIPHQIHLGELHAILRRQEDFYPFLKDNREKIEKILTFRIPYYVGPLARGNSRFAWMTRKSEETITPWNFEEVVDKGASAQSFIERMTNFDKNLPNEKVLPKHSLLYEYFTVYNELTKVKYVTEGMRKPAFLSGEQKKAIVDLLFKTNRKVTVKQLKEDYFKKIECFDSVEISGVEDRFNASLGTYHDLLKIIKDKDFLDNEENEDILEDIVLTLTLFEDREMIEERLKTYAHLFDDKVMKQLKRRRYTGWGRLSRKLINGIRDKQSGKTILDFLKSDGFANRNFMQLIHDDSLTFKEDIQKAQVSGQGDSLHEHIANLAGSPAIKKGILQTVKVVDELVKVMGRHKPENIVIEMARENQTTQKGQKNSRERMKRIEEGIKELGSQILKEHPVENTQLQNEKLYLYYLQNGRDMYVDQELDINRLSDYDVDHIVPQSFLKDDSIDNKVLTRSDKARGKSDNVPSEEVVKKMKNYWRQLLNAKLITQRKFDNLTKAERGGLSELDKAGFIKRQLVETRQITKHVAQILDSRMNTKYDENDKLIREVKVITLKSKLVSDFRKDFQFYKVREINNYHHAHDAYLNAVVGTALIKKYPKLESEFVYGDYKVYDVRKMIAKSEQEIGKATAKYFFYSNIMNFFKTEITLANGEIRKRPLIETNGETGEIVWDKGRDFATVRKVLSMPQVNIVKKTEVQTGGFSKESILPKRNSDKLIARKKDWDPKKYGGFDSPTVAYSVLVVAKVEKGKSKKLKSVKELLGITIMERSSFEKNPIDFLEAKGYKEVKKDLIIKLPKYSLFELENGRKRMLASAGELQKGNELALPSKYVNFLYLASHYEKLKGSPEDNEQKQLFVEQHKHYLDEIIEQISEFSKRVILADANLDKVLSAYNKHRDKPIREQAENIIHLFTLTNLGAPAAFKYFDTTIDRKRYTSTKEVLDATLIHQSITGLYETRIDLSQLGGDGGGGGGGGTLNIEDEYRLHETSKEPDVSLGSTWLSDFPQAWAETGGMGLAVRQAPLIIPLKATSTPVSIKQYPMSQEARLGIKPHIQRLLDQGILVPCQSPWNTPLLPVKKPGTNDYRPVQDLREVNKRVEDIHPTVPNPYNLLSGLPPSHQWYTVLDLKDAFFCLRLHPTSQPLFAFEWRDPEMGISGQLTWTRLPQGFKNSPTLFNEALHRDLAGFRIQHPDLILLQYVDDLLLAATSELDCQQGTRALLQTLGDLGYRASAKKAQICQKQVKYLGYLLKEGQRWLTEARKETVMGQPIPKTPRQLREFLGKAGFCRLFIPGFAEMAAPLYPLTKPGTLFNWGPDQQKAFQEIKQALLTAPALGLPDLTKPFELFVDEKQGYAKGVLTQKLGPWRRPVAYLSKKLDPVAAGWPPCLRMVAAIAVLTKDAGKLTMGQPLVILAPHAVEALVKQPPDRWLSNARMTHYQALLLDTDRVQFGPVVALNPATLLPLPEEGLQHDCLDILAEAHGTRSDLMDQPLPDADHTWYTDGSSFLQEGQRKAGAAVTTETEVIWARALPAGTSAQRAELIALTQALKMAEGKKLNVYTDSRYAFATAHIHGEIYRRRGWLTSEGKEIKNKDEILALLKALFLPKRLSIIHCPGHQKGNSAEARGNRMADQAAREVATRETPETSTLLAGKRTADGSEFEKRTADGSEFESPKKKAKVE

SEQ ID NO: 2416 - protein, 2094 aa, synthetic construct
MPAAKRVKLDGGDKKYSIGLDIGTNSVGWAVITDEYKVPSKKFKVLGNTDRHSIKKNLIGALLFDSGETAEATRLKRTARRRYTRRKNRICYLQEIFSNEMAKVDDSFFHRLEESFLVEEDKKHERHPIFGNIVDEVAYHEKYPTIYHLRKKLVDSTDKADLRLIYLALAHMIKFRGHFLIEGDLNPDNSDVDKLFIQLVQTYNQLFEENPINASGVDAKAILSARLSKSRRLENLIAQLPGEKKNGLFGNLIALSLGLTPNFKSNFDLAEDAKLQLSKDTYDDDLDNLLAQIGDQYADLFLAAKNLSDAILLSDILRVNTEITKAPLSASMIKRYDEHHQDLTLLKALVRQQLPEKYKEIFFDQSKNGYAGYIDGGASQEEFYKFIKPILEKMDGTEELLVKLNREDLLRKQRTFDNGSIPHQIHLGELHAILRRQEDFYPFLKDNREKIEKILTFRIPYYVGPLARGNSRFAWMTRKSEETITPWNFEEVVDKGASAQSFIERMTNFDKNLPNEKVLPKHSLLYEYFTVYNELTKVKYVTEGMRKPAFLSGEQKKAIVDLLFKTNRKVTVKQLKEDYFKKIECFDSVEISGVEDRFNASLGTYHDLLKIIKDKDFLDNEENEDILEDIVLTLTLFEDREMIEERLKTYAHLFDDKVMKQLKRRRYTGWGRLSRKLINGIRDKQSGKTILDFLKSDGFANRNFMQLIHDDSLTFKEDIQKAQVSGQGDSLHEHIANLAGSPAIKKGILQTVKVVDELVKVMGRHKPENIVIEMARENQTTQKGQKNSRERMKRIEEGIKELGSQILKEHPVENTQLQNEKLYLYYLQNGRDMYVDQELDINRLSDYDVDHIVPQSFLKDDSIDNKVLTRSDKARGKSDNVPSEEVVKKMKNYWRQLLNAKLITQRKFDNLTKAERGGLSELDKAGFIKRQLVETRQITKHVAQILDSRMNTKYDENDKLIREVKVITLKSKLVSDFRKDFQFYKVREINNYHHAHDAYLNAVVGTALIKKYPKLESEFVYGDYKVYDVRKMIAKSEQEIGKATAKYFFYSNIMNFFKTEITLANGEIRKRPLIETNGETGEIVWDKGRDFATVRKVLSMPQVNIVKKTEVQTGGFSKESILPKRNSDKLIARKKDWDPKKYGGFDSPTVAYSVLVVAKVEKGKSKKLKSVKELLGITIMERSSFEKNPIDFLEAKGYKEVKKDLIIKLPKYSLFELENGRKRMLASAGELQKGNELALPSKYVNFLYLASHYEKLKGSPEDNEQKQLFVEQHKHYLDEIIEQISEFSKRVILADANLDKVLSAYNKHRDKPIREQAENIIHLFTLTNLGAPAAFKYFDTTIDRKRYTSTKEVLDATLIHQSITGLYETRIDLSQLGGDGGGGGGGSPAPGGTLNIEDEYRLHETSKEPDVSLGSTWLSDFPQAWAETGGMGLAVRQAPLIIPLKATSTPVSIKQYPMSQEARLGIKPHIQRLLDQGILVPCQSPWNTPLLPVKKPGTNDYRPVQDLREVNKRVEDIHPTVPNPYNLLSGLPPSHQWYTVLDLKDAFFCLRLHPTSQPLFAFEWRDPEMGISGQLTWTRLPQGFKNSPTLFNEALHRDLAGFRIQHPDLILLQYVDDLLLAATSELDCQQGTRALLQTLGDLGYRASAKKAQICQKQVKYLGYLLKEGQRWLTEARKETVMGQPIPKTPRQLREFLGKAGFCRLFIPGFAEMAAPLYPLTKPGTLFNWGPDQQKAFQEIKQALLTAPALGLPDLTKPFELFVDEKQGYAKGVLTQKLGPWRRPVAYLSKKLDPVAAGWPPCLRMVAAIAVLTKDAGKLTMGQPLVILAPHAVEALVKQPPDRWLSNARMTHYQALLLDTDRVQFGPVVALNPATLLPLPEEGLQHDCLDILAEAHGTRSDLMDQPLPDADHTWYTDGSSFLQEGQRKAGAAVTTETEVIWARALPAGTSAQRAELIALTQALKMAEGKKLNVYTDSRYAFATAHIHGEIYRRRGWLTSEGKEIKNKDEILALLKALFLPKRLSIIHCPGHQKGNSAEARGNRMADQAAREVATRETPETSTLLAGKRTADGSEFEKRTADGSEFESPKKKAKVE

SEQ ID NO: 2417 - protein, 2100 aa, synthetic construct
MPAAKRVKLDGGDKKYSIGLDIGTNSVGWAVITDEYKVPSKKFKVLGNTDRHSIKKNLIGALLFDSGETAEATRLKRTARRRYTRRKNRICYLQEIFSNEMAKVDDSFFHRLEESFLVEEDKKHERHPIFGNIVDEVAYHEKYPTIYHLRKKLVDSTDKADLRLIYLALAHMIKFRGHFLIEGDLNPDNSDVDKLFIQLVQTYNQLFEENPINASGVDAKAILSARLSKSRRLENLIAQLPGEKKNGLFGNLIALSLGLTPNFKSNFDLAEDAKLQLSKDTYDDDLDNLLAQIGDQYADLFLAAKNLSDAILLSDILRVNTEITKAPLSASMIKRYDEHHQDLTLLKALVRQQLPEKYKEIFFDQSKNGYAGYIDGGASQEEFYKFIKPILEKMDGTEELLVKLNREDLLRKQRTFDNGSIPHQIHLGELHAILRRQEDFYPFLKDNREKIEKILTFRIPYYVGPLARGNSRFAWMTRKSEETITPWNFEEVVDKGASAQSFIERMTNFDKNLPNEKVLPKHSLLYEYFTVYNELTKVKYVTEGMRKPAFLSGEQKKAIVDLLFKTNRKVTVKQLKEDYFKKIECFDSVEISGVEDRFNASLGTYHDLLKIIKDKDFLDNEENEDILEDIVLTLTLFEDREMIEERLKTYAHLFDDKVMKQLKRRRYTGWGRLSRKLINGIRDKQSGKTILDFLKSDGFANRNFMQLIHDDSLTFKEDIQKAQVSGQGDSLHEHIANLAGSPAIKKGILQTVKVVDELVKVMGRHKPENIVIEMARENQTTQKGQKNSRERMKRIEEGIKELGSQILKEHPVENTQLQNEKLYLYYLQNGRDMYVDQELDINRLSDYDVDHIVPQSFLKDDSIDNKVLTRSDKARGKSDNVPSEEVVKKMKNYWRQLLNAKLITQRKFDNLTKAERGGLSELDKAGFIKRQLVETRQITKHVAQILDSRMNTKYDENDKLIREVKVITLKSKLVSDFRKDFQFYKVREINNYHHAHDAYLNAVVGTALIKKYPKLESEFVYGDYKVYDVRKMIAKSEQEIGKATAKYFFYSNIMNFFKTEITLANGEIRKRPLIETNGETGEIVWDKGRDFATVRKVLSMPQVNIVKKTEVQTGGFSKESILPKRNSDKLIARKKDWDPKKYGGFDSPTVAYSVLVVAKVEKGKSKKLKSVKELLGITIMERSSFEKNPIDFLEAKGYKEVKKDLIIKLPKYSLFELENGRKRMLASAGELQKGNELALPSKYVNFLYLASHYEKLKGSPEDNEQKQLFVEQHKHYLDEIIEQISEFSKRVILADANLDKVLSAYNKHRDKPIREQAENIIHLFTLTNLGAPAAFKYFDTTIDRKRYTSTKEVLDATLIHQSITGLYETRIDLSQLGGDGGGGSGGSGGSGGSGGSGGTLNIEDEYRLHETSKGPDVPLGSTWLSDFPQAWAETGGMGLAFRQAPLIISLKATSTPVSIKQYPMSQEARLGIKPHIQRLLDQGILVPCQSPWNTPLLPVKKPGTNDYRPVQDLREVNKRVEDIHPTVPNPYNLLSGLPPSHQWYTVLDLKDAFFCLRLHPTSQSLFAFEWKDPEMGISGQLTWTRLPQGFKNSPTLFDEALHRDLADFRIQHPDLILLQYVDDLLLAATSELDCQQGTRALLQTLGDLGYRASAKKAQICQKQVKYLGYLLKEGQRWLTEARKETVMGQPTPKTPRQLREFLGTAGLCRLWIPGFAEMAAPLYPLTKTGTLFKWGPDQQKAYQEIKQALLTAPALGLPDLTKPFELFVDEKQGYAKGVLTQKLGPWRRPVAYLSKKLDPVAAGWPPCLRMVAAIAVLTKDVGKLTMGQPLVILAPHAVEALVKQPPDRWLSNARMTHYQALLLDTDRVQFGPIVALNPATLLPLPEEGLQHDCLDILAEAHGTRPDLTDQPLPDADHTWYTDGSSFLQEGQRRAGAAVTTETEVIWAKALPAGTSAQRAELIALTQALKMAAGKKLNVYTDSRYAFATAHIHGEIYRRRGLLTSEGKEIKNKDEILALLKALFLPKRLSIIHCPGHQKGNHAEARGNRMADQAAREVATRETPETSTLLAGKRTADGSEFEKRTADGSEFESPKKKAKVE

SEQ ID NO: 2418 - protein, 2096 aa, synthetic construct
MPAAKRVKLDGGDKKYSIGLDIGTNSVGWAVITDEYKVPSKKFKVLGNTDRHSIKKNLIGALLFDSGETAEATRLKRTARRRYTRRKNRICYLQEIFSNEMAKVDDSFFHRLEESFLVEEDKKHERHPIFGNIVDEVAYHEKYPTIYHLRKKLVDSTDKADLRLIYLALAHMIKFRGHFLIEGDLNPDNSDVDKLFIQLVQTYNQLFEENPINASGVDAKAILSARLSKSRRLENLIAQLPGEKKNGLFGNLIALSLGLTPNFKSNFDLAEDAKLQLSKDTYDDDLDNLLAQIGDQYADLFLAAKNLSDAILLSDILRVNTEITKAPLSASMIKRYDEHHQDLTLLKALVRQQLPEKYKEIFFDQSKNGYAGYIDGGASQEEFYKFIKPILEKMDGTEELLVKLNREDLLRKQRTFDNGSIPHQIHLGELHAILRRQEDFYPFLKDNREKIEKILTFRIPYYVGPLARGNSRFAWMTRKSEETITPWNFEEVVDKGASAQSFIERMTNFDKNLPNEKVLPKHSLLYEYFTVYNELTKVKYVTEGMRKPAFLSGEQKKAIVDLLFKTNRKVTVKQLKEDYFKKIECFDSVEISGVEDRFNASLGTYHDLLKIIKDKDFLDNEENEDILEDIVLTLTLFEDREMIEERLKTYAHLFDDKVMKQLKRRRYTGWGRLSRKLINGIRDKQSGKTILDFLKSDGFANRNFMQLIHDDSLTFKEDIQKAQVSGQGDSLHEHIANLAGSPAIKKGILQTVKVVDELVKVMGRHKPENIVIEMARENQTTQKGQKNSRERMKRIEEGIKELGSQILKEHPVENTQLQNEKLYLYYLQNGRDMYVDQELDINRLSDYDVDHIVPQSFLKDDSIDNKVLTRSDKARGKSDNVPSEEVVKKMKNYWRQLLNAKLITQRKFDNLTKAERGGLSELDKAGFIKRQLVETRQITKHVAQILDSRMNTKYDENDKLIREVKVITLKSKLVSDFRKDFQFYKVREINNYHHAHDAYLNAVVGTALIKKYPKLESEFVYGDYKVYDVRKMIAKSEQEIGKATAKYFFYSNIMNFFKTEITLANGEIRKRPLIETNGETGEIVWDKGRDFATVRKVLSMPQVNIVKKTEVQTGGFSKESILPKRNSDKLIARKKDWDPKKYGGFDSPTVAYSVLVVAKVEKGKSKKLKSVKELLGITIMERSSFEKNPIDFLEAKGYKEVKKDLIIKLPKYSLFELENGRKRMLASAGELQKGNELALPSKYVNFLYLASHYEKLKGSPEDNEQKQLFVEQHKHYLDEIIEQISEFSKRVILADANLDKVLSAYNKHRDKPIREQAENIIHLFTLTNLGAPAAFKYFDTTIDRKRYTSTKEVLDATLIHQSITGLYETRIDLSQLGGDGGEAAAKGGGPAPGGTLNIEDEYRLHETSKGPDVPLGSTWLSDFPQAWAETGGMGLAFRQAPLIISLKATSTPVSIKQYPMSQEARLGIKPHIQRLLDQGILVPCQSPWNTPLLPVKKPGTNDYRPVQDLREVNKRVEDIHPTVPNPYNLLSGLPPSHQWYTVLDLKDAFFCLRLHPTSQSLFAFEWKDPEMGISGQLTWTRLPQGFKNSPTLFDEALHRDLADFRIQHPDLILLQYVDDLLLAATSELDCQQGTRALLQTLGDLGYRASAKKAQICQKQVKYLGYLLKEGQRWLTEARKETVMGQPTPKTPRQLREFLGTAGLCRLWIPGFAEMAAPLYPLTKTGTLFKWGPDQQKAYQEIKQALLTAPALGLPDLTKPFELFVDEKQGYAKGVLTQKLGPWRRPVAYLSKKLDPVAAGWPPCLRMVAAIAVLTKDVGKLTMGQPLVILAPHAVEALVKQPPDRWLSNARMTHYQALLLDTDRVQFGPIVALNPATLLPLPEEGLQHDCLDILAEAHGTRPDLTDQPLPDADHTWYTDGSSFLQEGQRRAGAAVTTETEVIWAKALPAGTSAQRAELIALTQALKMAAGKKLNVYTDSRYAFATAHIHGEIYRRRGLLTSEGKEIKNKDEILALLKALFLPKRLSIIHCPGHQKGNHAEARGNRMADQAAREVATRETPETSTLLAGKRTADGSEFEKRTADGSEFESPKKKAKVE

SEQ ID NO: 2419 - protein, 2094 aa, synthetic construct
MPAAKRVKLDGGDKKYSIGLDIGTNSVGWAVITDEYKVPSKKFKVLGNTDRHSIKKNLIGALLFDSGETAEATRLKRTARRRYTRRKNRICYLQEIFSNEMAKVDDSFFHRLEESFLVEEDKKHERHPIFGNIVDEVAYHEKYPTIYHLRKKLVDSTDKADLRLIYLALAHMIKFRGHFLIEGDLNPDNSDVDKLFIQLVQTYNQLFEENPINASGVDAKAILSARLSKSRRLENLIAQLPGEKKNGLFGNLIALSLGLTPNFKSNFDLAEDAKLQLSKDTYDDDLDNLLAQIGDQYADLFLAAKNLSDAILLSDILRVNTEITKAPLSASMIKRYDEHHQDLTLLKALVRQQLPEKYKEIFFDQSKNGYAGYIDGGASQEEFYKFIKPILEKMDGTEELLVKLNREDLLRKQRTFDNGSIPHQIHLGELHAILRRQEDFYPFLKDNREKIEKILTFRIPYYVGPLARGNSRFAWMTRKSEETITPWNFEEVVDKGASAQSFIERMTNFDKNLPNEKVLPKHSLLYEYFTVYNELTKVKYVTEGMRKPAFLSGEQKKAIVDLLFKTNRKVTVKQLKEDYFKKIECFDSVEISGVEDRFNASLGTYHDLLKIIKDKDFLDNEENEDILEDIVLTLTLFEDREMIEERLKTYAHLFDDKVMKQLKRRRYTGWGRLSRKLINGIRDKQSGKTILDFLKSDGFANRNFMQLIHDDSLTFKEDIQKAQVSGQGDSLHEHIANLAGSPAIKKGILQTVKVVDELVKVMGRHKPENIVIEMARENQTTQKGQKNSRERMKRIEEGIKELGSQILKEHPVENTQLQNEKLYLYYLQNGRDMYVDQELDINRLSDYDVDHIVPQSFLKDDSIDNKVLTRSDKARGKSDNVPSEEVVKKMKNYWRQLLNAKLITQRKFDNLTKAERGGLSELDKAGFIKRQLVETRQITKHVAQILDSRMNTKYDENDKLIREVKVITLKSKLVSDFRKDFQFYKVREINNYHHAHDAYLNAVVGTALIKKYPKLESEFVYGDYKVYDVRKMIAKSEQEIGKATAKYFFYSNIMNFFKTEITLANGEIRKRPLIETNGETGEIVWDKGRDFATVRKVLSMPQVNIVKKTEVQTGGFSKESILPKRNSDKLIARKKDWDPKKYGGFDSPTVAYSVLVVAKVEKGKSKKLKSVKELLGITIMERSSFEKNPIDFLEAKGYKEVKKDLIIKLPKYSLFELENGRKRMLASAGELQKGNELALPSKYVNFLYLASHYEKLKGSPEDNEQKQLFVEQHKHYLDEIIEQISEFSKRVILADANLDKVLSAYNKHRDKPIREQAENIIHLFTLTNLGAPAAFKYFDTTIDRKRYTSTKEVLDATLIHQSITGLYETRIDLSQLGGDGGGSSGGSGGGGGTLNIEDEYRLHETSKGPDVPLGSTWLSDFPQAWAETGGMGLAFRQAPLIISLKATSTPVSIKQYPMSQEARLGIKPHIQRLLDQGILVPCQSPWNTPLLPVKKPGTNDYRPVQDLREVNKRVEDIHPTVPNPYNLLSGLPPSHQWYTVLDLKDAFFCLRLHPTSQSLFAFEWKDPEMGISGQLTWTRLPQGFKNSPTLFDEALHRDLADFRIQHPDLILLQYVDDLLLAATSELDCQQGTRALLQTLGDLGYRASAKKAQICQKQVKYLGYLLKEGQRWLTEARKETVMGQPTPKTPRQLREFLGTAGLCRLWIPGFAEMAAPLYPLTKTGTLFKWGPDQQKAYQEIKQALLTAPALGLPDLTKPFELFVDEKQGYAKGVLTQKLGPWRRPVAYLSKKLDPVAAGWPPCLRMVAAIAVLTKDVGKLTMGQPLVILAPHAVEALVKQPPDRWLSNARMTHYQALLLDTDRVQFGPIVALNPATLLPLPEEGLQHDCLDILAEAHGTRPDLTDQPLPDADHTWYTDGSSFLQEGQRRAGAAVTTETEVIWAKALPAGTSAQRAELIALTQALKMAAGKKLNVYTDSRYAFATAHIHGEIYRRRGLLTSEGKEIKNKDEILALLKALFLPKRLSIIHCPGHQKGNHAEARGNRMADQAAREVATRETPETSTLLAGKRTADGSEFEKRTADGSEFESPKKKAKVE

SEQ ID NO: 2420 - protein, 2096 aa, synthetic construct
MPAAKRVKLDGGDKKYSIGLDIGTNSVGWAVITDEYKVPSKKFKVLGNTDRHSIKKNLIGALLFDSGETAEATRLKRTARRRYTRRKNRICYLQEIFSNEMAKVDDSFFHRLEESFLVEEDKKHERHPIFGNIVDEVAYHEKYPTIYHLRKKLVDSTDKADLRLIYLALAHMIKFRGHFLIEGDLNPDNSDVDKLFIQLVQTYNQLFEENPINASGVDAKAILSARLSKSRRLENLIAQLPGEKKNGLFGNLIALSLGLTPNFKSNFDLAEDAKLQLSKDTYDDDLDNLLAQIGDQYADLFLAAKNLSDAILLSDILRVNTEITKAPLSASMIKRYDEHHQDLTLLKALVRQQLPEKYKEIFFDQSKNGYAGYIDGGASQEEFYKFIKPILEKMDGTEELLVKLNREDLLRKQRTFDNGSIPHQIHLGELHAILRRQEDFYPFLKDNREKIEKILTFRIPYYVGPLARGNSRFAWMTRKSEETITPWNFEEVVDKGASAQSFIERMTNFDKNLPNEKVLPKHSLLYEYFTVYNELTKVKYVTEGMRKPAFLSGEQKKAIVDLLFKTNRKVTVKQLKEDYFKKIECFDSVEISGVEDRFNASLGTYHDLLKIIKDKDFLDNEENEDILEDIVLTLTLFEDREMIEERLKTYAHLFDDKVMKQLKRRRYTGWGRLSRKLINGIRDKQSGKTILDFLKSDGFANRNFMQLIHDDSLTFKEDIQKAQVSGQGDSLHEHIANLAGSPAIKKGILQTVKVVDELVKVMGRHKPENIVIEMARENQTTQKGQKNSRERMKRIEEGIKELGSQILKEHPVENTQLQNEKLYLYYLQNGRDMYVDQELDINRLSDYDVDHIVPQSFLKDDSIDNKVLTRSDKARGKSDNVPSEEVVKKMKNYWRQLLNAKLITQRKFDNLTKAERGGLSELDKAGFIKRQLVETRQITKHVAQILDSRMNTKYDENDKLIREVKVITLKSKLVSDFRKDFQFYKVREINNYHHAHDAYLNAVVGTALIKKYPKLESEFVYGDYKVYDVRKMIAKSEQEIGKATAKYFFYSNIMNFFKTEITLANGEIRKRPLIETNGETGEIVWDKGRDFATVRKVLSMPQVNIVKKTEVQTGGFSKESILPKRNSDKLIARKKDWDPKKYGGFDSPTVAYSVLVVAKVEKGKSKKLKSVKELLGITIMERSSFEKNPIDFLEAKGYKEVKKDLIIKLPKYSLFELENGRKRMLASAGELQKGNELALPSKYVNFLYLASHYEKLKGSPEDNEQKQLFVEQHKHYLDEIIEQISEFSKRVILADANLDKVLSAYNKHRDKPIREQAENIIHLFTLTNLGAPAAFKYFDTTIDRKRYTSTKEVLDATLIHQSITGLYETRIDLSQLGGDGGPAPEAAAKGGGGGTLNIEDEYRLHETSKGPDVPLGSTWLSDFPQAWAETGGMGLAFRQAPLIISLKATSTPVSIKQYPMSQEARLGIKPHIQRLLDQGILVPCQSPWNTPLLPVKKPGTNDYRPVQDLREVNKRVEDIHPTVPNPYNLLSGLPPSHQWYTVLDLKDAFFCLRLHPTSQSLFAFEWKDPEMGISGQLTWTRLPQGFKNSPTLFDEALHRDLADFRIQHPDLILLQYVDDLLLAATSELDCQQGTRALLQTLGDLGYRASAKKAQICQKQVKYLGYLLKEGQRWLTEARKETVMGQPTPKTPRQLREFLGTAGLCRLWIPGFAEMAAPLYPLTKTGTLFKWGPDQQKAYQEIKQALLTAPALGLPDLTKPFELFVDEKQGYAKGVLTQKLGPWRRPVAYLSKKLDPVAAGWPPCLRMVAAIAVLTKDVGKLTMGQPLVILAPHAVEALVKQPPDRWLSNARMTHYQALLLDTDRVQFGPIVALNPATLLPLPEEGLQHDCLDILAEAHGTRPDLTDQPLPDADHTWYTDGSSFLQEGQRRAGAAVTTETEVIWAKALPAGTSAQRAELIALTQALKMAAGKKLNVYTDSRYAFATAHIHGEIYRRRGLLTSEGKEIKNKDEILALLKALFLPKRLSIIHCPGHQKGNHAEARGNRMADQAAREVATRETPETSTLLAGKRTADGSEFEKRTADGSEFESPKKKAKVE

SEQ ID NO: 2421 - protein, 2008 aa, synthetic construct
MPAAKRVKLDGGDKKYSIGLDIGTNSVGWAVITDEYKVPSKKFKVLGNTDRHSIKKNLIGALLFDSGETAEATRLKRTARRRYTRRKNRICYLQEIFSNEMAKVDDSFFHRLEESFLVEEDKKHERHPIFGNIVDEVAYHEKYPTIYHLRKKLVDSTDKADLRLIYLALAHMIKFRGHFLIEGDLNPDNSDVDKLFIQLVQTYNQLFEENPINASGVDAKAILSARLSKSRRLENLIAQLPGEKKNGLFGNLIALSLGLTPNFKSNFDLAEDAKLQLSKDTYDDDLDNLLAQIGDQYADLFLAAKNLSDAILLSDILRVNTEITKAPLSASMIKRYDEHHQDLTLLKALVRQQLPEKYKEIFFDQSKNGYAGYIDGGASQEEFYKFIKPILEKMDGTEELLVKLNREDLLRKQRTFDNGSIPHQIHLGELHAILRRQEDFYPFLKDNREKIEKILTFRIPYYVGPLARGNSRFAWMTRKSEETITPWNFEEVVDKGASAQSFIERMTNFDKNLPNEKVLPKHSLLYEYFTVYNELTKVKYVTEGMRKPAFLSGEQKKAIVDLLFKTNRKVTVKQLKEDYFKKIECFDSVEISGVEDRFNASLGTYHDLLKIIKDKDFLDNEENEDILEDIVLTLTLFEDREMIEERLKTYAHLFDDKVMKQLKRRRYTGWGRLSRKLINGIRDKQSGKTILDFLKSDGFANRNFMQLIHDDSLTFKEDIQKAQVSGQGDSLHEHIANLAGSPAIKKGILQTVKVVDELVKVMGRHKPENIVIEMARENQTTQKGQKNSRERMKRIEEGIKELGSQILKEHPVENTQLQNEKLYLYYLQNGRDMYVDQELDINRLSDYDVDHIVPQSFLKDDSIDNKVLTRSDKARGKSDNVPSEEVVKKMKNYWRQLLNAKLITQRKFDNLTKAERGGLSELDKAGFIKRQLVETRQITKHVAQILDSRMNTKYDENDKLIREVKVITLKSKLVSDFRKDFQFYKVREINNYHHAHDAYLNAVVGTALIKKYPKLESEFVYGDYKVYDVRKMIAKSEQEIGKATAKYFFYSNIMNFFKTEITLANGEIRKRPLIETNGETGEIVWDKGRDFATVRKVLSMPQVNIVKKTEVQTGGFSKESILPKRNSDKLIARKKDWDPKKYGGFDSPTVAYSVLVVAKVEKGKSKKLKSVKELLGITIMERSSFEKNPIDFLEAKGYKEVKKDLIIKLPKYSLFELENGRKRMLASAGELQKGNELALPSKYVNFLYLASHYEKLKGSPEDNEQKQLFVEQHKHYLDEIIEQISEFSKRVILADANLDKVLSAYNKHRDKPIREQAENIIHLFTLTNLGAPAAFKYFDTTIDRKRYTSTKEVLDATLIHQSITGLYETRIDLSQLGGDGGGGSGGSGGSGGSGGSGGSGGGVLDAPPSHIGLEHLPPPPEVPQFPLNLERLQALQDLVHRSLEAGYISPWDGPGNNPVFPVRKPNGAWRFVHDLRVTNALTKPIPALSPGPPDLTAIPTHLPHIICLDLKDAFFQIPVEDRFRSYFAFTLPTPGGLQPHRRFAWRVLPQGFINSPALFERALQEPLRQVSAAFSQSLLVSYMDDILYVSPTEEQRLQCYQTMAAHLRDLGFQVASEKTRQTPSPVPFLGQMVHERMVTYQSLPTLQISSPISLHQLQTVLGDLQWVSRGTPTTRRPLQLLYSSLKGIDDPRAIIHLSPEQQQGIAELRQALSHNARSRYNEQEPLLAYVHLTRAGSTLVLFQKGAQFPLAYFQTPLTDNQASPWGLLLLLGCQYLQAQALSSYAKTILKYYHNLPKTSLDNWIQSSEDPRVQELLQLWPQISSQGIQPPGPWKTLVTRAEVFLTPQFSPEPIPAALCLFSDGAARRGAYCLWKDHLLDFQAVPAPESAQKGELAGLLAGLAAAPPEPLNIWVDSKYLYSLLRTLVLGAWLQPDPVPSYALLYKSLLRHPAIFVGHVRSHSSASHPIASLNNYVDQLAGKRTADGSEFEKRTADGSEFESPKKKAKVE

SEQ ID NO: 2422 - protein, 2093 aa, synthetic construct
MPAAKRVKLDGGDKKYSIGLDIGTNSVGWAVITDEYKVPSKKFKVLGNTDRHSIKKNLIGALLFDSGETAEATRLKRTARRRYTRRKNRICYLQEIFSNEMAKVDDSFFHRLEESFLVEEDKKHERHPIFGNIVDEVAYHEKYPTIYHLRKKLVDSTDKADLRLIYLALAHMIKFRGHFLIEGDLNPDNSDVDKLFIQLVQTYNQLFEENPINASGVDAKAILSARLSKSRRLENLIAQLPGEKKNGLFGNLIALSLGLTPNFKSNFDLAEDAKLQLSKDTYDDDLDNLLAQIGDQYADLFLAAKNLSDAILLSDILRVNTEITKAPLSASMIKRYDEHHQDLTLLKALVRQQLPEKYKEIFFDQSKNGYAGYIDGGASQEEFYKFIKPILEKMDGTEELLVKLNREDLLRKQRTFDNGSIPHQIHLGELHAILRRQEDFYPFLKDNREKIEKILTFRIPYYVGPLARGNSRFAWMTRKSEETITPWNFEEVVDKGASAQSFIERMTNFDKNLPNEKVLPKHSLLYEYFTVYNELTKVKYVTEGMRKPAFLSGEQKKAIVDLLFKTNRKVTVKQLKEDYFKKIECFDSVEISGVEDRFNASLGTYHDLLKIIKDKDFLDNEENEDILEDIVLTLTLFEDREMIEERLKTYAHLFDDKVMKQLKRRRYTGWGRLSRKLINGIRDKQSGKTILDFLKSDGFANRNFMQLIHDDSLTFKEDIQKAQVSGQGDSLHEHIANLAGSPAIKKGILQTVKVVDELVKVMGRHKPENIVIEMARENQTTQKGQKNSRERMKRIEEGIKELGSQILKEHPVENTQLQNEKLYLYYLQNGRDMYVDQELDINRLSDYDVDHIVPQSFLKDDSIDNKVLTRSDKARGKSDNVPSEEVVKKMKNYWRQLLNAKLITQRKFDNLTKAERGGLSELDKAGFIKRQLVETRQITKHVAQILDSRMNTKYDENDKLIREVKVITLKSKLVSDFRKDFQFYKVREINNYHHAHDAYLNAVVGTALIKKYPKLESEFVYGDYKVYDVRKMIAKSEQEIGKATAKYFFYSNIMNFFKTEITLANGEIRKRPLIETNGETGEIVWDKGRDFATVRKVLSMPQVNIVKKTEVQTGGFSKESILPKRNSDKLIARKKDWDPKKYGGFDSPTVAYSVLVVAKVEKGKSKKLKSVKELLGITIMERSSFEKNPIDFLEAKGYKEVKKDLIIKLPKYSLFELENGRKRMLASAGELQKGNELALPSKYVNFLYLASHYEKLKGSPEDNEQKQLFVEQHKHYLDEIIEQISEFSKRVILADANLDKVLSAYNKHRDKPIREQAENIIHLFTLTNLGAPAAFKYFDTTIDRKRYTSTKEVLDATLIHQSITGLYETRIDLSQLGGDGGEAAAKPAPGGTLNIEDEYRLHETSKGPDVPLGSTWLSDFPQAWAETGGMGLAFRQAPLIISLKATSTPVSIKQYPMSQEARLGIKPHIQRLLDQGILVPCQSPWNTPLLPVKKPGTNDYRPVQDLREVNKRVEDIHPTVPNPYNLLSGLPPSHQWYTVLDLKDAFFCLRLHPTSQSLFAFEWKDPEMGISGQLTWTRLPQGFKNSPTLFNEALHRDLADFRIQHPDLILLQYVDDLLLAATSELDCQQGTRALLQTLGDLGYRASAKKAQICQKQVKYLGYLLKEGQRWLTEARKETVMGQPTPKTPRQLREFLGTAGLCRLWIPGFAEMAAPLYPLTKPGTLFKWGPDQQKAYQEIKQALLTAPALGLPDLTKPFELFVDEKQGYAKGVLTQKLGPWRRPVAYLSKKLDPVAAGWPPCLRMVAAIAVLTKDVGKLTMGQPLVILAPHAVEALVKQPPDRWLSNARMTHYQALLLDTDRVQFGPIVALNPATLLPLPEEGLQHDCLDILAEAHGTRPDLTDQPLPDADHTWYTDGSSFLQEGQRRAGAAVTTETEVIWAKALPAGTSAQRAELIALTQALKMAAGKKLNVYTDSRYAFATAHIHGEIYRRRGWLTSEGKEIKNKDEILALLKALFLPKRLSIIHCPGHQKGNHAEARGNRMADQAAREVATRETPETSTLLAGKRTADGSEFEKRTADGSEFESPKKKAKVE

SEQ ID NO: 2423 - protein, 2096 aa, synthetic construct
MPAAKRVKLDGGDKKYSIGLDIGTNSVGWAVITDEYKVPSKKFKVLGNTDRHSIKKNLIGALLFDSGETAEATRLKRTARRRYTRRKNRICYLQEIFSNEMAKVDDSFFHRLEESFLVEEDKKHERHPIFGNIVDEVAYHEKYPTIYHLRKKLVDSTDKADLRLIYLALAHMIKFRGHFLIEGDLNPDNSDVDKLFIQLVQTYNQLFEENPINASGVDAKAILSARLSKSRRLENLIAQLPGEKKNGLFGNLIALSLGLTPNFKSNFDLAEDAKLQLSKDTYDDDLDNLLAQIGDQYADLFLAAKNLSDAILLSDILRVNTEITKAPLSASMIKRYDEHHQDLTLLKALVRQQLPEKYKEIFFDQSKNGYAGYIDGGASQEEFYKFIKPILEKMDGTEELLVKLNREDLLRKQRTFDNGSIPHQIHLGELHAILRRQEDFYPFLKDNREKIEKILTFRIPYYVGPLARGNSRFAWMTRKSEETITPWNFEEVVDKGASAQSFIERMTNFDKNLPNEKVLPKHSLLYEYFTVYNELTKVKYVTEGMRKPAFLSGEQKKAIVDLLFKTNRKVTVKQLKEDYFKKIECFDSVEISGVEDRFNASLGTYHDLLKIIKDKDFLDNEENEDILEDIVLTLTLFEDREMIEERLKTYAHLFDDKVMKQLKRRRYTGWGRLSRKLINGIRDKQSGKTILDFLKSDGFANRNFMQLIHDDSLTFKEDIQKAQVSGQGDSLHEHIANLAGSPAIKKGILQTVKVVDELVKVMGRHKPENIVIEMARENQTTQKGQKNSRERMKRIEEGIKELGSQILKEHPVENTQLQNEKLYLYYLQNGRDMYVDQELDINRLSDYDVDHIVPQSFLKDDSIDNKVLTRSDKARGKSDNVPSEEVVKKMKNYWRQLLNAKLITQRKFDNLTKAERGGLSELDKAGFIKRQLVETRQITKHVAQILDSRMNTKYDENDKLIREVKVITLKSKLVSDFRKDFQFYKVREINNYHHAHDAYLNAVVGTALIKKYPKLESEFVYGDYKVYDVRKMIAKSEQEIGKATAKYFFYSNIMNFFKTEITLANGEIRKRPLIETNGETGEIVWDKGRDFATVRKVLSMPQVNIVKKTEVQTGGFSKESILPKRNSDKLIARKKDWDPKKYGGFDSPTVAYSVLVVAKVEKGKSKKLKSVKELLGITIMERSSFEKNPIDFLEAKGYKEVKKDLIIKLPKYSLFELENGRKRMLASAGELQKGNELALPSKYVNFLYLASHYEKLKGSPEDNEQKQLFVEQHKHYLDEIIEQISEFSKRVILADANLDKVLSAYNKHRDKPIREQAENIIHLFTLTNLGAPAAFKYFDTTIDRKRYTSTKEVLDATLIHQSITGLYETRIDLSQLGGDGGPAPAPAPAPAPGGTLNIEDEYRLHETSKGPDVPLGSTWLSDFPQAWAETGGMGLAFRQAPLIISLKATSTPVSIKQYPMSQEARLGIKPHIQRLLDQGILVPCQSPWNTPLLPVKKPGTNDYRPVQDLREVNKRVEDIHPTVPNPYNLLSGLPPSHQWYTVLDLKDAFFCLRLHPTSQSLFAFEWKDPEMGISGQLTWTRLPQGFKNSPTLFNEALHRDLADFRIQHPDLILLQYVDDLLLAATSELDCQQGTRALLQTLGDLGYRASAKKAQICQKQVKYLGYLLKEGQRWLTEARKETVMGQPTPKTPRQLREFLGTAGLCRLWIPGFAEMAAPLYPLTKPGTLFKWGPDQQKAYQEIKQALLTAPALGLPDLTKPFELFVDEKQGYAKGVLTQKLGPWRRPVAYLSKKLDPVAAGWPPCLRMVAAIAVLTKDVGKLTMGQPLVILAPHAVEALVKQPPDRWLSNARMTHYQALLLDTDRVQFGPIVALNPATLLPLPEEGLQHDCLDILAEAHGTRPDLTDQPLPDADHTWYTDGSSFLQEGQRRAGAAVTTETEVIWAKALPAGTSAQRAELIALTQALKMAAGKKLNVYTDSRYAFATAHIHGEIYRRRGWLTSEGKEIKNKDEILALLKALFLPKRLSIIHCPGHQKGNHAEARGNRMADQAAREVATRETPETSTLLAGKRTADGSEFEKRTADGSEFESPKKKAKVE

SEQ ID NO: 2424 - protein, 2089 aa, synthetic construct
MPAAKRVKLDGGDKKYSIGLDIGTNSVGWAVITDEYKVPSKKFKVLGNTDRHSIKKNLIGALLFDSGETAEATRLKRTARRRYTRRKNRICYLQEIFSNEMAKVDDSFFHRLEESFLVEEDKKHERHPIFGNIVDEVAYHEKYPTIYHLRKKLVDSTDKADLRLIYLALAHMIKFRGHFLIEGDLNPDNSDVDKLFIQLVQTYNQLFEENPINASGVDAKAILSARLSKSRRLENLIAQLPGEKKNGLFGNLIALSLGLTPNFKSNFDLAEDAKLQLSKDTYDDDLDNLLAQIGDQYADLFLAAKNLSDAILLSDILRVNTEITKAPLSASMIKRYDEHHQDLTLLKALVRQQLPEKYKEIFFDQSKNGYAGYIDGGASQEEFYKFIKPILEKMDGTEELLVKLNREDLLRKQRTFDNGSIPHQIHLGELHAILRRQEDFYPFLKDNREKIEKILTFRIPYYVGPLARGNSRFAWMTRKSEETITPWNFEEVVDKGASAQSFIERMTNFDKNLPNEKVLPKHSLLYEYFTVYNELTKVKYVTEGMRKPAFLSGEQKKAIVDLLFKTNRKVTVKQLKEDYFKKIECFDSVEISGVEDRFNASLGTYHDLLKIIKDKDFLDNEENEDILEDIVLTLTLFEDREMIEERLKTYAHLFDDKVMKQLKRRRYTGWGRLSRKLINGIRDKQSGKTILDFLKSDGFANRNFMQLIHDDSLTFKEDIQKAQVSGQGDSLHEHIANLAGSPAIKKGILQTVKVVDELVKVMGRHKPENIVIEMARENQTTQKGQKNSRERMKRIEEGIKELGSQILKEHPVENTQLQNEKLYLYYLQNGRDMYVDQELDINRLSDYDVDHIVPQSFLKDDSIDNKVLTRSDKARGKSDNVPSEEVVKKMKNYWRQLLNAKLITQRKFDNLTKAERGGLSELDKAGFIKRQLVETRQITKHVAQILDSRMNTKYDENDKLIREVKVITLKSKLVSDFRKDFQFYKVREINNYHHAHDAYLNAVVGTALIKKYPKLESEFVYGDYKVYDVRKMIAKSEQEIGKATAKYFFYSNIMNFFKTEITLANGEIRKRPLIETNGETGEIVWDKGRDFATVRKVLSMPQVNIVKKTEVQTGGFSKESILPKRNSDKLIARKKDWDPKKYGGFDSPTVAYSVLVVAKVEKGKSKKLKSVKELLGITIMERSSFEKNPIDFLEAKGYKEVKKDLIIKLPKYSLFELENGRKRMLASAGELQKGNELALPSKYVNFLYLASHYEKLKGSPEDNEQKQLFVEQHKHYLDEIIEQISEFSKRVILADANLDKVLSAYNKHRDKPIREQAENIIHLFTLTNLGAPAAFKYFDTTIDRKRYTSTKEVLDATLIHQSITGLYETRIDLSQLGGDGGGGGGGGTLNIEDEYRLHETSKGPDVPLGSTWLSDFPQAWAETGGMGLAFRQAPLIISLKATSTPVSIKQYPMSQEARLGIKPHIQRLLDQGILVPCQSPWNTPLLPVKKPGTNDYRPVQDLREVNKRVEDIHPTVPNPYNLLSGLPPSHQWYTVLDLKDAFFCLRLHPTSQSLFAFEWKDPEMGISGQLTWTRLPQGFKNSPTLFNEALHRDLADFRIQHPDLILLQYVDDLLLAATSELDCQQGTRALLQTLGDLGYRASAKKAQICQKQVKYLGYLLKEGQRWLTEARKETVMGQPTPKTPRQLREFLGTAGLCRLWIPGFAEMAAPLYPLTKPGTLFKWGPDQQKAYQEIKQALLTAPALGLPDLTKPFELFVDEKQGYAKGVLTQKLGPWRRPVAYLSKKLDPVAAGWPPCLRMVAAIAVLTKDVGKLTMGQPLVILAPHAVEALVKQPPDRWLSNARMTHYQALLLDTDRVQFGPIVALNPATLLPLPEEGLQHDCLDILAEAHGTRPDLTDQPLPDADHTWYTDGSSFLQEGQRRAGAAVTTETEVIWAKALPAGTSAQRAELIALTQALKMAAGKKLNVYTDSRYAFATAHIHGEIYRRRGWLTSEGKEIKNKDEILALLKALFLPKRLSIIHCPGHQKGNHAEARGNRMADQAAREVATRETPETSTLLAGKRTADGSEFEKRTADGSEFESPKKKAKVE

SEQ ID NO: 2425 - protein, 2094 aa, synthetic construct
MPAAKRVKLDGGDKKYSIGLDIGTNSVGWAVITDEYKVPSKKFKVLGNTDRHSIKKNLIGALLFDSGETAEATRLKRTARRRYTRRKNRICYLQEIFSNEMAKVDDSFFHRLEESFLVEEDKKHERHPIFGNIVDEVAYHEKYPTIYHLRKKLVDSTDKADLRLIYLALAHMIKFRGHFLIEGDLNPDNSDVDKLFIQLVQTYNQLFEENPINASGVDAKAILSARLSKSRRLENLIAQLPGEKKNGLFGNLIALSLGLTPNFKSNFDLAEDAKLQLSKDTYDDDLDNLLAQIGDQYADLFLAAKNLSDAILLSDILRVNTEITKAPLSASMIKRYDEHHQDLTLLKALVRQQLPEKYKEIFFDQSKNGYAGYIDGGASQEEFYKFIKPILEKMDGTEELLVKLNREDLLRKQRTFDNGSIPHQIHLGELHAILRRQEDFYPFLKDNREKIEKILTFRIPYYVGPLARGNSRFAWMTRKSEETITPWNFEEVVDKGASAQSFIERMTNFDKNLPNEKVLPKHSLLYEYFTVYNELTKVKYVTEGMRKPAFLSGEQKKAIVDLLFKTNRKVTVKQLKEDYFKKIECFDSVEISGVEDRFNASLGTYHDLLKIIKDKDFLDNEENEDILEDIVLTLTLFEDREMIEERLKTYAHLFDDKVMKQLKRRRYTGWGRLSRKLINGIRDKQSGKTILDFLKSDGFANRNFMQLIHDDSLTFKEDIQKAQVSGQGDSLHEHIANLAGSPAIKKGILQTVKVVDELVKVMGRHKPENIVIEMARENQTTQKGQKNSRERMKRIEEGIKELGSQILKEHPVENTQLQNEKLYLYYLQNGRDMYVDQELDINRLSDYDVDHIVPQSFLKDDSIDNKVLTRSDKARGKSDNVPSEEVVKKMKNYWRQLLNAKLITQRKFDNLTKAERGGLSELDKAGFIKRQLVETRQITKHVAQILDSRMNTKYDENDKLIREVKVITLKSKLVSDFRKDFQFYKVREINNYHHAHDAYLNAVVGTALIKKYPKLESEFVYGDYKVYDVRKMIAKSEQEIGKATAKYFFYSNIMNFFKTEITLANGEIRKRPLIETNGETGEIVWDKGRDFATVRKVLSMPQVNIVKKTEVQTGGFSKESILPKRNSDKLIARKKDWDPKKYGGFDSPTVAYSVLVVAKVEKGKSKKLKSVKELLGITIMERSSFEKNPIDFLEAKGYKEVKKDLIIKLPKYSLFELENGRKRMLASAGELQKGNELALPSKYVNFLYLASHYEKLKGSPEDNEQKQLFVEQHKHYLDEIIEQISEFSKRVILADANLDKVLSAYNKHRDKPIREQAENIIHLFTLTNLGAPAAFKYFDTTIDRKRYTSTKEVLDATLIHQSITGLYETRIDLSQLGGDGGGSSGGGGGSGGTLNIEDEYRLHETSKGPDVPLGSTWLSDFPQAWAETGGMGLAFRQAPLIISLKATSTPVSIKQYPMSQEARLGIKPHIQRLLDQGILVPCQSPWNTPLLPVKKPGTNDYRPVQDLREVNKRVEDIHPTVPNPYNLLSGLPPSHQWYTVLDLKDAFFCLRLHPTSQSLFAFEWKDPEMGISGQLTWTRLPQGFKNSPTLFNEALHRDLADFRIQHPDLILLQYVDDLLLAATSELDCQQGTRALLQTLGDLGYRASAKKAQICQKQVKYLGYLLKEGQRWLTEARKETVMGQPTPKTPRQLREFLGTAGLCRLWIPGFAEMAAPLYPLTKPGTLFKWGPDQQKAYQEIKQALLTAPALGLPDLTKPFELFVDEKQGYAKGVLTQKLGPWRRPVAYLSKKLDPVAAGWPPCLRMVAAIAVLTKDVGKLTMGQPLVILAPHAVEALVKQPPDRWLSNARMTHYQALLLDTDRVQFGPIVALNPATLLPLPEEGLQHDCLDILAEAHGTRPDLTDQPLPDADHTWYTDGSSFLQEGQRRAGAAVTTETEVIWAKALPAGTSAQRAELIALTQALKMAAGKKLNVYTDSRYAFATAHIHGEIYRRRGWLTSEGKEIKNKDEILALLKALFLPKRLSIIHCPGHQKGNHAEARGNRMADQAAREVATRETPETSTLLAGKRTADGSEFEKRTADGSEFESPKKKAKVE

SEQ ID NO: 2426 - protein, 2093 aa, synthetic construct
MPAAKRVKLDGGDKKYSIGLDIGTNSVGWAVITDEYKVPSKKFKVLGNTDRHSIKKNLIGALLFDSGETAEATRLKRTARRRYTRRKNRICYLQEIFSNEMAKVDDSFFHRLEESFLVEEDKKHERHPIFGNIVDEVAYHEKYPTIYHLRKKLVDSTDKADLRLIYLALAHMIKFRGHFLIEGDLNPDNSDVDKLFIQLVQTYNQLFEENPINASGVDAKAILSARLSKSRRLENLIAQLPGEKKNGLFGNLIALSLGLTPNFKSNFDLAEDAKLQLSKDTYDDDLDNLLAQIGDQYADLFLAAKNLSDAILLSDILRVNTEITKAPLSASMIKRYDEHHQDLTLLKALVRQQLPEKYKEIFFDQSKNGYAGYIDGGASQEEFYKFIKPILEKMDGTEELLVKLNREDLLRKQRTFDNGSIPHQIHLGELHAILRRQEDFYPFLKDNREKIEKILTFRIPYYVGPLARGNSRFAWMTRKSEETITPWNFEEVVDKGASAQSFIERMTNFDKNLPNEKVLPKHSLLYEYFTVYNELTKVKYVTEGMRKPAFLSGEQKKAIVDLLFKTNRKVTVKQLKEDYFKKIECFDSVEISGVEDRFNASLGTYHDLLKIIKDKDFLDNEENEDILEDIVLTLTLFEDREMIEERLKTYAHLFDDKVMKQLKRRRYTGWGRLSRKLINGIRDKQSGKTILDFLKSDGFANRNFMQLIHDDSLTFKEDIQKAQVSGQGDSLHEHIANLAGSPAIKKGILQTVKVVDELVKVMGRHKPENIVIEMARENQTTQKGQKNSRERMKRIEEGIKELGSQILKEHPVENTQLQNEKLYLYYLQNGRDMYVDQELDINRLSDYDVDHIVPQSFLKDDSIDNKVLTRSDKARGKSDNVPSEEVVKKMKNYWRQLLNAKLITQRKFDNLTKAERGGLSELDKAGFIKRQLVETRQITKHVAQILDSRMNTKYDENDKLIREVKVITLKSKLVSDFRKDFQFYKVREINNYHHAHDAYLNAVVGTALIKKYPKLESEFVYGDYKVYDVRKMIAKSEQEIGKATAKYFFYSNIMNFFKTEITLANGEIRKRPLIETNGETGEIVWDKGRDFATVRKVLSMPQVNIVKKTEVQTGGFSKESILPKRNSDKLIARKKDWDPKKYGGFDSPTVAYSVLVVAKVEKGKSKKLKSVKELLGITIMERSSFEKNPIDFLEAKGYKEVKKDLIIKLPKYSLFELENGRKRMLASAGELQKGNELALPSKYVNFLYLASHYEKLKGSPEDNEQKQLFVEQHKHYLDEIIEQISEFSKRVILADANLDKVLSAYNKHRDKPIREQAENIIHLFTLTNLGAPAAFKYFDTTIDRKRYTSTKEVLDATLIHQSITGLYETRIDLSQLGGDGGEAAAKGGSGGTLNIEDEYRLHETSKGPDVPLGSTWLSDFPQAWAETGGMGLAFRQAPLIISLKATSTPVSIKQYPMSQEARLGIKPHIQRLLDQGILVPCQSPWNTPLLPVKKPGTNDYRPVQDLREVNKRVEDIHPTVPNPYNLLSGLPPSHQWYTVLDLKDAFFCLRLHPTSQSLFAFEWKDPEMGISGQLTWTRLPQGFKNSPTLFNEALHRDLADFRIQHPDLILLQYVDDLLLAATSELDCQQGTRALLQTLGDLGYRASAKKAQICQKQVKYLGYLLKEGQRWLTEARKETVMGQPTPKTPRQLREFLGTAGLCRLWIPGFAEMAAPLYPLTKPGTLFKWGPDQQKAYQEIKQALLTAPALGLPDLTKPFELFVDEKQGYAKGVLTQKLGPWRRPVAYLSKKLDPVAAGWPPCLRMVAAIAVLTKDVGKLTMGQPLVILAPHAVEALVKQPPDRWLSNARMTHYQALLLDTDRVQFGPIVALNPATLLPLPEEGLQHDCLDILAEAHGTRPDLTDQPLPDADHTWYTDGSSFLQEGQRRAGAAVTTETEVIWAKALPAGTSAQRAELIALTQALKMAAGKKLNVYTDSRYAFATAHIHGEIYRRRGWLTSEGKEIKNKDEILALLKALFLPKRLSIIHCPGHQKGNHAEARGNRMADQAAREVATRETPETSTLLAGKRTADGSEFEKRTADGSEFESPKKKAKVE

SEQ ID NO: 2427 - protein, 2088 aa, synthetic construct
MPAAKRVKLDGGDKKYSIGLDIGTNSVGWAVITDEYKVPSKKFKVLGNTDRHSIKKNLIGALLFDSGETAEATRLKRTARRRYTRRKNRICYLQEIFSNEMAKVDDSFFHRLEESFLVEEDKKHERHPIFGNIVDEVAYHEKYPTIYHLRKKLVDSTDKADLRLIYLALAHMIKFRGHFLIEGDLNPDNSDVDKLFIQLVQTYNQLFEENPINASGVDAKAILSARLSKSRRLENLIAQLPGEKKNGLFGNLIALSLGLTPNFKSNFDLAEDAKLQLSKDTYDDDLDNLLAQIGDQYADLFLAAKNLSDAILLSDILRVNTEITKAPLSASMIKRYDEHHQDLTLLKALVRQQLPEKYKEIFFDQSKNGYAGYIDGGASQEEFYKFIKPILEKMDGTEELLVKLNREDLLRKQRTFDNGSIPHQIHLGELHAILRRQEDFYPFLKDNREKIEKILTFRIPYYVGPLARGNSRFAWMTRKSEETITPWNFEEVVDKGASAQSFIERMTNFDKNLPNEKVLPKHSLLYEYFTVYNELTKVKYVTEGMRKPAFLSGEQKKAIVDLLFKTNRKVTVKQLKEDYFKKIECFDSVEISGVEDRFNASLGTYHDLLKIIKDKDFLDNEENEDILEDIVLTLTLFEDREMIEERLKTYAHLFDDKVMKQLKRRRYTGWGRLSRKLINGIRDKQSGKTILDFLKSDGFANRNFMQLIHDDSLTFKEDIQKAQVSGQGDSLHEHIANLAGSPAIKKGILQTVKVVDELVKVMGRHKPENIVIEMARENQTTQKGQKNSRERMKRIEEGIKELGSQILKEHPVENTQLQNEKLYLYYLQNGRDMYVDQELDINRLSDYDVDHIVPQSFLKDDSIDNKVLTRSDKARGKSDNVPSEEVVKKMKNYWRQLLNAKLITQRKFDNLTKAERGGLSELDKAGFIKRQLVETRQITKHVAQILDSRMNTKYDENDKLIREVKVITLKSKLVSDFRKDFQFYKVREINNYHHAHDAYLNAVVGTALIKKYPKLESEFVYGDYKVYDVRKMIAKSEQEIGKATAKYFFYSNIMNFFKTEITLANGEIRKRPLIETNGETGEIVWDKGRDFATVRKVLSMPQVNIVKKTEVQTGGFSKESILPKRNSDKLIARKKDWDPKKYGGFDSPTVAYSVLVVAKVEKGKSKKLKSVKELLGITIMERSSFEKNPIDFLEAKGYKEVKKDLIIKLPKYSLFELENGRKRMLASAGELQKGNELALPSKYVNFLYLASHYEKLKGSPEDNEQKQLFVEQHKHYLDEIIEQISEFSKRVILADANLDKVLSAYNKHRDKPIREQAENIIHLFTLTNLGAPAAFKYFDTTIDRKRYTSTKEVLDATLIHQSITGLYETRIDLSQLGGDGGPAPGGTLNIEDEYRLHETSKGPDVPLGSTWLSDFPQAWAETGGMGLAFRQAPLIISLKATSTPVSIKQYPMSQEARLGIKPHIQRLLDQGILVPCQSPWNTPLLPVKKPGTNDYRPVQDLREVNKRVEDIHPTVPNPYNLLSGLPPSHQWYTVLDLKDAFFCLRLHPTSQSLFAFEWKDPEMGISGQLTWTRLPQGFKNSPTLFNEALHRDLADFRIQHPDLILLQYVDDLLLAATSELDCQQGTRALLQTLGDLGYRASAKKAQICQKQVKYLGYLLKEGQRWLTEARKETVMGQPTPKTPRQLREFLGTAGLCRLWIPGFAEMAAPLYPLTKPGTLFKWGPDQQKAYQEIKQALLTAPALGLPDLTKPFELFVDEKQGYAKGVLTQKLGPWRRPVAYLSKKLDPVAAGWPPCLRMVAAIAVLTKDVGKLTMGQPLVILAPHAVEALVKQPPDRWLSNARMTHYQALLLDTDRVQFGPIVALNPATLLPLPEEGLQHDCLDILAEAHGTRPDLTDQPLPDADHTWYTDGSSFLQEGQRRAGAAVTTETEVIWAKALPAGTSAQRAELIALTQALKMAAGKKLNVYTDSRYAFATAHIHGEIYRRRGWLTSEGKEIKNKDEILALLKALFLPKRLSIIHCPGHQKGNHAEARGNRMADQAAREVATRETPETSTLLAGKRTADGSEFEKRTADGSEFESPKKKAKVE

SEQ ID NO: 2428 - protein, 2096 aa, synthetic construct
MPAAKRVKLDGGDKKYSIGLDIGTNSVGWAVITDEYKVPSKKFKVLGNTDRHSIKKNLIGALLFDSGETAEATRLKRTARRRYTRRKNRICYLQEIFSNEMAKVDDSFFHRLEESFLVEEDKKHERHPIFGNIVDEVAYHEKYPTIYHLRKKLVDSTDKADLRLIYLALAHMIKFRGHFLIEGDLNPDNSDVDKLFIQLVQTYNQLFEENPINASGVDAKAILSARLSKSRRLENLIAQLPGEKKNGLFGNLIALSLGLTPNFKSNFDLAEDAKLQLSKDTYDDDLDNLLAQIGDQYADLFLAAKNLSDAILLSDILRVNTEITKAPLSASMIKRYDEHHQDLTLLKALVRQQLPEKYKEIFFDQSKNGYAGYIDGGASQEEFYKFIKPILEKMDGTEELLVKLNREDLLRKQRTFDNGSIPHQIHLGELHAILRRQEDFYPFLKDNREKIEKILTFRIPYYVGPLARGNSRFAWMTRKSEETITPWNFEEVVDKGASAQSFIERMTNFDKNLPNEKVLPKHSLLYEYFTVYNELTKVKYVTEGMRKPAFLSGEQKKAIVDLLFKTNRKVTVKQLKEDYFKKIECFDSVEISGVEDRFNASLGTYHDLLKIIKDKDFLDNEENEDILEDIVLTLTLFEDREMIEERLKTYAHLFDDKVMKQLKRRRYTGWGRLSRKLINGIRDKQSGKTILDFLKSDGFANRNFMQLIHDDSLTFKEDIQKAQVSGQGDSLHEHIANLAGSPAIKKGILQTVKVVDELVKVMGRHKPENIVIEMARENQTTQKGQKNSRERMKRIEEGIKELGSQILKEHPVENTQLQNEKLYLYYLQNGRDMYVDQELDINRLSDYDVDHIVPQSFLKDDSIDNKVLTRSDKARGKSDNVPSEEVVKKMKNYWRQLLNAKLITQRKFDNLTKAERGGLSELDKAGFIKRQLVETRQITKHVAQILDSRMNTKYDENDKLIREVKVITLKSKLVSDFRKDFQFYKVREINNYHHAHDAYLNAVVGTALIKKYPKLESEFVYGDYKVYDVRKMIAKSEQEIGKATAKYFFYSNIMNFFKTEITLANGEIRKRPLIETNGETGEIVWDKGRDFATVRKVLSMPQVNIVKKTEVQTGGFSKESILPKRNSDKLIARKKDWDPKKYGGFDSPTVAYSVLVVAKVEKGKSKKLKSVKELLGITIMERSSFEKNPIDFLEAKGYKEVKKDLIIKLPKYSLFELENGRKRMLASAGELQKGNELALPSKYVNFLYLASHYEKLKGSPEDNEQKQLFVEQHKHYLDEIIEQISEFSKRVILADANLDKVLSAYNKHRDKPIREQAENIIHLFTLTNLGAPAAFKYFDTTIDRKRYTSTKEVLDATLIHQSITGLYETRIDLSQLGGDGGPAPGSSEAAAKGGTLNIEDEYRLHETSKGPDVPLGSTWLSDFPQAWAETGGMGLAFRQAPLIISLKATSTPVSIKQYPMSQEARLGIKPHIQRLLDQGILVPCQSPWNTPLLPVKKPGTNDYRPVQDLREVNKRVEDIHPTVPNPYNLLSGLPPSHQWYTVLDLKDAFFCLRLHPTSQSLFAFEWKDPEMGISGQLTWTRLPQGFKNSPTLFNEALHRDLADFRIQHPDLILLQYVDDLLLAATSELDCQQGTRALLQTLGDLGYRASAKKAQICQKQVKYLGYLLKEGQRWLTEARKETVMGQPTPKTPRQLREFLGTAGLCRLWIPGFAEMAAPLYPLTKPGTLFKWGPDQQKAYQEIKQALLTAPALGLPDLTKPFELFVDEKQGYAKGVLTQKLGPWRRPVAYLSKKLDPVAAGWPPCLRMVAAIAVLTKDVGKLTMGQPLVILAPHAVEALVKQPPDRWLSNARMTHYQALLLDTDRVQFGPIVALNPATLLPLPEEGLQHDCLDILAEAHGTRPDLTDQPLPDADHTWYTDGSSFLQEGQRRAGAAVTTETEVIWAKALPAGTSAQRAELIALTQALKMAAGKKLNVYTDSRYAFATAHIHGEIYRRRGWLTSEGKEIKNKDEILALLKALFLPKRLSIIHCPGHQKGNHAEARGNRMADQAAREVATRETPETSTLLAGKRTADGSEFEKRTADGSEFESPKKKAKVE

SEQ ID NO: 2429 - protein, 2115 aa, synthetic construct
MPAAKRVKLDGGDKKYSIGLDIGTNSVGWAVITDEYKVPSKKFKVLGNTDRHSIKKNLIGALLFDSGETAEATRLKRTARRRYTRRKNRICYLQEIFSNEMAKVDDSFFHRLEESFLVEEDKKHERHPIFGNIVDEVAYHEKYPTIYHLRKKLVDSTDKADLRLIYLALAHMIKFRGHFLIEGDLNPDNSDVDKLFIQLVQTYNQLFEENPINASGVDAKAILSARLSKSRRLENLIAQLPGEKKNGLFGNLIALSLGLTPNFKSNFDLAEDAKLQLSKDTYDDDLDNLLAQIGDQYADLFLAAKNLSDAILLSDILRVNTEITKAPLSASMIKRYDEHHQDLTLLKALVRQQLPEKYKEIFFDQSKNGYAGYIDGGASQEEFYKFIKPILEKMDGTEELLVKLNREDLLRKQRTFDNGSIPHQIHLGELHAILRRQEDFYPFLKDNREKIEKILTFRIPYYVGPLARGNSRFAWMTRKSEETITPWNFEEVVDKGASAQSFIERMTNFDKNLPNEKVLPKHSLLYEYFTVYNELTKVKYVTEGMRKPAFLSGEQKKAIVDLLFKTNRKVTVKQLKEDYFKKIECFDSVEISGVEDRFNASLGTYHDLLKIIKDKDFLDNEENEDILEDIVLTLTLFEDREMIEERLKTYAHLFDDKVMKQLKRRRYTGWGRLSRKLINGIRDKQSGKTILDFLKSDGFANRNFMQLIHDDSLTFKEDIQKAQVSGQGDSLHEHIANLAGSPAIKKGILQTVKVVDELVKVMGRHKPENIVIEMARENQTTQKGQKNSRERMKRIEEGIKELGSQILKEHPVENTQLQNEKLYLYYLQNGRDMYVDQELDINRLSDYDVDHIVPQSFLKDDSIDNKVLTRSDKARGKSDNVPSEEVVKKMKNYWRQLLNAKLITQRKFDNLTKAERGGLSELDKAGFIKRQLVETRQITKHVAQILDSRMNTKYDENDKLIREVKVITLKSKLVSDFRKDFQFYKVREINNYHHAHDAYLNAVVGTALIKKYPKLESEFVYGDYKVYDVRKMIAKSEQEIGKATAKYFFYSNIMNFFKTEITLANGEIRKRPLIETNGETGEIVWDKGRDFATVRKVLSMPQVNIVKKTEVQTGGFSKESILPKRNSDKLIARKKDWDPKKYGGFDSPTVAYSVLVVAKVEKGKSKKLKSVKELLGITIMERSSFEKNPIDFLEAKGYKEVKKDLIIKLPKYSLFELENGRKRMLASAGELQKGNELALPSKYVNFLYLASHYEKLKGSPEDNEQKQLFVEQHKHYLDEIIEQISEFSKRVILADANLDKVLSAYNKHRDKPIREQAENIIHLFTLTNLGAPAAFKYFDTTIDRKRYTSTKEVLDATLIHQSITGLYETRIDLSQLGGDGGGGGGSGGGGSGGGGSGGGGSGGGGSGGGGSGGTLNIEDEYRLHETSKGPDVPLGSTWLSDFPQAWAETGGMGLAFRQAPLIISLKATSTPVSIKQYPMSQEARLGIKPHIQRLLDQGILVPCQSPWNTPLLPVKKPGTNDYRPVQDLREVNKRVEDIHPTVPNPYNLLSGLPPSHQWYTVLDLKDAFFCLRLHPTSQSLFAFEWKDPEMGISGQLTWTRLPQGFKNSPTLFNEALHRDLADFRIQHPDLILLQYVDDLLLAATSELDCQQGTRALLQTLGDLGYRASAKKAQICQKQVKYLGYLLKEGQRWLTEARKETVMGQPTPKTPRQLREFLGTAGLCRLWIPGFAEMAAPLYPLTKPGTLFKWGPDQQKAYQEIKQALLTAPALGLPDLTKPFELFVDEKQGYAKGVLTQKLGPWRRPVAYLSKKLDPVAAGWPPCLRMVAAIAVLTKDVGKLTMGQPLVILAPHAVEALVKQPPDRWLSNARMTHYQALLLDTDRVQFGPIVALNPATLLPLPEEGLQHDCLDILAEAHGTRPDLTDQPLPDADHTWYTDGSSFLQEGQRRAGAAVTTETEVIWAKALPAGTSAQRAELIALTQALKMAAGKKLNVYTDSRYAFATAHIHGEIYRRRGWLTSEGKEIKNKDEILALLKALFLPKRLSIIHCPGHQKGNHAEARGNRMADQAAREVATRETPETSTLLAGKRTADGSEFEKRTADGSEFESPKKKAKVE

SEQ ID NO: 2430 - protein, 2098 aa, synthetic construct
MPAAKRVKLDGGDKKYSIGLDIGTNSVGWAVITDEYKVPSKKFKVLGNTDRHSIKKNLIGALLFDSGETAEATRLKRTARRRYTRRKNRICYLQEIFSNEMAKVDDSFFHRLEESFLVEEDKKHERHPIFGNIVDEVAYHEKYPTIYHLRKKLVDSTDKADLRLIYLALAHMIKFRGHFLIEGDLNPDNSDVDKLFIQLVQTYNQLFEENPINASGVDAKAILSARLSKSRRLENLIAQLPGEKKNGLFGNLIALSLGLTPNFKSNFDLAEDAKLQLSKDTYDDDLDNLLAQIGDQYADLFLAAKNLSDAILLSDILRVNTEITKAPLSASMIKRYDEHHQDLTLLKALVRQQLPEKYKEIFFDQSKNGYAGYIDGGASQEEFYKFIKPILEKMDGTEELLVKLNREDLLRKQRTFDNGSIPHQIHLGELHAILRRQEDFYPFLKDNREKIEKILTFRIPYYVGPLARGNSRFAWMTRKSEETITPWNFEEVVDKGASAQSFIERMTNFDKNLPNEKVLPKHSLLYEYFTVYNELTKVKYVTEGMRKPAFLSGEQKKAIVDLLFKTNRKVTVKQLKEDYFKKIECFDSVEISGVEDRFNASLGTYHDLLKIIKDKDFLDNEENEDILEDIVLTLTLFEDREMIEERLKTYAHLFDDKVMKQLKRRRYTGWGRLSRKLINGIRDKQSGKTILDFLKSDGFANRNFMQLIHDDSLTFKEDIQKAQVSGQGDSLHEHIANLAGSPAIKKGILQTVKVVDELVKVMGRHKPENIVIEMARENQTTQKGQKNSRERMKRIEEGIKELGSQILKEHPVENTQLQNEKLYLYYLQNGRDMYVDQELDINRLSDYDVDHIVPQSFLKDDSIDNKVLTRSDKARGKSDNVPSEEVVKKMKNYWRQLLNAKLITQRKFDNLTKAERGGLSELDKAGFIKRQLVETRQITKHVAQILDSRMNTKYDENDKLIREVKVITLKSKLVSDFRKDFQFYKVREINNYHHAHDAYLNAVVGTALIKKYPKLESEFVYGDYKVYDVRKMIAKSEQEIGKATAKYFFYSNIMNFFKTEITLANGEIRKRPLIETNGETGEIVWDKGRDFATVRKVLSMPQVNIVKKTEVQTGGFSKESILPKRNSDKLIARKKDWDPKKYGGFDSPTVAYSVLVVAKVEKGKSKKLKSVKELLGITIMERSSFEKNPIDFLEAKGYKEVKKDLIIKLPKYSLFELENGRKRMLASAGELQKGNELALPSKYVNFLYLASHYEKLKGSPEDNEQKQLFVEQHKHYLDEIIEQISEFSKRVILADANLDKVLSAYNKHRDKPIREQAENIIHLFTLTNLGAPAAFKYFDTTIDRKRYTSTKEVLDATLIHQSITGLYETRIDLSQLGGDGGPAPAPAPAPAPAPGGTLNIEDEYRLHETSKGPDVPLGSTWLSDFPQAWAETGGMGLAFRQAPLIISLKATSTPVSIKQYPMSQEARLGIKPHIQRLLDQGILVPCQSPWNTPLLPVKKPGTNDYRPVQDLREVNKRVEDIHPTVPNPYNLLSGLPPSHQWYTVLDLKDAFFCLRLHPTSQSLFAFEWKDPEMGISGQLTWTRLPQGFKNSPTLFNEALHRDLADFRIQHPDLILLQYVDDLLLAATSELDCQQGTRALLQTLGDLGYRASAKKAQICQKQVKYLGYLLKEGQRWLTEARKETVMGQPTPKTPRQLREFLGKAGLCRLFIPGFAEMAAPLYPLTKPGTLFKWGPDQQKAYQEIKQALLTAPALGLPDLTKPFELFVDEKQGYAKGVLTQKLGPWRRPVAYLSKKLDPVAAGWPPCLRMVAAIAVLTKDVGKLTMGQPLVILAPHAVEALVKQPPDRWLSNARMTHYQALLLDTDRVQFGPIVALNPATLLPLPEEGLQHDCLDILAEAHGTRPDLTDQPLPDADHTWYTDGSSFLQEGQRRAGAAVTTETEVIWAKALPAGTSAQRAELIALTQALKMAAGKKLNVYTDSRYAFATAHIHGEIYRRRGWLTSEGKEIKNKDEILALLKALFLPKRLSIIHCPGHQKGNHAEARGNRMADQAAREVATRETPETSTLLAGKRTADGSEFEKRTADGSEFESPKKKAKVE

SEQ ID NO: 2431 - protein, 2096 aa, synthetic construct
MPAAKRVKLDGGDKKYSIGLDIGTNSVGWAVITDEYKVPSKKFKVLGNTDRHSIKKNLIGALLFDSGETAEATRLKRTARRRYTRRKNRICYLQEIFSNEMAKVDDSFFHRLEESFLVEEDKKHERHPIFGNIVDEVAYHEKYPTIYHLRKKLVDSTDKADLRLIYLALAHMIKFRGHFLIEGDLNPDNSDVDKLFIQLVQTYNQLFEENPINASGVDAKAILSARLSKSRRLENLIAQLPGEKKNGLFGNLIALSLGLTPNFKSNFDLAEDAKLQLSKDTYDDDLDNLLAQIGDQYADLFLAAKNLSDAILLSDILRVNTEITKAPLSASMIKRYDEHHQDLTLLKALVRQQLPEKYKEIFFDQSKNGYAGYIDGGASQEEFYKFIKPILEKMDGTEELLVKLNREDLLRKQRTFDNGSIPHQIHLGELHAILRRQEDFYPFLKDNREKIEKILTFRIPYYVGPLARGNSRFAWMTRKSEETITPWNFEEVVDKGASAQSFIERMTNFDKNLPNEKVLPKHSLLYEYFTVYNELTKVKYVTEGMRKPAFLSGEQKKAIVDLLFKTNRKVTVKQLKEDYFKKIECFDSVEISGVEDRFNASLGTYHDLLKIIKDKDFLDNEENEDILEDIVLTLTLFEDREMIEERLKTYAHLFDDKVMKQLKRRRYTGWGRLSRKLINGIRDKQSGKTILDFLKSDGFANRNFMQLIHDDSLTFKEDIQKAQVSGQGDSLHEHIANLAGSPAIKKGILQTVKVVDELVKVMGRHKPENIVIEMARENQTTQKGQKNSRERMKRIEEGIKELGSQILKEHPVENTQLQNEKLYLYYLQNGRDMYVDQELDINRLSDYDVDHIVPQSFLKDDSIDNKVLTRSDKARGKSDNVPSEEVVKKMKNYWRQLLNAKLITQRKFDNLTKAERGGLSELDKAGFIKRQLVETRQITKHVAQILDSRMNTKYDENDKLIREVKVITLKSKLVSDFRKDFQFYKVREINNYHHAHDAYLNAVVGTALIKKYPKLESEFVYGDYKVYDVRKMIAKSEQEIGKATAKYFFYSNIMNFFKTEITLANGEIRKRPLIETNGETGEIVWDKGRDFATVRKVLSMPQVNIVKKTEVQTGGFSKESILPKRNSDKLIARKKDWDPKKYGGFDSPTVAYSVLVVAKVEKGKSKKLKSVKELLGITIMERSSFEKNPIDFLEAKGYKEVKKDLIIKLPKYSLFELENGRKRMLASAGELQKGNELALPSKYVNFLYLASHYEKLKGSPEDNEQKQLFVEQHKHYLDEIIEQISEFSKRVILADANLDKVLSAYNKHRDKPIREQAENIIHLFTLTNLGAPAAFKYFDTTIDRKRYTSTKEVLDATLIHQSITGLYETRIDLSQLGGDGGEAAAKPAPGGSGGTLNIEDEYRLHETSKGPDVPLGSTWLSDFPQAWAETGGMGLAFRQAPLIISLKATSTPVSIKQYPMSQEARLGIKPHIQRLLDQGILVPCQSPWNTPLLPVKKPGTNDYRPVQDLREVNKRVEDIHPTVPNPYNLLSGLPPSHQWYTVLDLKDAFFCLRLHPTSQSLFAFEWKDPEMGISGQLTWTRLPQGFKNSPTLFNEALHRDLADFRIQHPDLILLQYVDDLLLAATSELDCQQGTRALLQTLGDLGYRASAKKAQICQKQVKYLGYLLKEGQRWLTEARKETVMGQPTPKTPRQLREFLGKAGLCRLFIPGFAEMAAPLYPLTKPGTLFKWGPDQQKAYQEIKQALLTAPALGLPDLTKPFELFVDEKQGYAKGVLTQKLGPWRRPVAYLSKKLDPVAAGWPPCLRMVAAIAVLTKDVGKLTMGQPLVILAPHAVEALVKQPPDRWLSNARMTHYQALLLDTDRVQFGPIVALNPATLLPLPEEGLQHDCLDILAEAHGTRPDLTDQPLPDADHTWYTDGSSFLQEGQRRAGAAVTTETEVIWAKALPAGTSAQRAELIALTQALKMAAGKKLNVYTDSRYAFATAHIHGEIYRRRGWLTSEGKEIKNKDEILALLKALFLPKRLSIIHCPGHQKGNHAEARGNRMADQAAREVATRETPETSTLLAGKRTADGSEFEKRTADGSEFESPKKKAKVE

SEQ ID NO: 2432 - protein, 2094 aa, synthetic construct
MPAAKRVKLDGGDKKYSIGLDIGTNSVGWAVITDEYKVPSKKFKVLGNTDRHSIKKNLIGALLFDSGETAEATRLKRTARRRYTRRKNRICYLQEIFSNEMAKVDDSFFHRLEESFLVEEDKKHERHPIFGNIVDEVAYHEKYPTIYHLRKKLVDSTDKADLRLIYLALAHMIKFRGHFLIEGDLNPDNSDVDKLFIQLVQTYNQLFEENPINASGVDAKAILSARLSKSRRLENLIAQLPGEKKNGLFGNLIALSLGLTPNFKSNFDLAEDAKLQLSKDTYDDDLDNLLAQIGDQYADLFLAAKNLSDAILLSDILRVNTEITKAPLSASMIKRYDEHHQDLTLLKALVRQQLPEKYKEIFFDQSKNGYAGYIDGGASQEEFYKFIKPILEKMDGTEELLVKLNREDLLRKQRTFDNGSIPHQIHLGELHAILRRQEDFYPFLKDNREKIEKILTFRIPYYVGPLARGNSRFAWMTRKSEETITPWNFEEVVDKGASAQSFIERMTNFDKNLPNEKVLPKHSLLYEYFTVYNELTKVKYVTEGMRKPAFLSGEQKKAIVDLLFKTNRKVTVKQLKEDYFKKIECFDSVEISGVEDRFNASLGTYHDLLKIIKDKDFLDNEENEDILEDIVLTLTLFEDREMIEERLKTYAHLFDDKVMKQLKRRRYTGWGRLSRKLINGIRDKQSGKTILDFLKSDGFANRNFMQLIHDDSLTFKEDIQKAQVSGQGDSLHEHIANLAGSPAIKKGILQTVKVVDELVKVMGRHKPENIVIEMARENQTTQKGQKNSRERMKRIEEGIKELGSQILKEHPVENTQLQNEKLYLYYLQNGRDMYVDQELDINRLSDYDVDHIVPQSFLKDDSIDNKVLTRSDKARGKSDNVPSEEVVKKMKNYWRQLLNAKLITQRKFDNLTKAERGGLSELDKAGFIKRQLVETRQITKHVAQILDSRMNTKYDENDKLIREVKVITLKSKLVSDFRKDFQFYKVREINNYHHAHDAYLNAVVGTALIKKYPKLESEFVYGDYKVYDVRKMIAKSEQEIGKATAKYFFYSNIMNFFKTEITLANGEIRKRPLIETNGETGEIVWDKGRDFATVRKVLSMPQVNIVKKTEVQTGGFSKESILPKRNSDKLIARKKDWDPKKYGGFDSPTVAYSVLVVAKVEKGKSKKLKSVKELLGITIMERSSFEKNPIDFLEAKGYKEVKKDLIIKLPKYSLFELENGRKRMLASAGELQKGNELALPSKYVNFLYLASHYEKLKGSPEDNEQKQLFVEQHKHYLDEIIEQISEFSKRVILADANLDKVLSAYNKHRDKPIREQAENIIHLFTLTNLGAPAAFKYFDTTIDRKRYTSTKEVLDATLIHQSITGLYETRIDLSQLGGDGGPAPGGSGGGGGTLNIEDEYRLHETSKGPDVPLGSTWLSDFPQAWAETGGMGLAFRQAPLIISLKATSTPVSIKQYPMSQEARLGIKPHIQRLLDQGILVPCQSPWNTPLLPVKKPGTNDYRPVQDLREVNKRVEDIHPTVPNPYNLLSGLPPSHQWYTVLDLKDAFFCLRLHPTSQSLFAFEWKDPEMGISGQLTWTRLPQGFKNSPTLFNEALHRDLADFRIQHPDLILLQYVDDLLLAATSELDCQQGTRALLQTLGDLGYRASAKKAQICQKQVKYLGYLLKEGQRWLTEARKETVMGQPTPKTPRQLREFLGKAGLCRLFIPGFAEMAAPLYPLTKPGTLFKWGPDQQKAYQEIKQALLTAPALGLPDLTKPFELFVDEKQGYAKGVLTQKLGPWRRPVAYLSKKLDPVAAGWPPCLRMVAAIAVLTKDVGKLTMGQPLVILAPHAVEALVKQPPDRWLSNARMTHYQALLLDTDRVQFGPIVALNPATLLPLPEEGLQHDCLDILAEAHGTRPDLTDQPLPDADHTWYTDGSSFLQEGQRRAGAAVTTETEVIWAKALPAGTSAQRAELIALTQALKMAAGKKLNVYTDSRYAFATAHIHGEIYRRRGWLTSEGKEIKNKDEILALLKALFLPKRLSIIHCPGHQKGNHAEARGNRMADQAAREVATRETPETSTLLAGKRTADGSEFEKRTADGSEFESPKKKAKVE

SEQ ID NO: 2433 - protein, 2100 aa, synthetic construct
MPAAKRVKLDGGDKKYSIGLDIGTNSVGWAVITDEYKVPSKKFKVLGNTDRHSIKKNLIGALLFDSGETAEATRLKRTARRRYTRRKNRICYLQEIFSNEMAKVDDSFFHRLEESFLVEEDKKHERHPIFGNIVDEVAYHEKYPTIYHLRKKLVDSTDKADLRLIYLALAHMIKFRGHFLIEGDLNPDNSDVDKLFIQLVQTYNQLFEENPINASGVDAKAILSARLSKSRRLENLIAQLPGEKKNGLFGNLIALSLGLTPNFKSNFDLAEDAKLQLSKDTYDDDLDNLLAQIGDQYADLFLAAKNLSDAILLSDILRVNTEITKAPLSASMIKRYDEHHQDLTLLKALVRQQLPEKYKEIFFDQSKNGYAGYIDGGASQEEFYKFIKPILEKMDGTEELLVKLNREDLLRKQRTFDNGSIPHQIHLGELHAILRRQEDFYPFLKDNREKIEKILTFRIPYYVGPLARGNSRFAWMTRKSEETITPWNFEEVVDKGASAQSFIERMTNFDKNLPNEKVLPKHSLLYEYFTVYNELTKVKYVTEGMRKPAFLSGEQKKAIVDLLFKTNRKVTVKQLKEDYFKKIECFDSVEISGVEDRFNASLGTYHDLLKIIKDKDFLDNEENEDILEDIVLTLTLFEDREMIEERLKTYAHLFDDKVMKQLKRRRYTGWGRLSRKLINGIRDKQSGKTILDFLKSDGFANRNFMQLIHDDSLTFKEDIQKAQVSGQGDSLHEHIANLAGSPAIKKGILQTVKVVDELVKVMGRHKPENIVIEMARENQTTQKGQKNSRERMKRIEEGIKELGSQILKEHPVENTQLQNEKLYLYYLQNGRDMYVDQELDINRLSDYDVDHIVPQSFLKDDSIDNKVLTRSDKARGKSDNVPSEEVVKKMKNYWRQLLNAKLITQRKFDNLTKAERGGLSELDKAGFIKRQLVETRQITKHVAQILDSRMNTKYDENDKLIREVKVITLKSKLVSDFRKDFQFYKVREINNYHHAHDAYLNAVVGTALIKKYPKLESEFVYGDYKVYDVRKMIAKSEQEIGKATAKYFFYSNIMNFFKTEITLANGEIRKRPLIETNGETGEIVWDKGRDFATVRKVLSMPQVNIVKKTEVQTGGFSKESILPKRNSDKLIARKKDWDPKKYGGFDSPTVAYSVLVVAKVEKGKSKKLKSVKELLGITIMERSSFEKNPIDFLEAKGYKEVKKDLIIKLPKYSLFELENGRKRMLASAGELQKGNELALPSKYVNFLYLASHYEKLKGSPEDNEQKQLFVEQHKHYLDEIIEQISEFSKRVILADANLDKVLSAYNKHRDKPIREQAENIIHLFTLTNLGAPAAFKYFDTTIDRKRYTSTKEVLDATLIHQSITGLYETRIDLSQLGGDGGEAAAKGGGGSEAAAKGGTLNIEDEYRLHETSKGPDVPLGSTWLSDFPQAWAETGGMGLAFRQAPLIISLKATSTPVSIKQYPMSQEARLGIKPHIQRLLDQGILVPCQSPWNTPLLPVKKPGTNDYRPVQDLREVNKRVEDIHPTVPNPYNLLSGLPPSHQWYTVLDLKDAFFCLRLHPTSQSLFAFEWKDPEMGISGQLTWTRLPQGFKNSPTLFNEALHRDLADFRIQHPDLILLQYVDDLLLAATSELDCQQGTRALLQTLGDLGYRASAKKAQICQKQVKYLGYLLKEGQRWLTEARKETVMGQPTPKTPRQLREFLGKAGLCRLFIPGFAEMAAPLYPLTKPGTLFKWGPDQQKAYQEIKQALLTAPALGLPDLTKPFELFVDEKQGYAKGVLTQKLGPWRRPVAYLSKKLDPVAAGWPPCLRMVAAIAVLTKDVGKLTMGQPLVILAPHAVEALVKQPPDRWLSNARMTHYQALLLDTDRVQFGPIVALNPATLLPLPEEGLQHDCLDILAEAHGTRPDLTDQPLPDADHTWYTDGSSFLQEGQRRAGAAVTTETEVIWAKALPAGTSAQRAELIALTQALKMAAGKKLNVYTDSRYAFATAHIHGEIYRRRGWLTSEGKEIKNKDEILALLKALFLPKRLSIIHCPGHQKGNHAEARGNRMADQAAREVATRETPETSTLLAGKRTADGSEFEKRTADGSEFESPKKKAKVE

SEQ ID NO: 2434 - protein, 2096 aa, synthetic construct
MPAAKRVKLDGGDKKYSIGLDIGTNSVGWAVITDEYKVPSKKFKVLGNTDRHSIKKNLIGALLFDSGETAEATRLKRTARRRYTRRKNRICYLQEIFSNEMAKVDDSFFHRLEESFLVEEDKKHERHPIFGNIVDEVAYHEKYPTIYHLRKKLVDSTDKADLRLIYLALAHMIKFRGHFLIEGDLNPDNSDVDKLFIQLVQTYNQLFEENPINASGVDAKAILSARLSKSRRLENLIAQLPGEKKNGLFGNLIALSLGLTPNFKSNFDLAEDAKLQLSKDTYDDDLDNLLAQIGDQYADLFLAAKNLSDAILLSDILRVNTEITKAPLSASMIKRYDEHHQDLTLLKALVRQQLPEKYKEIFFDQSKNGYAGYIDGGASQEEFYKFIKPILEKMDGTEELLVKLNREDLLRKQRTFDNGSIPHQIHLGELHAILRRQEDFYPFLKDNREKIEKILTFRIPYYVGPLARGNSRFAWMTRKSEETITPWNFEEVVDKGASAQSFIERMTNFDKNLPNEKVLPKHSLLYEYFTVYNELTKVKYVTEGMRKPAFLSGEQKKAIVDLLFKTNRKVTVKQLKEDYFKKIECFDSVEISGVEDRFNASLGTYHDLLKIIKDKDFLDNEENEDILEDIVLTLTLFEDREMIEERLKTYAHLFDDKVMKQLKRRRYTGWGRLSRKLINGIRDKQSGKTILDFLKSDGFANRNFMQLIHDDSLTFKEDIQKAQVSGQGDSLHEHIANLAGSPAIKKGILQTVKVVDELVKVMGRHKPENIVIEMARENQTTQKGQKNSRERMKRIEEGIKELGSQILKEHPVENTQLQNEKLYLYYLQNGRDMYVDQELDINRLSDYDVDHIVPQSFLKDDSIDNKVLTRSDKARGKSDNVPSEEVVKKMKNYWRQLLNAKLITQRKFDNLTKAERGGLSELDKAGFIKRQLVETRQITKHVAQILDSRMNTKYDENDKLIREVKVITLKSKLVSDFRKDFQFYKVREINNYHHAHDAYLNAVVGTALIKKYPKLESEFVYGDYKVYDVRKMIAKSEQEIGKATAKYFFYSNIMNFFKTEITLANGEIRKRPLIETNGETGEIVWDKGRDFATVRKVLSMPQVNIVKKTEVQTGGFSKESILPKRNSDKLIARKKDWDPKKYGGFDSPTVAYSVLVVAKVEKGKSKKLKSVKELLGITIMERSSFEKNPIDFLEAKGYKEVKKDLIIKLPKYSLFELENGRKRMLASAGELQKGNELALPSKYVNFLYLASHYEKLKGSPEDNEQKQLFVEQHKHYLDEIIEQISEFSKRVILADANLDKVLSAYNKHRDKPIREQAENIIHLFTLTNLGAPAAFKYFDTTIDRKRYTSTKEVLDATLIHQSITGLYETRIDLSQLGGDGGGGGGSSEAAAKGGTLNIEDEYRLHETSKGPDVPLGSTWLSDFPQAWAETGGMGLAFRQAPLIISLKATSTPVSIKQYPMSQEARLGIKPHIQRLLDQGILVPCQSPWNTPLLPVKKPGTNDYRPVQDLREVNKRVEDIHPTVPNPYNLLSGLPPSHQWYTVLDLKDAFFCLRLHPTSQSLFAFEWKDPEMGISGQLTWTRLPQGFKNSPTLFNEALHRDLADFRIQHPDLILLQYVDDLLLAATSELDCQQGTRALLQTLGDLGYRASAKKAQICQKQVKYLGYLLKEGQRWLTEARKETVMGQPTPKTPRQLREFLGKAGLCRLFIPGFAEMAAPLYPLTKPGTLFKWGPDQQKAYQEIKQALLTAPALGLPDLTKPFELFVDEKQGYAKGVLTQKLGPWRRPVAYLSKKLDPVAAGWPPCLRMVAAIAVLTKDVGKLTMGQPLVILAPHAVEALVKQPPDRWLSNARMTHYQALLLDTDRVQFGPIVALNPATLLPLPEEGLQHDCLDILAEAHGTRPDLTDQPLPDADHTWYTDGSSFLQEGQRRAGAAVTTETEVIWAKALPAGTSAQRAELIALTQALKMAAGKKLNVYTDSRYAFATAHIHGEIYRRRGWLTSEGKEIKNKDEILALLKALFLPKRLSIIHCPGHQKGNHAEARGNRMADQAAREVATRETPETSTLLAGKRTADGSEFEKRTADGSEFESPKKKAKVE

SEQ ID NO: 2435 - protein, 2093 aa, synthetic construct
MPAAKRVKLDGGDKKYSIGLDIGTNSVGWAVITDEYKVPSKKFKVLGNTDRHSIKKNLIGALLFDSGETAEATRLKRTARRRYTRRKNRICYLQEIFSNEMAKVDDSFFHRLEESFLVEEDKKHERHPIFGNIVDEVAYHEKYPTIYHLRKKLVDSTDKADLRLIYLALAHMIKFRGHFLIEGDLNPDNSDVDKLFIQLVQTYNQLFEENPINASGVDAKAILSARLSKSRRLENLIAQLPGEKKNGLFGNLIALSLGLTPNFKSNFDLAEDAKLQLSKDTYDDDLDNLLAQIGDQYADLFLAAKNLSDAILLSDILRVNTEITKAPLSASMIKRYDEHHQDLTLLKALVRQQLPEKYKEIFFDQSKNGYAGYIDGGASQEEFYKFIKPILEKMDGTEELLVKLNREDLLRKQRTFDNGSIPHQIHLGELHAILRRQEDFYPFLKDNREKIEKILTFRIPYYVGPLARGNSRFAWMTRKSEETITPWNFEEVVDKGASAQSFIERMTNFDKNLPNEKVLPKHSLLYEYFTVYNELTKVKYVTEGMRKPAFLSGEQKKAIVDLLFKTNRKVTVKQLKEDYFKKIECFDSVEISGVEDRFNASLGTYHDLLKIIKDKDFLDNEENEDILEDIVLTLTLFEDREMIEERLKTYAHLFDDKVMKQLKRRRYTGWGRLSRKLINGIRDKQSGKTILDFLKSDGFANRNFMQLIHDDSLTFKEDIQKAQVSGQGDSLHEHIANLAGSPAIKKGILQTVKVVDELVKVMGRHKPENIVIEMARENQTTQKGQKNSRERMKRIEEGIKELGSQILKEHPVENTQLQNEKLYLYYLQNGRDMYVDQELDINRLSDYDVDHIVPQSFLKDDSIDNKVLTRSDKARGKSDNVPSEEVVKKMKNYWRQLLNAKLITQRKFDNLTKAERGGLSELDKAGFIKRQLVETRQITKHVAQILDSRMNTKYDENDKLIREVKVITLKSKLVSDFRKDFQFYKVREINNYHHAHDAYLNAVVGTALIKKYPKLESEFVYGDYKVYDVRKMIAKSEQEIGKATAKYFFYSNIMNFFKTEITLANGEIRKRPLIETNGETGEIVWDKGRDFATVRKVLSMPQVNIVKKTEVQTGGFSKESILPKRNSDKLIARKKDWDPKKYGGFDSPTVAYSVLVVAKVEKGKSKKLKSVKELLGITIMERSSFEKNPIDFLEAKGYKEVKKDLIIKLPKYSLFELENGRKRMLASAGELQKGNELALPSKYVNFLYLASHYEKLKGSPEDNEQKQLFVEQHKHYLDEIIEQISEFSKRVILADANLDKVLSAYNKHRDKPIREQAENIIHLFTLTNLGAPAAFKYFDTTIDRKRYTSTKEVLDATLIHQSITGLYETRIDLSQLGGDGGEAAAKGGSGGTLNIEDEYRLHETSKGPDVPLGSTWLSDFPQAWAETGGMGLAFRQAPLIISLKATSTPVSIKQYPMSQEARLGIKPHIQRLLDQGILVPCQSPWNTPLLPVKKPGTNDYRPVQDLREVNKRVEDIHPTVPNPYNLLSGLPPSHQWYTVLDLKDAFFCLRLHPTSQSLFAFEWKDPEMGISGQLTWTRLPQGFKNSPTLFNEALHRDLADFRIQHPDLILLQYVDDLLLAATSELDCQQGTRALLQTLGDLGYRASAKKAQICQKQVKYLGYLLKEGQRWLTEARKETVMGQPTPKTPRQLREFLGKAGLCRLFIPGFAEMAAPLYPLTKPGTLFKWGPDQQKAYQEIKQALLTAPALGLPDLTKPFELFVDEKQGYAKGVLTQKLGPWRRPVAYLSKKLDPVAAGWPPCLRMVAAIAVLTKDVGKLTMGQPLVILAPHAVEALVKQPPDRWLSNARMTHYQALLLDTDRVQFGPIVALNPATLLPLPEEGLQHDCLDILAEAHGTRPDLTDQPLPDADHTWYTDGSSFLQEGQRRAGAAVTTETEVIWAKALPAGTSAQRAELIALTQALKMAAGKKLNVYTDSRYAFATAHIHGEIYRRRGWLTSEGKEIKNKDEILALLKALFLPKRLSIIHCPGHQKGNHAEARGNRMADQAAREVATRETPETSTLLAGKRTADGSEFEKRTADGSEFESPKKKAKVE

SEQ ID NO: 2436 - protein, 2091 aa, synthetic construct
MPAAKRVKLDGGDKKYSIGLDIGTNSVGWAVITDEYKVPSKKFKVLGNTDRHSIKKNLIGALLFDSGETAEATRLKRTARRRYTRRKNRICYLQEIFSNEMAKVDDSFFHRLEESFLVEEDKKHERHPIFGNIVDEVAYHEKYPTIYHLRKKLVDSTDKADLRLIYLALAHMIKFRGHFLIEGDLNPDNSDVDKLFIQLVQTYNQLFEENPINASGVDAKAILSARLSKSRRLENLIAQLPGEKKNGLFGNLIALSLGLTPNFKSNFDLAEDAKLQLSKDTYDDDLDNLLAQIGDQYADLFLAAKNLSDAILLSDILRVNTEITKAPLSASMIKRYDEHHQDLTLLKALVRQQLPEKYKEIFFDQSKNGYAGYIDGGASQEEFYKFIKPILEKMDGTEELLVKLNREDLLRKQRTFDNGSIPHQIHLGELHAILRRQEDFYPFLKDNREKIEKILTFRIPYYVGPLARGNSRFAWMTRKSEETITPWNFEEVVDKGASAQSFIERMTNFDKNLPNEKVLPKHSLLYEYFTVYNELTKVKYVTEGMRKPAFLSGEQKKAIVDLLFKTNRKVTVKQLKEDYFKKIECFDSVEISGVEDRFNASLGTYHDLLKIIKDKDFLDNEENEDILEDIVLTLTLFEDREMIEERLKTYAHLFDDKVMKQLKRRRYTGWGRLSRKLINGIRDKQSGKTILDFLKSDGFANRNFMQLIHDDSLTFKEDIQKAQVSGQGDSLHEHIANLAGSPAIKKGILQTVKVVDELVKVMGRHKPENIVIEMARENQTTQKGQKNSRERMKRIEEGIKELGSQILKEHPVENTQLQNEKLYLYYLQNGRDMYVDQELDINRLSDYDVDHIVPQSFLKDDSIDNKVLTRSDKARGKSDNVPSEEVVKKMKNYWRQLLNAKLITQRKFDNLTKAERGGLSELDKAGFIKRQLVETRQITKHVAQILDSRMNTKYDENDKLIREVKVITLKSKLVSDFRKDFQFYKVREINNYHHAHDAYLNAVVGTALIKKYPKLESEFVYGDYKVYDVRKMIAKSEQEIGKATAKYFFYSNIMNFFKTEITLANGEIRKRPLIETNGETGEIVWDKGRDFATVRKVLSMPQVNIVKKTEVQTGGFSKESILPKRNSDKLIARKKDWDPKKYGGFDSPTVAYSVLVVAKVEKGKSKKLKSVKELLGITIMERSSFEKNPIDFLEAKGYKEVKKDLIIKLPKYSLFELENGRKRMLASAGELQKGNELALPSKYVNFLYLASHYEKLKGSPEDNEQKQLFVEQHKHYLDEIIEQISEFSKRVILADANLDKVLSAYNKHRDKPIREQAENIIHLFTLTNLGAPAAFKYFDTTIDRKRYTSTKEVLDATLIHQSITGLYETRIDLSQLGGDGGGGGGGSGGTLNIEDEYRLHETSKGPDVPLGSTWLSDFPQAWAETGGMGLAFRQAPLIISLKATSTPVSIKQYPMSQEARLGIKPHIQRLLDQGILVPCQSPWNTPLLPVKKPGTNDYRPVQDLREVNKRVEDIHPTVPNPYNLLSGLPPSHQWYTVLDLKDAFFCLRLHPTSQSLFAFEWKDPEMGISGQLTWTRLPQGFKNSPTLFNEALHRDLADFRIQHPDLILLQYVDDLLLAATSELDCQQGTRALLQTLGDLGYRASAKKAQICQKQVKYLGYLLKEGQRWLTEARKETVMGQPTPKTPRQLREFLGKAGLCRLFIPGFAEMAAPLYPLTKPGTLFKWGPDQQKAYQEIKQALLTAPALGLPDLTKPFELFVDEKQGYAKGVLTQKLGPWRRPVAYLSKKLDPVAAGWPPCLRMVAAIAVLTKDVGKLTMGQPLVILAPHAVEALVKQPPDRWLSNARMTHYQALLLDTDRVQFGPIVALNPATLLPLPEEGLQHDCLDILAEAHGTRPDLTDQPLPDADHTWYTDGSSFLQEGQRRAGAAVTTETEVIWAKALPAGTSAQRAELIALTQALKMAAGKKLNVYTDSRYAFATAHIHGEIYRRRGWLTSEGKEIKNKDEILALLKALFLPKRLSIIHCPGHQKGNHAEARGNRMADQAAREVATRETPETSTLLAGKRTADGSEFEKRTADGSEFESPKKKAKVE

SEQ ID NO: 2437 - protein, 2096 aa, synthetic construct
MPAAKRVKLDGGDKKYSIGLDIGTNSVGWAVITDEYKVPSKKFKVLGNTDRHSIKKNLIGALLFDSGETAEATRLKRTARRRYTRRKNRICYLQEIFSNEMAKVDDSFFHRLEESFLVEEDKKHERHPIFGNIVDEVAYHEKYPTIYHLRKKLVDSTDKADLRLIYLALAHMIKFRGHFLIEGDLNPDNSDVDKLFIQLVQTYNQLFEENPINASGVDAKAILSARLSKSRRLENLIAQLPGEKKNGLFGNLIALSLGLTPNFKSNFDLAEDAKLQLSKDTYDDDLDNLLAQIGDQYADLFLAAKNLSDAILLSDILRVNTEITKAPLSASMIKRYDEHHQDLTLLKALVRQQLPEKYKEIFFDQSKNGYAGYIDGGASQEEFYKFIKPILEKMDGTEELLVKLNREDLLRKQRTFDNGSIPHQIHLGELHAILRRQEDFYPFLKDNREKIEKILTFRIPYYVGPLARGNSRFAWMTRKSEETITPWNFEEVVDKGASAQSFIERMTNFDKNLPNEKVLPKHSLLYEYFTVYNELTKVKYVTEGMRKPAFLSGEQKKAIVDLLFKTNRKVTVKQLKEDYFKKIECFDSVEISGVEDRFNASLGTYHDLLKIIKDKDFLDNEENEDILEDIVLTLTLFEDREMIEERLKTYAHLFDDKVMKQLKRRRYTGWGRLSRKLINGIRDKQSGKTILDFLKSDGFANRNFMQLIHDDSLTFKEDIQKAQVSGQGDSLHEHIANLAGSPAIKKGILQTVKVVDELVKVMGRHKPENIVIEMARENQTTQKGQKNSRERMKRIEEGIKELGSQILKEHPVENTQLQNEKLYLYYLQNGRDMYVDQELDINRLSDYDVDHIVPQSFLKDDSIDNKVLTRSDKARGKSDNVPSEEVVKKMKNYWRQLLNAKLITQRKFDNLTKAERGGLSELDKAGFIKRQLVETRQITKHVAQILDSRMNTKYDENDKLIREVKVITLKSKLVSDFRKDFQFYKVREINNYHHAHDAYLNAVVGTALIKKYPKLESEFVYGDYKVYDVRKMIAKSEQEIGKATAKYFFYSNIMNFFKTEITLANGEIRKRPLIETNGETGEIVWDKGRDFATVRKVLSMPQVNIVKKTEVQTGGFSKESILPKRNSDKLIARKKDWDPKKYGGFDSPTVAYSVLVVAKVEKGKSKKLKSVKELLGITIMERSSFEKNPIDFLEAKGYKEVKKDLIIKLPKYSLFELENGRKRMLASAGELQKGNELALPSKYVNFLYLASHYEKLKGSPEDNEQKQLFVEQHKHYLDEIIEQISEFSKRVILADANLDKVLSAYNKHRDKPIREQAENIIHLFTLTNLGAPAAFKYFDTTIDRKRYTSTKEVLDATLIHQSITGLYETRIDLSQLGGDGGGSSGGSEAAAKGGTLNIEDEYRLHETSKGPDVPLGSTWLSDFPQAWAETGGMGLAFRQAPLIISLKATSTPVSIKQYPMSQEARLGIKPHIQRLLDQGILVPCQSPWNTPLLPVKKPGTNDYRPVQDLREVNKRVEDIHPTVPNPYNLLSGLPPSHQWYTVLDLKDAFFCLRLHPTSQSLFAFEWKDPEMGISGQLTWTRLPQGFKNSPTLFNEALHRDLADFRIQHPDLILLQYVDDLLLAATSELDCQQGTRALLQTLGDLGYRASAKKAQICQKQVKYLGYLLKEGQRWLTEARKETVMGQPTPKTPRQLREFLGKAGLCRLFIPGFAEMAAPLYPLTKPGTLFKWGPDQQKAYQEIKQALLTAPALGLPDLTKPFELFVDEKQGYAKGVLTQKLGPWRRPVAYLSKKLDPVAAGWPPCLRMVAAIAVLTKDVGKLTMGQPLVILAPHAVEALVKQPPDRWLSNARMTHYQALLLDTDRVQFGPIVALNPATLLPLPEEGLQHDCLDILAEAHGTRPDLTDQPLPDADHTWYTDGSSFLQEGQRRAGAAVTTETEVIWAKALPAGTSAQRAELIALTQALKMAAGKKLNVYTDSRYAFATAHIHGEIYRRRGWLTSEGKEIKNKDEILALLKALFLPKRLSIIHCPGHQKGNHAEARGNRMADQAAREVATRETPETSTLLAGKRTADGSEFEKRTADGSEFESPKKKAKVE

SEQ ID NO: 2438 - protein, 2094 aa, synthetic construct
MPAAKRVKLDGGDKKYSIGLDIGTNSVGWAVITDEYKVPSKKFKVLGNTDRHSIKKNLIGALLFDSGETAEATRLKRTARRRYTRRKNRICYLQEIFSNEMAKVDDSFFHRLEESFLVEEDKKHERHPIFGNIVDEVAYHEKYPTIYHLRKKLVDSTDKADLRLIYLALAHMIKFRGHFLIEGDLNPDNSDVDKLFIQLVQTYNQLFEENPINASGVDAKAILSARLSKSRRLENLIAQLPGEKKNGLFGNLIALSLGLTPNFKSNFDLAEDAKLQLSKDTYDDDLDNLLAQIGDQYADLFLAAKNLSDAILLSDILRVNTEITKAPLSASMIKRYDEHHQDLTLLKALVRQQLPEKYKEIFFDQSKNGYAGYIDGGASQEEFYKFIKPILEKMDGTEELLVKLNREDLLRKQRTFDNGSIPHQIHLGELHAILRRQEDFYPFLKDNREKIEKILTFRIPYYVGPLARGNSRFAWMTRKSEETITPWNFEEVVDKGASAQSFIERMTNFDKNLPNEKVLPKHSLLYEYFTVYNELTKVKYVTEGMRKPAFLSGEQKKAIVDLLFKTNRKVTVKQLKEDYFKKIECFDSVEISGVEDRFNASLGTYHDLLKIIKDKDFLDNEENEDILEDIVLTLTLFEDREMIEERLKTYAHLFDDKVMKQLKRRRYTGWGRLSRKLINGIRDKQSGKTILDFLKSDGFANRNFMQLIHDDSLTFKEDIQKAQVSGQGDSLHEHIANLAGSPAIKKGILQTVKVVDELVKVMGRHKPENIVIEMARENQTTQKGQKNSRERMKRIEEGIKELGSQILKEHPVENTQLQNEKLYLYYLQNGRDMYVDQELDINRLSDYDVDHIVPQSFLKDDSIDNKVLTRSDKARGKSDNVPSEEVVKKMKNYWRQLLNAKLITQRKFDNLTKAERGGLSELDKAGFIKRQLVETRQITKHVAQILDSRMNTKYDENDKLIREVKVITLKSKLVSDFRKDFQFYKVREINNYHHAHDAYLNAVVGTALIKKYPKLESEFVYGDYKVYDVRKMIAKSEQEIGKATAKYFFYSNIMNFFKTEITLANGEIRKRPLIETNGETGEIVWDKGRDFATVRKVLSMPQVNIVKKTEVQTGGFSKESILPKRNSDKLIARKKDWDPKKYGGFDSPTVAYSVLVVAKVEKGKSKKLKSVKELLGITIMERSSFEKNPIDFLEAKGYKEVKKDLIIKLPKYSLFELENGRKRMLASAGELQKGNELALPSKYVNFLYLASHYEKLKGSPEDNEQKQLFVEQHKHYLDEIIEQISEFSKRVILADANLDKVLSAYNKHRDKPIREQAENIIHLFTLTNLGAPAAFKYFDTTIDRKRYTSTKEVLDATLIHQSITGLYETRIDLSQLGGDGGGSSGGGGGSGGTLNIEDEYRLHETSKGPDVPLGSTWLSDFPQAWAETGGMGLAFRQAPLIISLKATSTPVSIKQYPMSQEARLGIKPHIQRLLDQGILVPCQSPWNTPLLPVKKPGTNDYRPVQDLREVNKRVEDIHPTVPNPYNLLSGLPPSHQWYTVLDLKDAFFCLRLHPTSQSLFAFEWKDPEMGISGQLTWTRLPQGFKNSPTLFNEALHRDLADFRIQHPDLILLQYVDDLLLAATSELDCQQGTRALLQTLGDLGYRASAKKAQICQKQVKYLGYLLKEGQRWLTEARKETVMGQPTPKTPRQLREFLGKAGLCRLFIPGFAEMAAPLYPLTKPGTLFKWGPDQQKAYQEIKQALLTAPALGLPDLTKPFELFVDEKQGYAKGVLTQKLGPWRRPVAYLSKKLDPVAAGWPPCLRMVAAIAVLTKDVGKLTMGQPLVILAPHAVEALVKQPPDRWLSNARMTHYQALLLDTDRVQFGPIVALNPATLLPLPEEGLQHDCLDILAEAHGTRPDLTDQPLPDADHTWYTDGSSFLQEGQRRAGAAVTTETEVIWAKALPAGTSAQRAELIALTQALKMAAGKKLNVYTDSRYAFATAHIHGEIYRRRGWLTSEGKEIKNKDEILALLKALFLPKRLSIIHCPGHQKGNHAEARGNRMADQAAREVATRETPETSTLLAGKRTADGSEFEKRTADGSEFESPKKKAKVE

SEQ ID NO: 2439 - protein, 2091 aa, synthetic construct
MPAAKRVKLDGGDKKYSIGLDIGTNSVGWAVITDEYKVPSKKFKVLGNTDRHSIKKNLIGALLFDSGETAEATRLKRTARRRYTRRKNRICYLQEIFSNEMAKVDDSFFHRLEESFLVEEDKKHERHPIFGNIVDEVAYHEKYPTIYHLRKKLVDSTDKADLRLIYLALAHMIKFRGHFLIEGDLNPDNSDVDKLFIQLVQTYNQLFEENPINASGVDAKAILSARLSKSRRLENLIAQLPGEKKNGLFGNLIALSLGLTPNFKSNFDLAEDAKLQLSKDTYDDDLDNLLAQIGDQYADLFLAAKNLSDAILLSDILRVNTEITKAPLSASMIKRYDEHHQDLTLLKALVRQQLPEKYKEIFFDQSKNGYAGYIDGGASQEEFYKFIKPILEKMDGTEELLVKLNREDLLRKQRTFDNGSIPHQIHLGELHAILRRQEDFYPFLKDNREKIEKILTFRIPYYVGPLARGNSRFAWMTRKSEETITPWNFEEVVDKGASAQSFIERMTNFDKNLPNEKVLPKHSLLYEYFTVYNELTKVKYVTEGMRKPAFLSGEQKKAIVDLLFKTNRKVTVKQLKEDYFKKIECFDSVEISGVEDRFNASLGTYHDLLKIIKDKDFLDNEENEDILEDIVLTLTLFEDREMIEERLKTYAHLFDDKVMKQLKRRRYTGWGRLSRKLINGIRDKQSGKTILDFLKSDGFANRNFMQLIHDDSLTFKEDIQKAQVSGQGDSLHEHIANLAGSPAIKKGILQTVKVVDELVKVMGRHKPENIVIEMARENQTTQKGQKNSRERMKRIEEGIKELGSQILKEHPVENTQLQNEKLYLYYLQNGRDMYVDQELDINRLSDYDVDHIVPQSFLKDDSIDNKVLTRSDKARGKSDNVPSEEVVKKMKNYWRQLLNAKLITQRKFDNLTKAERGGLSELDKAGFIKRQLVETRQITKHVAQILDSRMNTKYDENDKLIREVKVITLKSKLVSDFRKDFQFYKVREINNYHHAHDAYLNAVVGTALIKKYPKLESEFVYGDYKVYDVRKMIAKSEQEIGKATAKYFFYSNIMNFFKTEITLANGEIRKRPLIETNGETGEIVWDKGRDFATVRKVLSMPQVNIVKKTEVQTGGFSKESILPKRNSDKLIARKKDWDPKKYGGFDSPTVAYSVLVVAKVEKGKSKKLKSVKELLGITIMERSSFEKNPIDFLEAKGYKEVKKDLIIKLPKYSLFELENGRKRMLASAGELQKGNELALPSKYVNFLYLASHYEKLKGSPEDNEQKQLFVEQHKHYLDEIIEQISEFSKRVILADANLDKVLSAYNKHRDKPIREQAENIIHLFTLTNLGAPAAFKYFDTTIDRKRYTSTKEVLDATLIHQSITGLYETRIDLSQLGGDGGGGSGSSGGTLNIEDEYRLHETSKGPDVPLGSTWLSDFPQAWAETGGMGLAFRQAPLIISLKATSTPVSIKQYPMSQEARLGIKPHIQRLLDQGILVPCQSPWNTPLLPVKKPGTNDYRPVQDLREVNKRVEDIHPTVPNPYNLLSGLPPSHQWYTVLDLKDAFFCLRLHPTSQSLFAFEWKDPEMGISGQLTWTRLPQGFKNSPTLFNEALHRDLADFRIQHPDLILLQYVDDLLLAATSELDCQQGTRALLQTLGDLGYRASAKKAQICQKQVKYLGYLLKEGQRWLTEARKETVMGQPTPKTPRQLREFLGKAGLCRLFIPGFAEMAAPLYPLTKPGTLFKWGPDQQKAYQEIKQALLTAPALGLPDLTKPFELFVDEKQGYAKGVLTQKLGPWRRPVAYLSKKLDPVAAGWPPCLRMVAAIAVLTKDVGKLTMGQPLVILAPHAVEALVKQPPDRWLSNARMTHYQALLLDTDRVQFGPIVALNPATLLPLPEEGLQHDCLDILAEAHGTRPDLTDQPLPDADHTWYTDGSSFLQEGQRRAGAAVTTETEVIWAKALPAGTSAQRAELIALTQALKMAAGKKLNVYTDSRYAFATAHIHGEIYRRRGWLTSEGKEIKNKDEILALLKALFLPKRLSIIHCPGHQKGNHAEARGNRMADQAAREVATRETPETSTLLAGKRTADGSEFEKRTADGSEFESPKKKAKVE

SEQ ID NO: 2440 - protein, 2096 aa, synthetic construct
MPAAKRVKLDGGDKKYSIGLDIGTNSVGWAVITDEYKVPSKKFKVLGNTDRHSIKKNLIGALLFDSGETAEATRLKRTARRRYTRRKNRICYLQEIFSNEMAKVDDSFFHRLEESFLVEEDKKHERHPIFGNIVDEVAYHEKYPTIYHLRKKLVDSTDKADLRLIYLALAHMIKFRGHFLIEGDLNPDNSDVDKLFIQLVQTYNQLFEENPINASGVDAKAILSARLSKSRRLENLIAQLPGEKKNGLFGNLIALSLGLTPNFKSNFDLAEDAKLQLSKDTYDDDLDNLLAQIGDQYADLFLAAKNLSDAILLSDILRVNTEITKAPLSASMIKRYDEHHQDLTLLKALVRQQLPEKYKEIFFDQSKNGYAGYIDGGASQEEFYKFIKPILEKMDGTEELLVKLNREDLLRKQRTFDNGSIPHQIHLGELHAILRRQEDFYPFLKDNREKIEKILTFRIPYYVGPLARGNSRFAWMTRKSEETITPWNFEEVVDKGASAQSFIERMTNFDKNLPNEKVLPKHSLLYEYFTVYNELTKVKYVTEGMRKPAFLSGEQKKAIVDLLFKTNRKVTVKQLKEDYFKKIECFDSVEISGVEDRFNASLGTYHDLLKIIKDKDFLDNEENEDILEDIVLTLTLFEDREMIEERLKTYAHLFDDKVMKQLKRRRYTGWGRLSRKLINGIRDKQSGKTILDFLKSDGFANRNFMQLIHDDSLTFKEDIQKAQVSGQGDSLHEHIANLAGSPAIKKGILQTVKVVDELVKVMGRHKPENIVIEMARENQTTQKGQKNSRERMKRIEEGIKELGSQILKEHPVENTQLQNEKLYLYYLQNGRDMYVDQELDINRLSDYDVDHIVPQSFLKDDSIDNKVLTRSDKARGKSDNVPSEEVVKKMKNYWRQLLNAKLITQRKFDNLTKAERGGLSELDKAGFIKRQLVETRQITKHVAQILDSRMNTKYDENDKLIREVKVITLKSKLVSDFRKDFQFYKVREINNYHHAHDAYLNAVVGTALIKKYPKLESEFVYGDYKVYDVRKMIAKSEQEIGKATAKYFFYSNIMNFFKTEITLANGEIRKRPLIETNGETGEIVWDKGRDFATVRKVLSMPQVNIVKKTEVQTGGFSKESILPKRNSDKLIARKKDWDPKKYGGFDSPTVAYSVLVVAKVEKGKSKKLKSVKELLGITIMERSSFEKNPIDFLEAKGYKEVKKDLIIKLPKYSLFELENGRKRMLASAGELQKGNELALPSKYVNFLYLASHYEKLKGSPEDNEQKQLFVEQHKHYLDEIIEQISEFSKRVILADANLDKVLSAYNKHRDKPIREQAENIIHLFTLTNLGAPAAFKYFDTTIDRKRYTSTKEVLDATLIHQSITGLYETRIDLSQLGGDGGPAPGGGEAAAKGGTLNIEDEYRLHETSKGPDVPLGSTWLSDFPQAWAETGGMGLAVRQAPLIIPLKATSTPVSIKQYPMSQEARLGIKPHIQRLLDQGILVPCQSPWNTPLLPVKKPGTNDYRPVQDLREVNKRVEDIHPTVPNPYNLLSGLPPSHQWYTVLDLKDAFFCLRLHPTSQSLFAFEWRDPEMGISGQLTWTRLPQGFKNSPTLFNEALHRDLADFRIQHPDLILLQYVDDLLLAATSELDCQQGTRALLQTLGDLGYRASAKKAQICQKQVKYLGYLLKEGQRWLTEARKETVMGQPTPKTPRQLREFLGTAGFCRLWIPGFAEMAAPLYPLTKPGTLFEWGPDQQKAYQEIKQALLTAPALGLPDLTKPFELFVDEKQGYAKGVLTQKLGPWRRPVAYLSKKLDPVAAGWPPCLRMVAAIAVLTKDAGKLTMGQPLVILAPHAVEALVKQPPDRWLSNARMTHYQALLLDTDRVQFGPIVALNPATLLPLPEEGLQHDCLDILAEAHGTRPDLTDQPLPDADHTWYTDGSSFLQEGQRKAGAAVTTETEVVWAKALPAGTSAQRAELIALTQALKMAEGKKLNVYTDSRYAFATAHIHGEIYRRRGWLTSEGKEIKNKDEILALLKALFLPKRLSIIHCPGHQKGNRAEARGNRMADQAAREVATRETPETSTLLAGKRTADGSEFEKRTADGSEFESPKKKAKVE

SEQ ID NO: 2441 - protein, 2110 aa, synthetic construct
MPAAKRVKLDGGDKKYSIGLDIGTNSVGWAVITDEYKVPSKKFKVLGNTDRHSIKKNLIGALLFDSGETAEATRLKRTARRRYTRRKNRICYLQEIFSNEMAKVDDSFFHRLEESFLVEEDKKHERHPIFGNIVDEVAYHEKYPTIYHLRKKLVDSTDKADLRLIYLALAHMIKFRGHFLIEGDLNPDNSDVDKLFIQLVQTYNQLFEENPINASGVDAKAILSARLSKSRRLENLIAQLPGEKKNGLFGNLIALSLGLTPNFKSNFDLAEDAKLQLSKDTYDDDLDNLLAQIGDQYADLFLAAKNLSDAILLSDILRVNTEITKAPLSASMIKRYDEHHQDLTLLKALVRQQLPEKYKEIFFDQSKNGYAGYIDGGASQEEFYKFIKPILEKMDGTEELLVKLNREDLLRKQRTFDNGSIPHQIHLGELHAILRRQEDFYPFLKDNREKIEKILTFRIPYYVGPLARGNSRFAWMTRKSEETITPWNFEEVVDKGASAQSFIERMTNFDKNLPNEKVLPKHSLLYEYFTVYNELTKVKYVTEGMRKPAFLSGEQKKAIVDLLFKTNRKVTVKQLKEDYFKKIECFDSVEISGVEDRFNASLGTYHDLLKIIKDKDFLDNEENEDILEDIVLTLTLFEDREMIEERLKTYAHLFDDKVMKQLKRRRYTGWGRLSRKLINGIRDKQSGKTILDFLKSDGFANRNFMQLIHDDSLTFKEDIQKAQVSGQGDSLHEHIANLAGSPAIKKGILQTVKVVDELVKVMGRHKPENIVIEMARENQTTQKGQKNSRERMKRIEEGIKELGSQILKEHPVENTQLQNEKLYLYYLQNGRDMYVDQELDINRLSDYDVDHIVPQSFLKDDSIDNKVLTRSDKARGKSDNVPSEEVVKKMKNYWRQLLNAKLITQRKFDNLTKAERGGLSELDKAGFIKRQLVETRQITKHVAQILDSRMNTKYDENDKLIREVKVITLKSKLVSDFRKDFQFYKVREINNYHHAHDAYLNAVVGTALIKKYPKLESEFVYGDYKVYDVRKMIAKSEQEIGKATAKYFFYSNIMNFFKTEITLANGEIRKRPLIETNGETGEIVWDKGRDFATVRKVLSMPQVNIVKKTEVQTGGFSKESILPKRNSDKLIARKKDWDPKKYGGFDSPTVAYSVLVVAKVEKGKSKKLKSVKELLGITIMERSSFEKNPIDFLEAKGYKEVKKDLIIKLPKYSLFELENGRKRMLASAGELQKGNELALPSKYVNFLYLASHYEKLKGSPEDNEQKQLFVEQHKHYLDEIIEQISEFSKRVILADANLDKVLSAYNKHRDKPIREQAENIIHLFTLTNLGAPAAFKYFDTTIDRKRYTSTKEVLDATLIHQSITGLYETRIDLSQLGGDGGGGGGSGGGGSGGGGSGGGGSGGGGSGGTLNIEDEYRLHETSKGPDVPLGSTWLSDFPQAWAETGGMGLAVRQAPLIIPLKATSTPVSIKQYPMSQEARLGIKPHIQRLLDQGILVPCQSPWNTPLLPVKKPGTNDYRPVQDLREVNKRVEDIHPTVPNPYNLLSGLPPSHQWYTVLDLKDAFFCLRLHPTSQSLFAFEWRDPEMGISGQLTWTRLPQGFKNSPTLFNEALHRDLADFRIQHPDLILLQYVDDLLLAATSELDCQQGTRALLQTLGDLGYRASAKKAQICQKQVKYLGYLLKEGQRWLTEARKETVMGQPTPKTPRQLREFLGTAGFCRLWIPGFAEMAAPLYPLTKPGTLFEWGPDQQKAYQEIKQALLTAPALGLPDLTKPFELFVDEKQGYAKGVLTQKLGPWRRPVAYLSKKLDPVAAGWPPCLRMVAAIAVLTKDAGKLTMGQPLVILAPHAVEALVKQPPDRWLSNARMTHYQALLLDTDRVQFGPIVALNPATLLPLPEEGLQHDCLDILAEAHGTRPDLTDQPLPDADHTWYTDGSSFLQEGQRKAGAAVTTETEVVWAKALPAGTSAQRAELIALTQALKMAEGKKLNVYTDSRYAFATAHIHGEIYRRRGWLTSEGKEIKNKDEILALLKALFLPKRLSIIHCPGHQKGNRAEARGNRMADQAAREVATRETPETSTLLAGKRTADGSEFEKRTADGSEFESPKKKAKVE

SEQ ID NO: 2442 - protein, 2088 aa, synthetic construct
MPAAKRVKLDGGDKKYSIGLDIGTNSVGWAVITDEYKVPSKKFKVLGNTDRHSIKKNLIGALLFDSGETAEATRLKRTARRRYTRRKNRICYLQEIFSNEMAKVDDSFFHRLEESFLVEEDKKHERHPIFGNIVDEVAYHEKYPTIYHLRKKLVDSTDKADLRLIYLALAHMIKFRGHFLIEGDLNPDNSDVDKLFIQLVQTYNQLFEENPINASGVDAKAILSARLSKSRRLENLIAQLPGEKKNGLFGNLIALSLGLTPNFKSNFDLAEDAKLQLSKDTYDDDLDNLLAQIGDQYADLFLAAKNLSDAILLSDILRVNTEITKAPLSASMIKRYDEHHQDLTLLKALVRQQLPEKYKEIFFDQSKNGYAGYIDGGASQEEFYKFIKPILEKMDGTEELLVKLNREDLLRKQRTFDNGSIPHQIHLGELHAILRRQEDFYPFLKDNREKIEKILTFRIPYYVGPLARGNSRFAWMTRKSEETITPWNFEEVVDKGASAQSFIERMTNFDKNLPNEKVLPKHSLLYEYFTVYNELTKVKYVTEGMRKPAFLSGEQKKAIVDLLFKTNRKVTVKQLKEDYFKKIECFDSVEISGVEDRFNASLGTYHDLLKIIKDKDFLDNEENEDILEDIVLTLTLFEDREMIEERLKTYAHLFDDKVMKQLKRRRYTGWGRLSRKLINGIRDKQSGKTILDFLKSDGFANRNFMQLIHDDSLTFKEDIQKAQVSGQGDSLHEHIANLAGSPAIKKGILQTVKVVDELVKVMGRHKPENIVIEMARENQTTQKGQKNSRERMKRIEEGIKELGSQILKEHPVENTQLQNEKLYLYYLQNGRDMYVDQELDINRLSDYDVDHIVPQSFLKDDSIDNKVLTRSDKARGKSDNVPSEEVVKKMKNYWRQLLNAKLITQRKFDNLTKAERGGLSELDKAGFIKRQLVETRQITKHVAQILDSRMNTKYDENDKLIREVKVITLKSKLVSDFRKDFQFYKVREINNYHHAHDAYLNAVVGTALIKKYPKLESEFVYGDYKVYDVRKMIAKSEQEIGKATAKYFFYSNIMNFFKTEITLANGEIRKRPLIETNGETGEIVWDKGRDFATVRKVLSMPQVNIVKKTEVQTGGFSKESILPKRNSDKLIARKKDWDPKKYGGFDSPTVAYSVLVVAKVEKGKSKKLKSVKELLGITIMERSSFEKNPIDFLEAKGYKEVKKDLIIKLPKYSLFELENGRKRMLASAGELQKGNELALPSKYVNFLYLASHYEKLKGSPEDNEQKQLFVEQHKHYLDEIIEQISEFSKRVILADANLDKVLSAYNKHRDKPIREQAENIIHLFTLTNLGAPAAFKYFDTTIDRKRYTSTKEVLDATLIHQSITGLYETRIDLSQLGGDGGPAPGGTLNIEDEYRLHETSKGPDVPLGSTWLSDFPQAWAETGGMGLAVRQAPLIIPLKATSTPVSIKQYPMSQEARLGIKPHIQRLLDQGILVPCQSPWNTPLLPVKKPGTNDYRPVQDLREVNKRVEDIHPTVPNPYNLLSGLPPSHQWYTVLDLKDAFFCLRLHPTSQSLFAFEWRDPEMGISGQLTWTRLPQGFKNSPTLFNEALHRDLADFRIQHPDLILLQYVDDLLLAATSELDCQQGTRALLQTLGDLGYRASAKKAQICQKQVKYLGYLLKEGQRWLTEARKETVMGQPTPKTPRQLREFLGTAGFCRLWIPGFAEMAAPLYPLTKPGTLFEWGPDQQKAYQEIKQALLTAPALGLPDLTKPFELFVDEKQGYAKGVLTQKLGPWRRPVAYLSKKLDPVAAGWPPCLRMVAAIAVLTKDAGKLTMGQPLVILAPHAVEALVKQPPDRWLSNARMTHYQALLLDTDRVQFGPIVALNPATLLPLPEEGLQHDCLDILAEAHGTRPDLTDQPLPDADHTWYTDGSSFLQEGQRKAGAAVTTETEVVWAKALPAGTSAQRAELIALTQALKMAEGKKLNVYTDSRYAFATAHIHGEIYRRRGWLTSEGKEIKNKDEILALLKALFLPKRLSIIHCPGHQKGNRAEARGNRMADQAAREVATRETPETSTLLAGKRTADGSEFEKRTADGSEFESPKKKAKVE

SEQ ID NO: 2443 - protein, 2100 aa, synthetic construct
MPAAKRVKLDGGDKKYSIGLDIGTNSVGWAVITDEYKVPSKKFKVLGNTDRHSIKKNLIGALLFDSGETAEATRLKRTARRRYTRRKNRICYLQEIFSNEMAKVDDSFFHRLEESFLVEEDKKHERHPIFGNIVDEVAYHEKYPTIYHLRKKLVDSTDKADLRLIYLALAHMIKFRGHFLIEGDLNPDNSDVDKLFIQLVQTYNQLFEENPINASGVDAKAILSARLSKSRRLENLIAQLPGEKKNGLFGNLIALSLGLTPNFKSNFDLAEDAKLQLSKDTYDDDLDNLLAQIGDQYADLFLAAKNLSDAILLSDILRVNTEITKAPLSASMIKRYDEHHQDLTLLKALVRQQLPEKYKEIFFDQSKNGYAGYIDGGASQEEFYKFIKPILEKMDGTEELLVKLNREDLLRKQRTFDNGSIPHQIHLGELHAILRRQEDFYPFLKDNREKIEKILTFRIPYYVGPLARGNSRFAWMTRKSEETITPWNFEEVVDKGASAQSFIERMTNFDKNLPNEKVLPKHSLLYEYFTVYNELTKVKYVTEGMRKPAFLSGEQKKAIVDLLFKTNRKVTVKQLKEDYFKKIECFDSVEISGVEDRFNASLGTYHDLLKIIKDKDFLDNEENEDILEDIVLTLTLFEDREMIEERLKTYAHLFDDKVMKQLKRRRYTGWGRLSRKLINGIRDKQSGKTILDFLKSDGFANRNFMQLIHDDSLTFKEDIQKAQVSGQGDSLHEHIANLAGSPAIKKGILQTVKVVDELVKVMGRHKPENIVIEMARENQTTQKGQKNSRERMKRIEEGIKELGSQILKEHPVENTQLQNEKLYLYYLQNGRDMYVDQELDINRLSDYDVDHIVPQSFLKDDSIDNKVLTRSDKARGKSDNVPSEEVVKKMKNYWRQLLNAKLITQRKFDNLTKAERGGLSELDKAGFIKRQLVETRQITKHVAQILDSRMNTKYDENDKLIREVKVITLKSKLVSDFRKDFQFYKVREINNYHHAHDAYLNAVVGTALIKKYPKLESEFVYGDYKVYDVRKMIAKSEQEIGKATAKYFFYSNIMNFFKTEITLANGEIRKRPLIETNGETGEIVWDKGRDFATVRKVLSMPQVNIVKKTEVQTGGFSKESILPKRNSDKLIARKKDWDPKKYGGFDSPTVAYSVLVVAKVEKGKSKKLKSVKELLGITIMERSSFEKNPIDFLEAKGYKEVKKDLIIKLPKYSLFELENGRKRMLASAGELQKGNELALPSKYVNFLYLASHYEKLKGSPEDNEQKQLFVEQHKHYLDEIIEQISEFSKRVILADANLDKVLSAYNKHRDKPIREQAENIIHLFTLTNLGAPAAFKYFDTTIDRKRYTSTKEVLDATLIHQSITGLYETRIDLSQLGGDGGGSSGSSGSSGSSGSSGGTLNIEDEYRLHETSKGPDVPLGSTWLSDFPQAWAETGGMGLAVRQAPLIIPLKATSTPVSIKQYPMSQEARLGIKPHIQRLLDQGILVPCQSPWNTPLLPVKKPGTNDYRPVQDLREVNKRVEDIHPTVPNPYNLLSGLPPSHQWYTVLDLKDAFFCLRLHPTSQSLFAFEWRDPEMGISGQLTWTRLPQGFKNSPTLFNEALHRDLADFRIQHPDLILLQYVDDLLLAATSELDCQQGTRALLQTLGDLGYRASAKKAQICQKQVKYLGYLLKEGQRWLTEARKETVMGQPTPKTPRQLREFLGTAGFCRLWIPGFAEMAAPLYPLTKPGTLFEWGPDQQKAYQEIKQALLTAPALGLPDLTKPFELFVDEKQGYAKGVLTQKLGPWRRPVAYLSKKLDPVAAGWPPCLRMVAAIAVLTKDAGKLTMGQPLVILAPHAVEALVKQPPDRWLSNARMTHYQALLLDTDRVQFGPIVALNPATLLPLPEEGLQHDCLDILAEAHGTRPDLTDQPLPDADHTWYTDGSSFLQEGQRKAGAAVTTETEVVWAKALPAGTSAQRAELIALTQALKMAEGKKLNVYTDSRYAFATAHIHGEIYRRRGWLTSEGKEIKNKDEILALLKALFLPKRLSIIHCPGHQKGNRAEARGNRMADQAAREVATRETPETSTLLAGKRTADGSEFEKRTADGSEFESPKKKAKVE

SEQ ID NO: 2444 - protein, 2096 aa, synthetic construct
MPAAKRVKLDGGDKKYSIGLDIGTNSVGWAVITDEYKVPSKKFKVLGNTDRHSIKKNLIGALLFDSGETAEATRLKRTARRRYTRRKNRICYLQEIFSNEMAKVDDSFFHRLEESFLVEEDKKHERHPIFGNIVDEVAYHEKYPTIYHLRKKLVDSTDKADLRLIYLALAHMIKFRGHFLIEGDLNPDNSDVDKLFIQLVQTYNQLFEENPINASGVDAKAILSARLSKSRRLENLIAQLPGEKKNGLFGNLIALSLGLTPNFKSNFDLAEDAKLQLSKDTYDDDLDNLLAQIGDQYADLFLAAKNLSDAILLSDILRVNTEITKAPLSASMIKRYDEHHQDLTLLKALVRQQLPEKYKEIFFDQSKNGYAGYIDGGASQEEFYKFIKPILEKMDGTEELLVKLNREDLLRKQRTFDNGSIPHQIHLGELHAILRRQEDFYPFLKDNREKIEKILTFRIPYYVGPLARGNSRFAWMTRKSEETITPWNFEEVVDKGASAQSFIERMTNFDKNLPNEKVLPKHSLLYEYFTVYNELTKVKYVTEGMRKPAFLSGEQKKAIVDLLFKTNRKVTVKQLKEDYFKKIECFDSVEISGVEDRFNASLGTYHDLLKIIKDKDFLDNEENEDILEDIVLTLTLFEDREMIEERLKTYAHLFDDKVMKQLKRRRYTGWGRLSRKLINGIRDKQSGKTILDFLKSDGFANRNFMQLIHDDSLTFKEDIQKAQVSGQGDSLHEHIANLAGSPAIKKGILQTVKVVDELVKVMGRHKPENIVIEMARENQTTQKGQKNSRERMKRIEEGIKELGSQILKEHPVENTQLQNEKLYLYYLQNGRDMYVDQELDINRLSDYDVDHIVPQSFLKDDSIDNKVLTRSDKARGKSDNVPSEEVVKKMKNYWRQLLNAKLITQRKFDNLTKAERGGLSELDKAGFIKRQLVETRQITKHVAQILDSRMNTKYDENDKLIREVKVITLKSKLVSDFRKDFQFYKVREINNYHHAHDAYLNAVVGTALIKKYPKLESEFVYGDYKVYDVRKMIAKSEQEIGKATAKYFFYSNIMNFFKTEITLANGEIRKRPLIETNGETGEIVWDKGRDFATVRKVLSMPQVNIVKKTEVQTGGFSKESILPKRNSDKLIARKKDWDPKKYGGFDSPTVAYSVLVVAKVEKGKSKKLKSVKELLGITIMERSSFEKNPIDFLEAKGYKEVKKDLIIKLPKYSLFELENGRKRMLASAGELQKGNELALPSKYVNFLYLASHYEKLKGSPEDNEQKQLFVEQHKHYLDEIIEQISEFSKRVILADANLDKVLSAYNKHRDKPIREQAENIIHLFTLTNLGAPAAFKYFDTTIDRKRYTSTKEVLDATLIHQSITGLYETRIDLSQLGGDGGEAAAKGSSGGSGGTLNIEDEYRLHETSKGPDVPLGSTWLSDFPQAWAETGGMGLAVRQAPLIIPLKATSTPVSIKQYPMSQEARLGIKPHIQRLLDQGILVPCQSPWNTPLLPVKKPGTNDYRPVQDLREVNKRVEDIHPTVPNPYNLLSGLPPSHQWYTVLDLKDAFFCLRLHPTSQSLFAFEWRDPEMGISGQLTWTRLPQGFKNSPTLFNEALHRDLADFRIQHPDLILLQYVDDLLLAATSELDCQQGTRALLQTLGDLGYRASAKKAQICQKQVKYLGYLLKEGQRWLTEARKETVMGQPTPKTPRQLREFLGTAGFCRLWIPGFAEMAAPLYPLTKPGTLFEWGPDQQKAYQEIKQALLTAPALGLPDLTKPFELFVDEKQGYAKGVLTQKLGPWRRPVAYLSKKLDPVAAGWPPCLRMVAAIAVLTKDAGKLTMGQPLVILAPHAVEALVKQPPDRWLSNARMTHYQALLLDTDRVQFGPIVALNPATLLPLPEEGLQHDCLDILAEAHGTRPDLTDQPLPDADHTWYTDGSSFLQEGQRKAGAAVTTETEVVWAKALPAGTSAQRAELIALTQALKMAEGKKLNVYTDSRYAFATAHIHGEIYRRRGWLTSEGKEIKNKDEILALLKALFLPKRLSIIHCPGHQKGNRAEARGNRMADQAAREVATRETPETSTLLAGKRTADGSEFEKRTADGSEFESPKKKAKVE

SEQ ID NO: 2445 - protein, 2091 aa, synthetic construct
MPAAKRVKLDGGDKKYSIGLDIGTNSVGWAVITDEYKVPSKKFKVLGNTDRHSIKKNLIGALLFDSGETAEATRLKRTARRRYTRRKNRICYLQEIFSNEMAKVDDSFFHRLEESFLVEEDKKHERHPIFGNIVDEVAYHEKYPTIYHLRKKLVDSTDKADLRLIYLALAHMIKFRGHFLIEGDLNPDNSDVDKLFIQLVQTYNQLFEENPINASGVDAKAILSARLSKSRRLENLIAQLPGEKKNGLFGNLIALSLGLTPNFKSNFDLAEDAKLQLSKDTYDDDLDNLLAQIGDQYADLFLAAKNLSDAILLSDILRVNTEITKAPLSASMIKRYDEHHQDLTLLKALVRQQLPEKYKEIFFDQSKNGYAGYIDGGASQEEFYKFIKPILEKMDGTEELLVKLNREDLLRKQRTFDNGSIPHQIHLGELHAILRRQEDFYPFLKDNREKIEKILTFRIPYYVGPLARGNSRFAWMTRKSEETITPWNFEEVVDKGASAQSFIERMTNFDKNLPNEKVLPKHSLLYEYFTVYNELTKVKYVTEGMRKPAFLSGEQKKAIVDLLFKTNRKVTVKQLKEDYFKKIECFDSVEISGVEDRFNASLGTYHDLLKIIKDKDFLDNEENEDILEDIVLTLTLFEDREMIEERLKTYAHLFDDKVMKQLKRRRYTGWGRLSRKLINGIRDKQSGKTILDFLKSDGFANRNFMQLIHDDSLTFKEDIQKAQVSGQGDSLHEHIANLAGSPAIKKGILQTVKVVDELVKVMGRHKPENIVIEMARENQTTQKGQKNSRERMKRIEEGIKELGSQILKEHPVENTQLQNEKLYLYYLQNGRDMYVDQELDINRLSDYDVDHIVPQSFLKDDSIDNKVLTRSDKARGKSDNVPSEEVVKKMKNYWRQLLNAKLITQRKFDNLTKAERGGLSELDKAGFIKRQLVETRQITKHVAQILDSRMNTKYDENDKLIREVKVITLKSKLVSDFRKDFQFYKVREINNYHHAHDAYLNAVVGTALIKKYPKLESEFVYGDYKVYDVRKMIAKSEQEIGKATAKYFFYSNIMNFFKTEITLANGEIRKRPLIETNGETGEIVWDKGRDFATVRKVLSMPQVNIVKKTEVQTGGFSKESILPKRNSDKLIARKKDWDPKKYGGFDSPTVAYSVLVVAKVEKGKSKKLKSVKELLGITIMERSSFEKNPIDFLEAKGYKEVKKDLIIKLPKYSLFELENGRKRMLASAGELQKGNELALPSKYVNFLYLASHYEKLKGSPEDNEQKQLFVEQHKHYLDEIIEQISEFSKRVILADANLDKVLSAYNKHRDKPIREQAENIIHLFTLTNLGAPAAFKYFDTTIDRKRYTSTKEVLDATLIHQSITGLYETRIDLSQLGGDGGGGGPAPGGTLNIEDEYRLHETSKGPDVPLGSTWLSDFPQAWAETGGMGLAVRQAPLIIPLKATSTPVSIKQYPMSQEARLGIKPHIQRLLDQGILVPCQSPWNTPLLPVKKPGTNDYRPVQDLREVNKRVEDIHPTVPNPYNLLSGLPPSHQWYTVLDLKDAFFCLRLHPTSQSLFAFEWRDPEMGISGQLTWTRLPQGFKNSPTLFNEALHRDLADFRIQHPDLILLQYVDDLLLAATSELDCQQGTRALLQTLGDLGYRASAKKAQICQKQVKYLGYLLKEGQRWLTEARKETVMGQPTPKTPRQLREFLGTAGFCRLWIPGFAEMAAPLYPLTKPGTLFEWGPDQQKAYQEIKQALLTAPALGLPDLTKPFELFVDEKQGYAKGVLTQKLGPWRRPVAYLSKKLDPVAAGWPPCLRMVAAIAVLTKDAGKLTMGQPLVILAPHAVEALVKQPPDRWLSNARMTHYQALLLDTDRVQFGPIVALNPATLLPLPEEGLQHDCLDILAEAHGTRPDLTDQPLPDADHTWYTDGSSFLQEGQRKAGAAVTTETEVVWAKALPAGTSAQRAELIALTQALKMAEGKKLNVYTDSRYAFATAHIHGEIYRRRGWLTSEGKEIKNKDEILALLKALFLPKRLSIIHCPGHQKGNRAEARGNRMADQAAREVATRETPETSTLLAGKRTADGSEFEKRTADGSEFESPKKKAKVE

SEQ ID NO: 2446 - protein, 2105 aa, synthetic construct
MPAAKRVKLDGGDKKYSIGLDIGTNSVGWAVITDEYKVPSKKFKVLGNTDRHSIKKNLIGALLFDSGETAEATRLKRTARRRYTRRKNRICYLQEIFSNEMAKVDDSFFHRLEESFLVEEDKKHERHPIFGNIVDEVAYHEKYPTIYHLRKKLVDSTDKADLRLIYLALAHMIKFRGHFLIEGDLNPDNSDVDKLFIQLVQTYNQLFEENPINASGVDAKAILSARLSKSRRLENLIAQLPGEKKNGLFGNLIALSLGLTPNFKSNFDLAEDAKLQLSKDTYDDDLDNLLAQIGDQYADLFLAAKNLSDAILLSDILRVNTEITKAPLSASMIKRYDEHHQDLTLLKALVRQQLPEKYKEIFFDQSKNGYAGYIDGGASQEEFYKFIKPILEKMDGTEELLVKLNREDLLRKQRTFDNGSIPHQIHLGELHAILRRQEDFYPFLKDNREKIEKILTFRIPYYVGPLARGNSRFAWMTRKSEETITPWNFEEVVDKGASAQSFIERMTNFDKNLPNEKVLPKHSLLYEYFTVYNELTKVKYVTEGMRKPAFLSGEQKKAIVDLLFKTNRKVTVKQLKEDYFKKIECFDSVEISGVEDRFNASLGTYHDLLKIIKDKDFLDNEENEDILEDIVLTLTLFEDREMIEERLKTYAHLFDDKVMKQLKRRRYTGWGRLSRKLINGIRDKQSGKTILDFLKSDGFANRNFMQLIHDDSLTFKEDIQKAQVSGQGDSLHEHIANLAGSPAIKKGILQTVKVVDELVKVMGRHKPENIVIEMARENQTTQKGQKNSRERMKRIEEGIKELGSQILKEHPVENTQLQNEKLYLYYLQNGRDMYVDQELDINRLSDYDVDHIVPQSFLKDDSIDNKVLTRSDKARGKSDNVPSEEVVKKMKNYWRQLLNAKLITQRKFDNLTKAERGGLSELDKAGFIKRQLVETRQITKHVAQILDSRMNTKYDENDKLIREVKVITLKSKLVSDFRKDFQFYKVREINNYHHAHDAYLNAVVGTALIKKYPKLESEFVYGDYKVYDVRKMIAKSEQEIGKATAKYFFYSNIMNFFKTEITLANGEIRKRPLIETNGETGEIVWDKGRDFATVRKVLSMPQVNIVKKTEVQTGGFSKESILPKRNSDKLIARKKDWDPKKYGGFDSPTVAYSVLVVAKVEKGKSKKLKSVKELLGITIMERSSFEKNPIDFLEAKGYKEVKKDLIIKLPKYSLFELENGRKRMLASAGELQKGNELALPSKYVNFLYLASHYEKLKGSPEDNEQKQLFVEQHKHYLDEIIEQISEFSKRVILADANLDKVLSAYNKHRDKPIREQAENIIHLFTLTNLGAPAAFKYFDTTIDRKRYTSTKEVLDATLIHQSITGLYETRIDLSQLGGDGGEAAAKEAAAKEAAAKEAAAKGGTLNIEDEYRLHETSKGPDVPLGSTWLSDFPQAWAETGGMGLAVRQAPLIIPLKATSTPVSIKQYPMSQEARLGIKPHIQRLLDQGILVPCQSPWNTPLLPVKKPGTNDYRPVQDLREVNKRVEDIHPTVPNPYNLLSGLPPSHQWYTVLDLKDAFFCLRLHPTSQSLFAFEWRDPEMGISGQLTWTRLPQGFKNSPTLFNEALHRDLADFRIQHPDLILLQYVDDLLLAATSELDCQQGTRALLQTLGDLGYRASAKKAQICQKQVKYLGYLLKEGQRWLTEARKETVMGQPTPKTPRQLREFLGTAGFCRLWIPGFAEMAAPLYPLTKPGTLFEWGPDQQKAYQEIKQALLTAPALGLPDLTKPFELFVDEKQGYAKGVLTQKLGPWRRPVAYLSKKLDPVAAGWPPCLRMVAAIAVLTKDAGKLTMGQPLVILAPHAVEALVKQPPDRWLSNARMTHYQALLLDTDRVQFGPIVALNPATLLPLPEEGLQHDCLDILAEAHGTRPDLTDQPLPDADHTWYTDGSSFLQEGQRKAGAAVTTETEVVWAKALPAGTSAQRAELIALTQALKMAEGKKLNVYTDSRYAFATAHIHGEIYRRRGWLTSEGKEIKNKDEILALLKALFLPKRLSIIHCPGHQKGNRAEARGNRMADQAAREVATRETPETSTLLAGKRTADGSEFEKRTADGSEFESPKKKAKVE

SEQ ID NO: 2447 - protein, 2096 aa, synthetic construct
MPAAKRVKLDGGDKKYSIGLDIGTNSVGWAVITDEYKVPSKKFKVLGNTDRHSIKKNLIGALLFDSGETAEATRLKRTARRRYTRRKNRICYLQEIFSNEMAKVDDSFFHRLEESFLVEEDKKHERHPIFGNIVDEVAYHEKYPTIYHLRKKLVDSTDKADLRLIYLALAHMIKFRGHFLIEGDLNPDNSDVDKLFIQLVQTYNQLFEENPINASGVDAKAILSARLSKSRRLENLIAQLPGEKKNGLFGNLIALSLGLTPNFKSNFDLAEDAKLQLSKDTYDDDLDNLLAQIGDQYADLFLAAKNLSDAILLSDILRVNTEITKAPLSASMIKRYDEHHQDLTLLKALVRQQLPEKYKEIFFDQSKNGYAGYIDGGASQEEFYKFIKPILEKMDGTEELLVKLNREDLLRKQRTFDNGSIPHQIHLGELHAILRRQEDFYPFLKDNREKIEKILTFRIPYYVGPLARGNSRFAWMTRKSEETITPWNFEEVVDKGASAQSFIERMTNFDKNLPNEKVLPKHSLLYEYFTVYNELTKVKYVTEGMRKPAFLSGEQKKAIVDLLFKTNRKVTVKQLKEDYFKKIECFDSVEISGVEDRFNASLGTYHDLLKIIKDKDFLDNEENEDILEDIVLTLTLFEDREMIEERLKTYAHLFDDKVMKQLKRRRYTGWGRLSRKLINGIRDKQSGKTILDFLKSDGFANRNFMQLIHDDSLTFKEDIQKAQVSGQGDSLHEHIANLAGSPAIKKGILQTVKVVDELVKVMGRHKPENIVIEMARENQTTQKGQKNSRERMKRIEEGIKELGSQILKEHPVENTQLQNEKLYLYYLQNGRDMYVDQELDINRLSDYDVDHIVPQSFLKDDSIDNKVLTRSDKARGKSDNVPSEEVVKKMKNYWRQLLNAKLITQRKFDNLTKAERGGLSELDKAGFIKRQLVETRQITKHVAQILDSRMNTKYDENDKLIREVKVITLKSKLVSDFRKDFQFYKVREINNYHHAHDAYLNAVVGTALIKKYPKLESEFVYGDYKVYDVRKMIAKSEQEIGKATAKYFFYSNIMNFFKTEITLANGEIRKRPLIETNGETGEIVWDKGRDFATVRKVLSMPQVNIVKKTEVQTGGFSKESILPKRNSDKLIARKKDWDPKKYGGFDSPTVAYSVLVVAKVEKGKSKKLKSVKELLGITIMERSSFEKNPIDFLEAKGYKEVKKDLIIKLPKYSLFELENGRKRMLASAGELQKGNELALPSKYVNFLYLASHYEKLKGSPEDNEQKQLFVEQHKHYLDEIIEQISEFSKRVILADANLDKVLSAYNKHRDKPIREQAENIIHLFTLTNLGAPAAFKYFDTTIDRKRYTSTKEVLDATLIHQSITGLYETRIDLSQLGGDGGGGSPAPEAAAKGGTLNIEDEYRLHETSKGPDVPLGSTWLSDFPQAWAETGGMGLAVRQAPLIIPLKATSTPVSIKQYPMSQEARLGIKPHIQRLLDQGILVPCQSPWNTPLLPVKKPGTNDYRPVQDLREVNKRVEDIHPTVPNPYNLLSGLPPSHQWYTVLDLKDAFFCLRLHPTSQSLFAFEWRDPEMGISGQLTWTRLPQGFKNSPTLFNEALHRDLADFRIQHPDLILLQYVDDLLLAATSELDCQQGTRALLQTLGDLGYRASAKKAQICQKQVKYLGYLLKEGQRWLTEARKETVMGQPTPKTPRQLREFLGTAGFCRLWIPGFAEMAAPLYPLTKPGTLFEWGPDQQKAYQEIKQALLTAPALGLPDLTKPFELFVDEKQGYAKGVLTQKLGPWRRPVAYLSKKLDPVAAGWPPCLRMVAAIAVLTKDAGKLTMGQPLVILAPHAVEALVKQPPDRWLSNARMTHYQALLLDTDRVQFGPIVALNPATLLPLPEEGLQHDCLDILAEAHGTRPDLTDQPLPDADHTWYTDGSSFLQEGQRKAGAAVTTETEVVWAKALPAGTSAQRAELIALTQALKMAEGKKLNVYTDSRYAFATAHIHGEIYRRRGWLTSEGKEIKNKDEILALLKALFLPKRLSIIHCPGHQKGNRAEARGNRMADQAAREVATRETPETSTLLAGKRTADGSEFEKRTADGSEFESPKKKAKVE

SEQ ID NO: 2448 - protein, 2090 aa, synthetic construct
MPAAKRVKLDGGDKKYSIGLDIGTNSVGWAVITDEYKVPSKKFKVLGNTDRHSIKKNLIGALLFDSGETAEATRLKRTARRRYTRRKNRICYLQEIFSNEMAKVDDSFFHRLEESFLVEEDKKHERHPIFGNIVDEVAYHEKYPTIYHLRKKLVDSTDKADLRLIYLALAHMIKFRGHFLIEGDLNPDNSDVDKLFIQLVQTYNQLFEENPINASGVDAKAILSARLSKSRRLENLIAQLPGEKKNGLFGNLIALSLGLTPNFKSNFDLAEDAKLQLSKDTYDDDLDNLLAQIGDQYADLFLAAKNLSDAILLSDILRVNTEITKAPLSASMIKRYDEHHQDLTLLKALVRQQLPEKYKEIFFDQSKNGYAGYIDGGASQEEFYKFIKPILEKMDGTEELLVKLNREDLLRKQRTFDNGSIPHQIHLGELHAILRRQEDFYPFLKDNREKIEKILTFRIPYYVGPLARGNSRFAWMTRKSEETITPWNFEEVVDKGASAQSFIERMTNFDKNLPNEKVLPKHSLLYEYFTVYNELTKVKYVTEGMRKPAFLSGEQKKAIVDLLFKTNRKVTVKQLKEDYFKKIECFDSVEISGVEDRFNASLGTYHDLLKIIKDKDFLDNEENEDILEDIVLTLTLFEDREMIEERLKTYAHLFDDKVMKQLKRRRYTGWGRLSRKLINGIRDKQSGKTILDFLKSDGFANRNFMQLIHDDSLTFKEDIQKAQVSGQGDSLHEHIANLAGSPAIKKGILQTVKVVDELVKVMGRHKPENIVIEMARENQTTQKGQKNSRERMKRIEEGIKELGSQILKEHPVENTQLQNEKLYLYYLQNGRDMYVDQELDINRLSDYDVDHIVPQSFLKDDSIDNKVLTRSDKARGKSDNVPSEEVVKKMKNYWRQLLNAKLITQRKFDNLTKAERGGLSELDKAGFIKRQLVETRQITKHVAQILDSRMNTKYDENDKLIREVKVITLKSKLVSDFRKDFQFYKVREINNYHHAHDAYLNAVVGTALIKKYPKLESEFVYGDYKVYDVRKMIAKSEQEIGKATAKYFFYSNIMNFFKTEITLANGEIRKRPLIETNGETGEIVWDKGRDFATVRKVLSMPQVNIVKKTEVQTGGFSKESILPKRNSDKLIARKKDWDPKKYGGFDSPTVAYSVLVVAKVEKGKSKKLKSVKELLGITIMERSSFEKNPIDFLEAKGYKEVKKDLIIKLPKYSLFELENGRKRMLASAGELQKGNELALPSKYVNFLYLASHYEKLKGSPEDNEQKQLFVEQHKHYLDEIIEQISEFSKRVILADANLDKVLSAYNKHRDKPIREQAENIIHLFTLTNLGAPAAFKYFDTTIDRKRYTSTKEVLDATLIHQSITGLYETRIDLSQLGGDGGPAPAPGGTLNIEDEYRLHETSKGPDVPLGSTWLSDFPQAWAETGGMGLAVRQAPLIIPLKATSTPVSIKQYPMSQEARLGIKPHIQRLLDQGILVPCQSPWNTPLLPVKKPGTNDYRPVQDLREVNKRVEDIHPTVPNPYNLLSGLPPSHQWYTVLDLKDAFFCLRLHPTSQSLFAFEWRDPEMGISGQLTWTRLPQGFKNSPTLFNEALHRDLADFRIQHPDLILLQYVDDLLLAATSELDCQQGTRALLQTLGDLGYRASAKKAQICQKQVKYLGYLLKEGQRWLTEARKETVMGQPTPKTPRQLREFLGTAGFCRLWIPGFAEMAAPLYPLTKPGTLFEWGPDQQKAYQEIKQALLTAPALGLPDLTKPFELFVDEKQGYAKGVLTQKLGPWRRPVAYLSKKLDPVAAGWPPCLRMVAAIAVLTKDAGKLTMGQPLVILAPHAVEALVKQPPDRWLSNARMTHYQALLLDTDRVQFGPIVALNPATLLPLPEEGLQHDCLDILAEAHGTRPDLTDQPLPDADHTWYTDGSSFLQEGQRKAGAAVTTETEVVWAKALPAGTSAQRAELIALTQALKMAEGKKLNVYTDSRYAFATAHIHGEIYRRRGWLTSEGKEIKNKDEILALLKALFLPKRLSIIHCPGHQKGNRAEARGNRMADQAAREVATRETPETSTLLAGKRTADGSEFEKRTADGSEFESPKKKAKVE

SEQ ID NO: 2449 - protein, 2098 aa, synthetic construct
MPAAKRVKLDGGDKKYSIGLDIGTNSVGWAVITDEYKVPSKKFKVLGNTDRHSIKKNLIGALLFDSGETAEATRLKRTARRRYTRRKNRICYLQEIFSNEMAKVDDSFFHRLEESFLVEEDKKHERHPIFGNIVDEVAYHEKYPTIYHLRKKLVDSTDKADLRLIYLALAHMIKFRGHFLIEGDLNPDNSDVDKLFIQLVQTYNQLFEENPINASGVDAKAILSARLSKSRRLENLIAQLPGEKKNGLFGNLIALSLGLTPNFKSNFDLAEDAKLQLSKDTYDDDLDNLLAQIGDQYADLFLAAKNLSDAILLSDILRVNTEITKAPLSASMIKRYDEHHQDLTLLKALVRQQLPEKYKEIFFDQSKNGYAGYIDGGASQEEFYKFIKPILEKMDGTEELLVKLNREDLLRKQRTFDNGSIPHQIHLGELHAILRRQEDFYPFLKDNREKIEKILTFRIPYYVGPLARGNSRFAWMTRKSEETITPWNFEEVVDKGASAQSFIERMTNFDKNLPNEKVLPKHSLLYEYFTVYNELTKVKYVTEGMRKPAFLSGEQKKAIVDLLFKTNRKVTVKQLKEDYFKKIECFDSVEISGVEDRFNASLGTYHDLLKIIKDKDFLDNEENEDILEDIVLTLTLFEDREMIEERLKTYAHLFDDKVMKQLKRRRYTGWGRLSRKLINGIRDKQSGKTILDFLKSDGFANRNFMQLIHDDSLTFKEDIQKAQVSGQGDSLHEHIANLAGSPAIKKGILQTVKVVDELVKVMGRHKPENIVIEMARENQTTQKGQKNSRERMKRIEEGIKELGSQILKEHPVENTQLQNEKLYLYYLQNGRDMYVDQELDINRLSDYDVDHIVPQSFLKDDSIDNKVLTRSDKARGKSDNVPSEEVVKKMKNYWRQLLNAKLITQRKFDNLTKAERGGLSELDKAGFIKRQLVETRQITKHVAQILDSRMNTKYDENDKLIREVKVITLKSKLVSDFRKDFQFYKVREINNYHHAHDAYLNAVVGTALIKKYPKLESEFVYGDYKVYDVRKMIAKSEQEIGKATAKYFFYSNIMNFFKTEITLANGEIRKRPLIETNGETGEIVWDKGRDFATVRKVLSMPQVNIVKKTEVQTGGFSKESILPKRNSDKLIARKKDWDPKKYGGFDSPTVAYSVLVVAKVEKGKSKKLKSVKELLGITIMERSSFEKNPIDFLEAKGYKEVKKDLIIKLPKYSLFELENGRKRMLASAGELQKGNELALPSKYVNFLYLASHYEKLKGSPEDNEQKQLFVEQHKHYLDEIIEQISEFSKRVILADANLDKVLSAYNKHRDKPIREQAENIIHLFTLTNLGAPAAFKYFDTTIDRKRYTSTKEVLDATLIHQSITGLYETRIDLSQLGGDGGPAPAPAPAPAPAPGGTLNIEDEYRLHETSKGPDVPLGSTWLSDFPQAWAETGGMGLAVRQAPLIIPLKATSTPVSIKQYPMSQEARLGIKPHIQRLLDQGILVPCQSPWNTPLLPVKKPGTNDYRPVQDLREVNKRVEDIHPTVPNPYNLLSGLPPSHQWYTVLDLKDAFFCLRLHPTSQSLFAFEWRDPEMGISGQLTWTRLPQGFKNSPTLFNEALHRDLADFRIQHPDLILLQYVDDLLLAATSELDCQQGTRALLQTLGDLGYRASAKKAQICQKQVKYLGYLLKEGQRWLTEARKETVMGQPTPKTPRQLREFLGTAGFCRLWIPGFAEMAAPLYPLTKPGTLFEWGPDQQKAYQEIKQALLTAPALGLPDLTKPFELFVDEKQGYAKGVLTQKLGPWRRPVAYLSKKLDPVAAGWPPCLRMVAAIAVLTKDAGKLTMGQPLVILAPHAVEALVKQPPDRWLSNARMTHYQALLLDTDRVQFGPIVALNPATLLPLPEEGLQHDCLDILAEAHGTRPDLTDQPLPDADHTWYTDGSSFLQEGQRKAGAAVTTETEVVWAKALPAGTSAQRAELIALTQALKMAEGKKLNVYTDSRYAFATAHIHGEIYRRRGWLTSEGKEIKNKDEILALLKALFLPKRLSIIHCPGHQKGNRAEARGNRMADQAAREVATRETPETSTLLAGKRTADGSEFEKRTADGSEFESPKKKAKVE

SEQ ID NO: 2450 - protein, 2092 aa, synthetic construct
MPAAKRVKLDGGDKKYSIGLDIGTNSVGWAVITDEYKVPSKKFKVLGNTDRHSIKKNLIGALLFDSGETAEATRLKRTARRRYTRRKNRICYLQEIFSNEMAKVDDSFFHRLEESFLVEEDKKHERHPIFGNIVDEVAYHEKYPTIYHLRKKLVDSTDKADLRLIYLALAHMIKFRGHFLIEGDLNPDNSDVDKLFIQLVQTYNQLFEENPINASGVDAKAILSARLSKSRRLENLIAQLPGEKKNGLFGNLIALSLGLTPNFKSNFDLAEDAKLQLSKDTYDDDLDNLLAQIGDQYADLFLAAKNLSDAILLSDILRVNTEITKAPLSASMIKRYDEHHQDLTLLKALVRQQLPEKYKEIFFDQSKNGYAGYIDGGASQEEFYKFIKPILEKMDGTEELLVKLNREDLLRKQRTFDNGSIPHQIHLGELHAILRRQEDFYPFLKDNREKIEKILTFRIPYYVGPLARGNSRFAWMTRKSEETITPWNFEEVVDKGASAQSFIERMTNFDKNLPNEKVLPKHSLLYEYFTVYNELTKVKYVTEGMRKPAFLSGEQKKAIVDLLFKTNRKVTVKQLKEDYFKKIECFDSVEISGVEDRFNASLGTYHDLLKIIKDKDFLDNEENEDILEDIVLTLTLFEDREMIEERLKTYAHLFDDKVMKQLKRRRYTGWGRLSRKLINGIRDKQSGKTILDFLKSDGFANRNFMQLIHDDSLTFKEDIQKAQVSGQGDSLHEHIANLAGSPAIKKGILQTVKVVDELVKVMGRHKPENIVIEMARENQTTQKGQKNSRERMKRIEEGIKELGSQILKEHPVENTQLQNEKLYLYYLQNGRDMYVDQELDINRLSDYDVDHIVPQSFLKDDSIDNKVLTRSDKARGKSDNVPSEEVVKKMKNYWRQLLNAKLITQRKFDNLTKAERGGLSELDKAGFIKRQLVETRQITKHVAQILDSRMNTKYDENDKLIREVKVITLKSKLVSDFRKDFQFYKVREINNYHHAHDAYLNAVVGTALIKKYPKLESEFVYGDYKVYDVRKMIAKSEQEIGKATAKYFFYSNIMNFFKTEITLANGEIRKRPLIETNGETGEIVWDKGRDFATVRKVLSMPQVNIVKKTEVQTGGFSKESILPKRNSDKLIARKKDWDPKKYGGFDSPTVAYSVLVVAKVEKGKSKKLKSVKELLGITIMERSSFEKNPIDFLEAKGYKEVKKDLIIKLPKYSLFELENGRKRMLASAGELQKGNELALPSKYVNFLYLASHYEKLKGSPEDNEQKQLFVEQHKHYLDEIIEQISEFSKRVILADANLDKVLSAYNKHRDKPIREQAENIIHLFTLTNLGAPAAFKYFDTTIDRKRYTSTKEVLDATLIHQSITGLYETRIDLSQLGGDGGGGGGGGGGGTLNIEDEYRLHETSKGPDVPLGSTWLSDFPQAWAETGGMGLAVRQAPLIIPLKATSTPVSIKQYPMSQEARLGIKPHIQRLLDQGILVPCQSPWNTPLLPVKKPGTNDYRPVQDLREVNKRVEDIHPTVPNPYNLLSGLPPSHQWYTVLDLKDAFFCLRLHPTSQSLFAFEWRDPEMGISGQLTWTRLPQGFKNSPTLFNEALHRDLADFRIQHPDLILLQYVDDLLLAATSELDCQQGTRALLQTLGDLGYRASAKKAQICQKQVKYLGYLLKEGQRWLTEARKETVMGQPTPKTPRQLREFLGTAGFCRLWIPGFAEMAAPLYPLTKPGTLFEWGPDQQKAYQEIKQALLTAPALGLPDLTKPFELFVDEKQGYAKGVLTQKLGPWRRPVAYLSKKLDPVAAGWPPCLRMVAAIAVLTKDAGKLTMGQPLVILAPHAVEALVKQPPDRWLSNARMTHYQALLLDTDRVQFGPIVALNPATLLPLPEEGLQHDCLDILAEAHGTRPDLTDQPLPDADHTWYTDGSSFLQEGQRKAGAAVTTETEVVWAKALPAGTSAQRAELIALTQALKMAEGKKLNVYTDSRYAFATAHIHGEIYRRRGWLTSEGKEIKNKDEILALLKALFLPKRLSIIHCPGHQKGNRAEARGNRMADQAAREVATRETPETSTLLAGKRTADGSEFEKRTADGSEFESPKKKAKVE

SEQ ID NO: 2451 - protein, 2093 aa, synthetic construct
MPAAKRVKLDGGDKKYSIGLDIGTNSVGWAVITDEYKVPSKKFKVLGNTDRHSIKKNLIGALLFDSGETAEATRLKRTARRRYTRRKNRICYLQEIFSNEMAKVDDSFFHRLEESFLVEEDKKHERHPIFGNIVDEVAYHEKYPTIYHLRKKLVDSTDKADLRLIYLALAHMIKFRGHFLIEGDLNPDNSDVDKLFIQLVQTYNQLFEENPINASGVDAKAILSARLSKSRRLENLIAQLPGEKKNGLFGNLIALSLGLTPNFKSNFDLAEDAKLQLSKDTYDDDLDNLLAQIGDQYADLFLAAKNLSDAILLSDILRVNTEITKAPLSASMIKRYDEHHQDLTLLKALVRQQLPEKYKEIFFDQSKNGYAGYIDGGASQEEFYKFIKPILEKMDGTEELLVKLNREDLLRKQRTFDNGSIPHQIHLGELHAILRRQEDFYPFLKDNREKIEKILTFRIPYYVGPLARGNSRFAWMTRKSEETITPWNFEEVVDKGASAQSFIERMTNFDKNLPNEKVLPKHSLLYEYFTVYNELTKVKYVTEGMRKPAFLSGEQKKAIVDLLFKTNRKVTVKQLKEDYFKKIECFDSVEISGVEDRFNASLGTYHDLLKIIKDKDFLDNEENEDILEDIVLTLTLFEDREMIEERLKTYAHLFDDKVMKQLKRRRYTGWGRLSRKLINGIRDKQSGKTILDFLKSDGFANRNFMQLIHDDSLTFKEDIQKAQVSGQGDSLHEHIANLAGSPAIKKGILQTVKVVDELVKVMGRHKPENIVIEMARENQTTQKGQKNSRERMKRIEEGIKELGSQILKEHPVENTQLQNEKLYLYYLQNGRDMYVDQELDINRLSDYDVDHIVPQSFLKDDSIDNKVLTRSDKARGKSDNVPSEEVVKKMKNYWRQLLNAKLITQRKFDNLTKAERGGLSELDKAGFIKRQLVETRQITKHVAQILDSRMNTKYDENDKLIREVKVITLKSKLVSDFRKDFQFYKVREINNYHHAHDAYLNAVVGTALIKKYPKLESEFVYGDYKVYDVRKMIAKSEQEIGKATAKYFFYSNIMNFFKTEITLANGEIRKRPLIETNGETGEIVWDKGRDFATVRKVLSMPQVNIVKKTEVQTGGFSKESILPKRNSDKLIARKKDWDPKKYGGFDSPTVAYSVLVVAKVEKGKSKKLKSVKELLGITIMERSSFEKNPIDFLEAKGYKEVKKDLIIKLPKYSLFELENGRKRMLASAGELQKGNELALPSKYVNFLYLASHYEKLKGSPEDNEQKQLFVEQHKHYLDEIIEQISEFSKRVILADANLDKVLSAYNKHRDKPIREQAENIIHLFTLTNLGAPAAFKYFDTTIDRKRYTSTKEVLDATLIHQSITGLYETRIDLSQLGGDGGEAAAKGSSGGTLNIEDEYRLHETSKGPDVPLGSTWLSDFPQAWAETGGMGLAVRQAPLIIPLKATSTPVSIKQYPMSQEARLGIKPHIQRLLDQGILVPCQSPWNTPLLPVKKPGTNDYRPVQDLREVNKRVEDIHPTVPNPYNLLSGLPPSHQWYTVLDLKDAFFCLRLHPTSQSLFAFEWRDPEMGISGQLTWTRLPQGFKNSPTLFNEALHRDLADFRIQHPDLILLQYVDDLLLAATSELDCQQGTRALLQTLGDLGYRASAKKAQICQKQVKYLGYLLKEGQRWLTEARKETVMGQPTPKTPRQLREFLGTAGFCRLWIPGFAEMAAPLYPLTKPGTLFEWGPDQQKAYQEIKQALLTAPALGLPDLTKPFELFVDEKQGYAKGVLTQKLGPWRRPVAYLSKKLDPVAAGWPPCLRMVAAIAVLTKDAGKLTMGQPLVILAPHAVEALVKQPPDRWLSNARMTHYQALLLDTDRVQFGPIVALNPATLLPLPEEGLQHDCLDILAEAHGTRPDLTDQPLPDADHTWYTDGSSFLQEGQRKAGAAVTTETEVVWAKALPAGTSAQRAELIALTQALKMAEGKKLNVYTDSRYAFATAHIHGEIYRRRGWLTSEGKEIKNKDEILALLKALFLPKRLSIIHCPGHQKGNRAEARGNRMADQAAREVATRETPETSTLLAGKRTADGSEFEKRTADGSEFESPKKKAKVE

SEQ ID NO: 2452 - protein, 2096 aa, synthetic construct
MPAAKRVKLDGGDKKYSIGLDIGTNSVGWAVITDEYKVPSKKFKVLGNTDRHSIKKNLIGALLFDSGETAEATRLKRTARRRYTRRKNRICYLQEIFSNEMAKVDDSFFHRLEESFLVEEDKKHERHPIFGNIVDEVAYHEKYPTIYHLRKKLVDSTDKADLRLIYLALAHMIKFRGHFLIEGDLNPDNSDVDKLFIQLVQTYNQLFEENPINASGVDAKAILSARLSKSRRLENLIAQLPGEKKNGLFGNLIALSLGLTPNFKSNFDLAEDAKLQLSKDTYDDDLDNLLAQIGDQYADLFLAAKNLSDAILLSDILRVNTEITKAPLSASMIKRYDEHHQDLTLLKALVRQQLPEKYKEIFFDQSKNGYAGYIDGGASQEEFYKFIKPILEKMDGTEELLVKLNREDLLRKQRTFDNGSIPHQIHLGELHAILRRQEDFYPFLKDNREKIEKILTFRIPYYVGPLARGNSRFAWMTRKSEETITPWNFEEVVDKGASAQSFIERMTNFDKNLPNEKVLPKHSLLYEYFTVYNELTKVKYVTEGMRKPAFLSGEQKKAIVDLLFKTNRKVTVKQLKEDYFKKIECFDSVEISGVEDRFNASLGTYHDLLKIIKDKDFLDNEENEDILEDIVLTLTLFEDREMIEERLKTYAHLFDDKVMKQLKRRRYTGWGRLSRKLINGIRDKQSGKTILDFLKSDGFANRNFMQLIHDDSLTFKEDIQKAQVSGQGDSLHEHIANLAGSPAIKKGILQTVKVVDELVKVMGRHKPENIVIEMARENQTTQKGQKNSRERMKRIEEGIKELGSQILKEHPVENTQLQNEKLYLYYLQNGRDMYVDQELDINRLSDYDVDHIVPQSFLKDDSIDNKVLTRSDKARGKSDNVPSEEVVKKMKNYWRQLLNAKLITQRKFDNLTKAERGGLSELDKAGFIKRQLVETRQITKHVAQILDSRMNTKYDENDKLIREVKVITLKSKLVSDFRKDFQFYKVREINNYHHAHDAYLNAVVGTALIKKYPKLESEFVYGDYKVYDVRKMIAKSEQEIGKATAKYFFYSNIMNFFKTEITLANGEIRKRPLIETNGETGEIVWDKGRDFATVRKVLSMPQVNIVKKTEVQTGGFSKESILPKRNSDKLIARKKDWDPKKYGGFDSPTVAYSVLVVAKVEKGKSKKLKSVKELLGITIMERSSFEKNPIDFLEAKGYKEVKKDLIIKLPKYSLFELENGRKRMLASAGELQKGNELALPSKYVNFLYLASHYEKLKGSPEDNEQKQLFVEQHKHYLDEIIEQISEFSKRVILADANLDKVLSAYNKHRDKPIREQAENIIHLFTLTNLGAPAAFKYFDTTIDRKRYTSTKEVLDATLIHQSITGLYETRIDLSQLGGDGGEAAAKGSSGGGGGTLNIEDEYRLHETSKGPDVPLGSTWLSDFPQAWAETGGMGLAVRQAPLIIPLKATSTPVSIKQYPMSQEARLGIKPHIQRLLDQGILVPCQSPWNTPLLPVKKPGTNDYRPVQDLREVNKRVEDIHPTVPNPYNLLSGLPPSHQWYTVLDLKDAFFCLRLHPTSQSLFAFEWRDPEMGISGQLTWTRLPQGFKNSPTLFNEALHRDLADFRIQHPDLILLQYVDDLLLAATSELDCQQGTRALLQTLGDLGYRASAKKAQICQKQVKYLGYLLKEGQRWLTEARKETVMGQPTPKTPRQLREFLGTAGFCRLWIPGFAEMAAPLYPLTKPGTLFEWGPDQQKAYQEIKQALLTAPALGLPDLTKPFELFVDEKQGYAKGVLTQKLGPWRRPVAYLSKKLDPVAAGWPPCLRMVAAIAVLTKDAGKLTMGQPLVILAPHAVEALVKQPPDRWLSNARMTHYQALLLDTDRVQFGPIVALNPATLLPLPEEGLQHDCLDILAEAHGTRPDLTDQPLPDADHTWYTDGSSFLQEGQRKAGAAVTTETEVVWAKALPAGTSAQRAELIALTQALKMAEGKKLNVYTDSRYAFATAHIHGEIYRRRGWLTSEGKEIKNKDEILALLKALFLPKRLSIIHCPGHQKGNRAEARGNRMADQAAREVATRETPETSTLLAGKRTADGSEFEKRTADGSEFESPKKKAKVE

SEQ ID NO: 2453 - protein, 2096 aa, synthetic construct
MPAAKRVKLDGGDKKYSIGLDIGTNSVGWAVITDEYKVPSKKFKVLGNTDRHSIKKNLIGALLFDSGETAEATRLKRTARRRYTRRKNRICYLQEIFSNEMAKVDDSFFHRLEESFLVEEDKKHERHPIFGNIVDEVAYHEKYPTIYHLRKKLVDSTDKADLRLIYLALAHMIKFRGHFLIEGDLNPDNSDVDKLFIQLVQTYNQLFEENPINASGVDAKAILSARLSKSRRLENLIAQLPGEKKNGLFGNLIALSLGLTPNFKSNFDLAEDAKLQLSKDTYDDDLDNLLAQIGDQYADLFLAAKNLSDAILLSDILRVNTEITKAPLSASMIKRYDEHHQDLTLLKALVRQQLPEKYKEIFFDQSKNGYAGYIDGGASQEEFYKFIKPILEKMDGTEELLVKLNREDLLRKQRTFDNGSIPHQIHLGELHAILRRQEDFYPFLKDNREKIEKILTFRIPYYVGPLARGNSRFAWMTRKSEETITPWNFEEVVDKGASAQSFIERMTNFDKNLPNEKVLPKHSLLYEYFTVYNELTKVKYVTEGMRKPAFLSGEQKKAIVDLLFKTNRKVTVKQLKEDYFKKIECFDSVEISGVEDRFNASLGTYHDLLKIIKDKDFLDNEENEDILEDIVLTLTLFEDREMIEERLKTYAHLFDDKVMKQLKRRRYTGWGRLSRKLINGIRDKQSGKTILDFLKSDGFANRNFMQLIHDDSLTFKEDIQKAQVSGQGDSLHEHIANLAGSPAIKKGILQTVKVVDELVKVMGRHKPENIVIEMARENQTTQKGQKNSRERMKRIEEGIKELGSQILKEHPVENTQLQNEKLYLYYLQNGRDMYVDQELDINRLSDYDVDHIVPQSFLKDDSIDNKVLTRSDKARGKSDNVPSEEVVKKMKNYWRQLLNAKLITQRKFDNLTKAERGGLSELDKAGFIKRQLVETRQITKHVAQILDSRMNTKYDENDKLIREVKVITLKSKLVSDFRKDFQFYKVREINNYHHAHDAYLNAVVGTALIKKYPKLESEFVYGDYKVYDVRKMIAKSEQEIGKATAKYFFYSNIMNFFKTEITLANGEIRKRPLIETNGETGEIVWDKGRDFATVRKVLSMPQVNIVKKTEVQTGGFSKESILPKRNSDKLIARKKDWDPKKYGGFDSPTVAYSVLVVAKVEKGKSKKLKSVKELLGITIMERSSFEKNPIDFLEAKGYKEVKKDLIIKLPKYSLFELENGRKRMLASAGELQKGNELALPSKYVNFLYLASHYEKLKGSPEDNEQKQLFVEQHKHYLDEIIEQISEFSKRVILADANLDKVLSAYNKHRDKPIREQAENIIHLFTLTNLGAPAAFKYFDTTIDRKRYTSTKEVLDATLIHQSITGLYETRIDLSQLGGDGGPAPGSSEAAAKGGTLNIEDEYRLHETSKGPDVPLGSTWLSDFPQAWAETGGMGLAVRQAPLIIPLKATSTPVSIKQYPMSQEARLGIKPHIQRLLDQGILVPCQSPWNTPLLPVKKPGTNDYRPVQDLREVNKRVEDIHPTVPNPYNLLSGLPPSHQWYTVLDLKDAFFCLRLHPTSQSLFAFEWRDPEMGISGQLTWTRLPQGFKNSPTLFNEALHRDLADFRIQHPDLILLQYVDDLLLAATSELDCQQGTRALLQTLGDLGYRASAKKAQICQKQVKYLGYLLKEGQRWLTEARKETVMGQPTPKTPRQLREFLGTAGFCRLWIPGFAEMAAPLYPLTKPGTLFEWGPDQQKAYQEIKQALLTAPALGLPDLTKPFELFVDEKQGYAKGVLTQKLGPWRRPVAYLSKKLDPVAAGWPPCLRMVAAIAVLTKDAGKLTMGQPLVILAPHAVEALVKQPPDRWLSNARMTHYQALLLDTDRVQFGPIVALNPATLLPLPEEGLQHDCLDILAEAHGTRPDLTDQPLPDADHTWYTDGSSFLQEGQRKAGAAVTTETEVVWAKALPAGTSAQRAELIALTQALKMAEGKKLNVYTDSRYAFATAHIHGEIYRRRGWLTSEGKEIKNKDEILALLKALFLPKRLSIIHCPGHQKGNRAEARGNRMADQAAREVATRETPETSTLLAGKRTADGSEFEKRTADGSEFESPKKKAKVE

SEQ ID NO: 2454 - protein, 2110 aa, synthetic construct
MPAAKRVKLDGGDKKYSIGLDIGTNSVGWAVITDEYKVPSKKFKVLGNTDRHSIKKNLIGALLFDSGETAEATRLKRTARRRYTRRKNRICYLQEIFSNEMAKVDDSFFHRLEESFLVEEDKKHERHPIFGNIVDEVAYHEKYPTIYHLRKKLVDSTDKADLRLIYLALAHMIKFRGHFLIEGDLNPDNSDVDKLFIQLVQTYNQLFEENPINASGVDAKAILSARLSKSRRLENLIAQLPGEKKNGLFGNLIALSLGLTPNFKSNFDLAEDAKLQLSKDTYDDDLDNLLAQIGDQYADLFLAAKNLSDAILLSDILRVNTEITKAPLSASMIKRYDEHHQDLTLLKALVRQQLPEKYKEIFFDQSKNGYAGYIDGGASQEEFYKFIKPILEKMDGTEELLVKLNREDLLRKQRTFDNGSIPHQIHLGELHAILRRQEDFYPFLKDNREKIEKILTFRIPYYVGPLARGNSRFAWMTRKSEETITPWNFEEVVDKGASAQSFIERMTNFDKNLPNEKVLPKHSLLYEYFTVYNELTKVKYVTEGMRKPAFLSGEQKKAIVDLLFKTNRKVTVKQLKEDYFKKIECFDSVEISGVEDRFNASLGTYHDLLKIIKDKDFLDNEENEDILEDIVLTLTLFEDREMIEERLKTYAHLFDDKVMKQLKRRRYTGWGRLSRKLINGIRDKQSGKTILDFLKSDGFANRNFMQLIHDDSLTFKEDIQKAQVSGQGDSLHEHIANLAGSPAIKKGILQTVKVVDELVKVMGRHKPENIVIEMARENQTTQKGQKNSRERMKRIEEGIKELGSQILKEHPVENTQLQNEKLYLYYLQNGRDMYVDQELDINRLSDYDVDHIVPQSFLKDDSIDNKVLTRSDKARGKSDNVPSEEVVKKMKNYWRQLLNAKLITQRKFDNLTKAERGGLSELDKAGFIKRQLVETRQITKHVAQILDSRMNTKYDENDKLIREVKVITLKSKLVSDFRKDFQFYKVREINNYHHAHDAYLNAVVGTALIKKYPKLESEFVYGDYKVYDVRKMIAKSEQEIGKATAKYFFYSNIMNFFKTEITLANGEIRKRPLIETNGETGEIVWDKGRDFATVRKVLSMPQVNIVKKTEVQTGGFSKESILPKRNSDKLIARKKDWDPKKYGGFDSPTVAYSVLVVAKVEKGKSKKLKSVKELLGITIMERSSFEKNPIDFLEAKGYKEVKKDLIIKLPKYSLFELENGRKRMLASAGELQKGNELALPSKYVNFLYLASHYEKLKGSPEDNEQKQLFVEQHKHYLDEIIEQISEFSKRVILADANLDKVLSAYNKHRDKPIREQAENIIHLFTLTNLGAPAAFKYFDTTIDRKRYTSTKEVLDATLIHQSITGLYETRIDLSQLGGDGGEAAAKEAAAKEAAAKEAAAKEAAAKGGTLNIEDEYRLHETSKGPDVPLGSTWLSDFPQAWAETGGMGLAVRQAPLIIPLKATSTPVSIKQYPMSQEARLGIKPHIQRLLDQGILVPCQSPWNTPLLPVKKPGTNDYRPVQDLREVNKRVEDIHPTVPNPYNLLSGLPPSHQWYTVLDLKDAFFCLRLHPTSQSLFAFEWRDPEMGISGQLTWTRLPQGFKNSPTLFNEALHRDLADFRIQHPDLILLQYVDDLLLAATSELDCQQGTRALLQTLGDLGYRASAKKAQICQKQVKYLGYLLKEGQRWLTEARKETVMGQPTPKTPRQLREFLGTAGFCRLWIPGFAEMAAPLYPLTKPGTLFEWGPDQQKAYQEIKQALLTAPALGLPDLTKPFELFVDEKQGYAKGVLTQKLGPWRRPVAYLSKKLDPVAAGWPPCLRMVAAIAVLTKDAGKLTMGQPLVILAPHAVEALVKQPPDRWLSNARMTHYQALLLDTDRVQFGPIVALNPATLLPLPEEGLQHDCLDILAEAHGTRPDLTDQPLPDADHTWYTDGSSFLQEGQRKAGAAVTTETEVVWAKALPAGTSAQRAELIALTQALKMAEGKKLNVYTDSRYAFATAHIHGEIYRRRGWLTSEGKEIKNKDEILALLKALFLPKRLSIIHCPGHQKGNRAEARGNRMADQAAREVATRETPETSTLLAGKRTADGSEFEKRTADGSEFESPKKKAKVE

SEQ ID NO: 2455 - protein, 2115 aa, synthetic construct
MPAAKRVKLDGGDKKYSIGLDIGTNSVGWAVITDEYKVPSKKFKVLGNTDRHSIKKNLIGALLFDSGETAEATRLKRTARRRYTRRKNRICYLQEIFSNEMAKVDDSFFHRLEESFLVEEDKKHERHPIFGNIVDEVAYHEKYPTIYHLRKKLVDSTDKADLRLIYLALAHMIKFRGHFLIEGDLNPDNSDVDKLFIQLVQTYNQLFEENPINASGVDAKAILSARLSKSRRLENLIAQLPGEKKNGLFGNLIALSLGLTPNFKSNFDLAEDAKLQLSKDTYDDDLDNLLAQIGDQYADLFLAAKNLSDAILLSDILRVNTEITKAPLSASMIKRYDEHHQDLTLLKALVRQQLPEKYKEIFFDQSKNGYAGYIDGGASQEEFYKFIKPILEKMDGTEELLVKLNREDLLRKQRTFDNGSIPHQIHLGELHAILRRQEDFYPFLKDNREKIEKILTFRIPYYVGPLARGNSRFAWMTRKSEETITPWNFEEVVDKGASAQSFIERMTNFDKNLPNEKVLPKHSLLYEYFTVYNELTKVKYVTEGMRKPAFLSGEQKKAIVDLLFKTNRKVTVKQLKEDYFKKIECFDSVEISGVEDRFNASLGTYHDLLKIIKDKDFLDNEENEDILEDIVLTLTLFEDREMIEERLKTYAHLFDDKVMKQLKRRRYTGWGRLSRKLINGIRDKQSGKTILDFLKSDGFANRNFMQLIHDDSLTFKEDIQKAQVSGQGDSLHEHIANLAGSPAIKKGILQTVKVVDELVKVMGRHKPENIVIEMARENQTTQKGQKNSRERMKRIEEGIKELGSQILKEHPVENTQLQNEKLYLYYLQNGRDMYVDQELDINRLSDYDVDHIVPQSFLKDDSIDNKVLTRSDKARGKSDNVPSEEVVKKMKNYWRQLLNAKLITQRKFDNLTKAERGGLSELDKAGFIKRQLVETRQITKHVAQILDSRMNTKYDENDKLIREVKVITLKSKLVSDFRKDFQFYKVREINNYHHAHDAYLNAVVGTALIKKYPKLESEFVYGDYKVYDVRKMIAKSEQEIGKATAKYFFYSNIMNFFKTEITLANGEIRKRPLIETNGETGEIVWDKGRDFATVRKVLSMPQVNIVKKTEVQTGGFSKESILPKRNSDKLIARKKDWDPKKYGGFDSPTVAYSVLVVAKVEKGKSKKLKSVKELLGITIMERSSFEKNPIDFLEAKGYKEVKKDLIIKLPKYSLFELENGRKRMLASAGELQKGNELALPSKYVNFLYLASHYEKLKGSPEDNEQKQLFVEQHKHYLDEIIEQISEFSKRVILADANLDKVLSAYNKHRDKPIREQAENIIHLFTLTNLGAPAAFKYFDTTIDRKRYTSTKEVLDATLIHQSITGLYETRIDLSQLGGDGGEAAAKEAAAKEAAAKEAAAKEAAAKEAAAKGGTLNIEDEYRLHETSKGPDVPLGSTWLSDFPQAWAETGGMGLAVRQAPLIIPLKATSTPVSIKQYPMSQEARLGIKPHIQRLLDQGILVPCQSPWNTPLLPVKKPGTNDYRPVQDLREVNKRVEDIHPTVPNPYNLLSGLPPSHQWYTVLDLKDAFFCLRLHPTSQSLFAFEWRDPEMGISGQLTWTRLPQGFKNSPTLFNEALHRDLADFRIQHPDLILLQYVDDLLLAATSELDCQQGTRALLQTLGDLGYRASAKKAQICQKQVKYLGYLLKEGQRWLTEARKETVMGQPTPKTPRQLREFLGTAGFCRLWIPGFAEMAAPLYPLTKPGTLFEWGPDQQKAYQEIKQALLTAPALGLPDLTKPFELFVDEKQGYAKGVLTQKLGPWRRPVAYLSKKLDPVAAGWPPCLRMVAAIAVLTKDAGKLTMGQPLVILAPHAVEALVKQPPDRWLSNARMTHYQALLLDTDRVQFGPIVALNPATLLPLPEEGLQHDCLDILAEAHGTRPDLTDQPLPDADHTWYTDGSSFLQEGQRKAGAAVTTETEVVWAKALPAGTSAQRAELIALTQALKMAEGKKLNVYTDSRYAFATAHIHGEIYRRRGWLTSEGKEIKNKDEILALLKALFLPKRLSIIHCPGHQKGNRAEARGNRMADQAAREVATRETPETSTLLAGKRTADGSEFEKRTADGSEFESPKKKAKVE

SEQ ID NO: 2456 - protein, 2093 aa, synthetic construct
MPAAKRVKLDGGDKKYSIGLDIGTNSVGWAVITDEYKVPSKKFKVLGNTDRHSIKKNLIGALLFDSGETAEATRLKRTARRRYTRRKNRICYLQEIFSNEMAKVDDSFFHRLEESFLVEEDKKHERHPIFGNIVDEVAYHEKYPTIYHLRKKLVDSTDKADLRLIYLALAHMIKFRGHFLIEGDLNPDNSDVDKLFIQLVQTYNQLFEENPINASGVDAKAILSARLSKSRRLENLIAQLPGEKKNGLFGNLIALSLGLTPNFKSNFDLAEDAKLQLSKDTYDDDLDNLLAQIGDQYADLFLAAKNLSDAILLSDILRVNTEITKAPLSASMIKRYDEHHQDLTLLKALVRQQLPEKYKEIFFDQSKNGYAGYIDGGASQEEFYKFIKPILEKMDGTEELLVKLNREDLLRKQRTFDNGSIPHQIHLGELHAILRRQEDFYPFLKDNREKIEKILTFRIPYYVGPLARGNSRFAWMTRKSEETITPWNFEEVVDKGASAQSFIERMTNFDKNLPNEKVLPKHSLLYEYFTVYNELTKVKYVTEGMRKPAFLSGEQKKAIVDLLFKTNRKVTVKQLKEDYFKKIECFDSVEISGVEDRFNASLGTYHDLLKIIKDKDFLDNEENEDILEDIVLTLTLFEDREMIEERLKTYAHLFDDKVMKQLKRRRYTGWGRLSRKLINGIRDKQSGKTILDFLKSDGFANRNFMQLIHDDSLTFKEDIQKAQVSGQGDSLHEHIANLAGSPAIKKGILQTVKVVDELVKVMGRHKPENIVIEMARENQTTQKGQKNSRERMKRIEEGIKELGSQILKEHPVENTQLQNEKLYLYYLQNGRDMYVDQELDINRLSDYDVDHIVPQSFLKDDSIDNKVLTRSDKARGKSDNVPSEEVVKKMKNYWRQLLNAKLITQRKFDNLTKAERGGLSELDKAGFIKRQLVETRQITKHVAQILDSRMNTKYDENDKLIREVKVITLKSKLVSDFRKDFQFYKVREINNYHHAHDAYLNAVVGTALIKKYPKLESEFVYGDYKVYDVRKMIAKSEQEIGKATAKYFFYSNIMNFFKTEITLANGEIRKRPLIETNGETGEIVWDKGRDFATVRKVLSMPQVNIVKKTEVQTGGFSKESILPKRNSDKLIARKKDWDPKKYGGFDSPTVAYSVLVVAKVEKGKSKKLKSVKELLGITIMERSSFEKNPIDFLEAKGYKEVKKDLIIKLPKYSLFELENGRKRMLASAGELQKGNELALPSKYVNFLYLASHYEKLKGSPEDNEQKQLFVEQHKHYLDEIIEQISEFSKRVILADANLDKVLSAYNKHRDKPIREQAENIIHLFTLTNLGAPAAFKYFDTTIDRKRYTSTKEVLDATLIHQSITGLYETRIDLSQLGGDGGEAAAKGGSGGTLNIEDEYRLHETSKGPDVPLGSTWLSDFPQAWAETGGMGLAVRQAPLIIPLKATSTPVSIKQYPMSQEARLGIKPHIQRLLDQGILVPCQSPWNTPLLPVKKPGTNDYRPVQDLREVNKRVEDIHPTVPNPYNLLSGLPPSHQWYTVLDLKDAFFCLRLHPTSQSLFAFEWRDPEMGISGQLTWTRLPQGFKNSPTLFNEALHRDLADFRIQHPDLILLQYVDDLLLAATSELDCQQGTRALLQTLGDLGYRASAKKAQICQKQVKYLGYLLKEGQRWLTEARKETVMGQPTPKTPRQLREFLGTAGFCRLWIPGFAEMAAPLYPLTKPGTLFEWGPDQQKAYQEIKQALLTAPALGLPDLTKPFELFVDEKQGYAKGVLTQKLGPWRRPVAYLSKKLDPVAAGWPPCLRMVAAIAVLTKDAGKLTMGQPLVILAPHAVEALVKQPPDRWLSNARMTHYQALLLDTDRVQFGPIVALNPATLLPLPEEGLQHDCLDILAEAHGTRPDLTDQPLPDADHTWYTDGSSFLQEGQRKAGAAVTTETEVVWAKALPAGTSAQRAELIALTQALKMAEGKKLNVYTDSRYAFATAHIHGEIYRRRGWLTSEGKEIKNKDEILALLKALFLPKRLSIIHCPGHQKGNRAEARGNRMADQAAREVATRETPETSTLLAGKRTADGSEFEKRTADGSEFESPKKKAKVE

SEQ ID NO: 2457 - protein, 2096 aa, synthetic construct
MPAAKRVKLDGGDKKYSIGLDIGTNSVGWAVITDEYKVPSKKFKVLGNTDRHSIKKNLIGALLFDSGETAEATRLKRTARRRYTRRKNRICYLQEIFSNEMAKVDDSFFHRLEESFLVEEDKKHERHPIFGNIVDEVAYHEKYPTIYHLRKKLVDSTDKADLRLIYLALAHMIKFRGHFLIEGDLNPDNSDVDKLFIQLVQTYNQLFEENPINASGVDAKAILSARLSKSRRLENLIAQLPGEKKNGLFGNLIALSLGLTPNFKSNFDLAEDAKLQLSKDTYDDDLDNLLAQIGDQYADLFLAAKNLSDAILLSDILRVNTEITKAPLSASMIKRYDEHHQDLTLLKALVRQQLPEKYKEIFFDQSKNGYAGYIDGGASQEEFYKFIKPILEKMDGTEELLVKLNREDLLRKQRTFDNGSIPHQIHLGELHAILRRQEDFYPFLKDNREKIEKILTFRIPYYVGPLARGNSRFAWMTRKSEETITPWNFEEVVDKGASAQSFIERMTNFDKNLPNEKVLPKHSLLYEYFTVYNELTKVKYVTEGMRKPAFLSGEQKKAIVDLLFKTNRKVTVKQLKEDYFKKIECFDSVEISGVEDRFNASLGTYHDLLKIIKDKDFLDNEENEDILEDIVLTLTLFEDREMIEERLKTYAHLFDDKVMKQLKRRRYTGWGRLSRKLINGIRDKQSGKTILDFLKSDGFANRNFMQLIHDDSLTFKEDIQKAQVSGQGDSLHEHIANLAGSPAIKKGILQTVKVVDELVKVMGRHKPENIVIEMARENQTTQKGQKNSRERMKRIEEGIKELGSQILKEHPVENTQLQNEKLYLYYLQNGRDMYVDQELDINRLSDYDVDHIVPQSFLKDDSIDNKVLTRSDKARGKSDNVPSEEVVKKMKNYWRQLLNAKLITQRKFDNLTKAERGGLSELDKAGFIKRQLVETRQITKHVAQILDSRMNTKYDENDKLIREVKVITLKSKLVSDFRKDFQFYKVREINNYHHAHDAYLNAVVGTALIKKYPKLESEFVYGDYKVYDVRKMIAKSEQEIGKATAKYFFYSNIMNFFKTEITLANGEIRKRPLIETNGETGEIVWDKGRDFATVRKVLSMPQVNIVKKTEVQTGGFSKESILPKRNSDKLIARKKDWDPKKYGGFDSPTVAYSVLVVAKVEKGKSKKLKSVKELLGITIMERSSFEKNPIDFLEAKGYKEVKKDLIIKLPKYSLFELENGRKRMLASAGELQKGNELALPSKYVNFLYLASHYEKLKGSPEDNEQKQLFVEQHKHYLDEIIEQISEFSKRVILADANLDKVLSAYNKHRDKPIREQAENIIHLFTLTNLGAPAAFKYFDTTIDRKRYTSTKEVLDATLIHQSITGLYETRIDLSQLGGDGGEAAAKGGGPAPGGTLNIEDEYRLHETSKGPDVPLGSTWLSDFPQAWAETGGMGLAVRQAPLIIPLKATSTPVSIKQYPMSQEARLGIKPHIQRLLDQGILVPCQSPWNTPLLPVKKPGTNDYRPVQDLREVNKRVEDIHPTVPNPYNLLSGLPPSHQWYTVLDLKDAFFCLRLHPTSQSLFAFEWRDPEMGISGQLTWTRLPQGFKNSPTLFNEALHRDLADFRIQHPDLILLQYVDDLLLAATSELDCQQGTRALLQTLGDLGYRASAKKAQICQKQVKYLGYLLKEGQRWLTEARKETVMGQPTPKTPRQLREFLGTAGFCRLWIPGFAEMAAPLYPLTKPGTLFEWGPDQQKAYQEIKQALLTAPALGLPDLTKPFELFVDEKQGYAKGVLTQKLGPWRRPVAYLSKKLDPVAAGWPPCLRMVAAIAVLTKDAGKLTMGQPLVILAPHAVEALVKQPPDRWLSNARMTHYQALLLDTDRVQFGPIVALNPATLLPLPEEGLQHDCLDILAEAHGTRPDLTDQPLPDADHTWYTDGSSFLQEGQRKAGAAVTTETEVVWAKALPAGTSAQRAELIALTQALKMAEGKKLNVYTDSRYAFATAHIHGEIYRRRGWLTSEGKEIKNKDEILALLKALFLPKRLSIIHCPGHQKGNRAEARGNRMADQAAREVATRETPETSTLLAGKRTADGSEFEKRTADGSEFESPKKKAKVE

SEQ ID NO: 2458 - protein, 2096 aa, synthetic construct
MPAAKRVKLDGGDKKYSIGLDIGTNSVGWAVITDEYKVPSKKFKVLGNTDRHSIKKNLIGALLFDSGETAEATRLKRTARRRYTRRKNRICYLQEIFSNEMAKVDDSFFHRLEESFLVEEDKKHERHPIFGNIVDEVAYHEKYPTIYHLRKKLVDSTDKADLRLIYLALAHMIKFRGHFLIEGDLNPDNSDVDKLFIQLVQTYNQLFEENPINASGVDAKAILSARLSKSRRLENLIAQLPGEKKNGLFGNLIALSLGLTPNFKSNFDLAEDAKLQLSKDTYDDDLDNLLAQIGDQYADLFLAAKNLSDAILLSDILRVNTEITKAPLSASMIKRYDEHHQDLTLLKALVRQQLPEKYKEIFFDQSKNGYAGYIDGGASQEEFYKFIKPILEKMDGTEELLVKLNREDLLRKQRTFDNGSIPHQIHLGELHAILRRQEDFYPFLKDNREKIEKILTFRIPYYVGPLARGNSRFAWMTRKSEETITPWNFEEVVDKGASAQSFIERMTNFDKNLPNEKVLPKHSLLYEYFTVYNELTKVKYVTEGMRKPAFLSGEQKKAIVDLLFKTNRKVTVKQLKEDYFKKIECFDSVEISGVEDRFNASLGTYHDLLKIIKDKDFLDNEENEDILEDIVLTLTLFEDREMIEERLKTYAHLFDDKVMKQLKRRRYTGWGRLSRKLINGIRDKQSGKTILDFLKSDGFANRNFMQLIHDDSLTFKEDIQKAQVSGQGDSLHEHIANLAGSPAIKKGILQTVKVVDELVKVMGRHKPENIVIEMARENQTTQKGQKNSRERMKRIEEGIKELGSQILKEHPVENTQLQNEKLYLYYLQNGRDMYVDQELDINRLSDYDVDHIVPQSFLKDDSIDNKVLTRSDKARGKSDNVPSEEVVKKMKNYWRQLLNAKLITQRKFDNLTKAERGGLSELDKAGFIKRQLVETRQITKHVAQILDSRMNTKYDENDKLIREVKVITLKSKLVSDFRKDFQFYKVREINNYHHAHDAYLNAVVGTALIKKYPKLESEFVYGDYKVYDVRKMIAKSEQEIGKATAKYFFYSNIMNFFKTEITLANGEIRKRPLIETNGETGEIVWDKGRDFATVRKVLSMPQVNIVKKTEVQTGGFSKESILPKRNSDKLIARKKDWDPKKYGGFDSPTVAYSVLVVAKVEKGKSKKLKSVKELLGITIMERSSFEKNPIDFLEAKGYKEVKKDLIIKLPKYSLFELENGRKRMLASAGELQKGNELALPSKYVNFLYLASHYEKLKGSPEDNEQKQLFVEQHKHYLDEIIEQISEFSKRVILADANLDKVLSAYNKHRDKPIREQAENIIHLFTLTNLGAPAAFKYFDTTIDRKRYTSTKEVLDATLIHQSITGLYETRIDLSQLGGDGGGSSEAAAKGGGGGTLNIEDEYRLHETSKGPDVPLGSTWLSDFPQAWAETGGMGLAVRQAPLIIPLKATSTPVSIKQYPMSQEARLGIKPHIQRLLDQGILVPCQSPWNTPLLPVKKPGTNDYRPVQDLREVNKRVEDIHPTVPNPYNLLSGLPPSHQWYTVLDLKDAFFCLRLHPTSQSLFAFEWRDPEMGISGQLTWTRLPQGFKNSPTLFNEALHRDLADFRIQHPDLILLQYVDDLLLAATSELDCQQGTRALLQTLGDLGYRASAKKAQICQKQVKYLGYLLKEGQRWLTEARKETVMGQPTPKTPRQLREFLGTAGFCRLWIPGFAEMAAPLYPLTKPGTLFEWGPDQQKAYQEIKQALLTAPALGLPDLTKPFELFVDEKQGYAKGVLTQKLGPWRRPVAYLSKKLDPVAAGWPPCLRMVAAIAVLTKDAGKLTMGQPLVILAPHAVEALVKQPPDRWLSNARMTHYQALLLDTDRVQFGPIVALNPATLLPLPEEGLQHDCLDILAEAHGTRPDLTDQPLPDADHTWYTDGSSFLQEGQRKAGAAVTTETEVVWAKALPAGTSAQRAELIALTQALKMAEGKKLNVYTDSRYAFATAHIHGEIYRRRGWLTSEGKEIKNKDEILALLKALFLPKRLSIIHCPGHQKGNRAEARGNRMADQAAREVATRETPETSTLLAGKRTADGSEFEKRTADGSEFESPKKKAKVE

SEQ ID NO: 2459 - protein, 2096 aa, synthetic construct
MPAAKRVKLDGGDKKYSIGLDIGTNSVGWAVITDEYKVPSKKFKVLGNTDRHSIKKNLIGALLFDSGETAEATRLKRTARRRYTRRKNRICYLQEIFSNEMAKVDDSFFHRLEESFLVEEDKKHERHPIFGNIVDEVAYHEKYPTIYHLRKKLVDSTDKADLRLIYLALAHMIKFRGHFLIEGDLNPDNSDVDKLFIQLVQTYNQLFEENPINASGVDAKAILSARLSKSRRLENLIAQLPGEKKNGLFGNLIALSLGLTPNFKSNFDLAEDAKLQLSKDTYDDDLDNLLAQIGDQYADLFLAAKNLSDAILLSDILRVNTEITKAPLSASMIKRYDEHHQDLTLLKALVRQQLPEKYKEIFFDQSKNGYAGYIDGGASQEEFYKFIKPILEKMDGTEELLVKLNREDLLRKQRTFDNGSIPHQIHLGELHAILRRQEDFYPFLKDNREKIEKILTFRIPYYVGPLARGNSRFAWMTRKSEETITPWNFEEVVDKGASAQSFIERMTNFDKNLPNEKVLPKHSLLYEYFTVYNELTKVKYVTEGMRKPAFLSGEQKKAIVDLLFKTNRKVTVKQLKEDYFKKIECFDSVEISGVEDRFNASLGTYHDLLKIIKDKDFLDNEENEDILEDIVLTLTLFEDREMIEERLKTYAHLFDDKVMKQLKRRRYTGWGRLSRKLINGIRDKQSGKTILDFLKSDGFANRNFMQLIHDDSLTFKEDIQKAQVSGQGDSLHEHIANLAGSPAIKKGILQTVKVVDELVKVMGRHKPENIVIEMARENQTTQKGQKNSRERMKRIEEGIKELGSQILKEHPVENTQLQNEKLYLYYLQNGRDMYVDQELDINRLSDYDVDHIVPQSFLKDDSIDNKVLTRSDKARGKSDNVPSEEVVKKMKNYWRQLLNAKLITQRKFDNLTKAERGGLSELDKAGFIKRQLVETRQITKHVAQILDSRMNTKYDENDKLIREVKVITLKSKLVSDFRKDFQFYKVREINNYHHAHDAYLNAVVGTALIKKYPKLESEFVYGDYKVYDVRKMIAKSEQEIGKATAKYFFYSNIMNFFKTEITLANGEIRKRPLIETNGETGEIVWDKGRDFATVRKVLSMPQVNIVKKTEVQTGGFSKESILPKRNSDKLIARKKDWDPKKYGGFDSPTVAYSVLVVAKVEKGKSKKLKSVKELLGITIMERSSFEKNPIDFLEAKGYKEVKKDLIIKLPKYSLFELENGRKRMLASAGELQKGNELALPSKYVNFLYLASHYEKLKGSPEDNEQKQLFVEQHKHYLDEIIEQISEFSKRVILADANLDKVLSAYNKHRDKPIREQAENIIHLFTLTNLGAPAAFKYFDTTIDRKRYTSTKEVLDATLIHQSITGLYETRIDLSQLGGDGGGGSGGGEAAAKGGTLNIEDEYRLHETSKGPDVPLGSTWLSDFPQAWAETGGMGLAVRQAPLIIPLKATSTPVSIKQYPMSQEARLGIKPHIQRLLDQGILVPCQSPWNTPLLPVKKPGTNDYRPVQDLREVNKRVEDIHPTVPNPYNLLSGLPPSHQWYTVLDLKDAFFCLRLHPTSQSLFAFEWRDPEMGISGQLTWTRLPQGFKNSPTLFNEALHRDLADFRIQHPDLILLQYVDDLLLAATSELDCQQGTRALLQTLGDLGYRASAKKAQICQKQVKYLGYLLKEGQRWLTEARKETVMGQPTPKTPRQLREFLGTAGFCRLWIPGFAEMAAPLYPLTKPGTLFEWGPDQQKAYQEIKQALLTAPALGLPDLTKPFELFVDEKQGYAKGVLTQKLGPWRRPVAYLSKKLDPVAAGWPPCLRMVAAIAVLTKDAGKLTMGQPLVILAPHAVEALVKQPPDRWLSNARMTHYQALLLDTDRVQFGPIVALNPATLLPLPEEGLQHDCLDILAEAHGTRPDLTDQPLPDADHTWYTDGSSFLQEGQRKAGAAVTTETEVVWAKALPAGTSAQRAELIALTQALKMAEGKKLNVYTDSRYAFATAHIHGEIYRRRGWLTSEGKEIKNKDEILALLKALFLPKRLSIIHCPGHQKGNRAEARGNRMADQAAREVATRETPETSTLLAGKRTADGSEFEKRTADGSEFESPKKKAKVE

SEQ ID NO: 2460 - protein, 2096 aa, synthetic construct
MPAAKRVKLDGGDKKYSIGLDIGTNSVGWAVITDEYKVPSKKFKVLGNTDRHSIKKNLIGALLFDSGETAEATRLKRTARRRYTRRKNRICYLQEIFSNEMAKVDDSFFHRLEESFLVEEDKKHERHPIFGNIVDEVAYHEKYPTIYHLRKKLVDSTDKADLRLIYLALAHMIKFRGHFLIEGDLNPDNSDVDKLFIQLVQTYNQLFEENPINASGVDAKAILSARLSKSRRLENLIAQLPGEKKNGLFGNLIALSLGLTPNFKSNFDLAEDAKLQLSKDTYDDDLDNLLAQIGDQYADLFLAAKNLSDAILLSDILRVNTEITKAPLSASMIKRYDEHHQDLTLLKALVRQQLPEKYKEIFFDQSKNGYAGYIDGGASQEEFYKFIKPILEKMDGTEELLVKLNREDLLRKQRTFDNGSIPHQIHLGELHAILRRQEDFYPFLKDNREKIEKILTFRIPYYVGPLARGNSRFAWMTRKSEETITPWNFEEVVDKGASAQSFIERMTNFDKNLPNEKVLPKHSLLYEYFTVYNELTKVKYVTEGMRKPAFLSGEQKKAIVDLLFKTNRKVTVKQLKEDYFKKIECFDSVEISGVEDRFNASLGTYHDLLKIIKDKDFLDNEENEDILEDIVLTLTLFEDREMIEERLKTYAHLFDDKVMKQLKRRRYTGWGRLSRKLINGIRDKQSGKTILDFLKSDGFANRNFMQLIHDDSLTFKEDIQKAQVSGQGDSLHEHIANLAGSPAIKKGILQTVKVVDELVKVMGRHKPENIVIEMARENQTTQKGQKNSRERMKRIEEGIKELGSQILKEHPVENTQLQNEKLYLYYLQNGRDMYVDQELDINRLSDYDVDHIVPQSFLKDDSIDNKVLTRSDKARGKSDNVPSEEVVKKMKNYWRQLLNAKLITQRKFDNLTKAERGGLSELDKAGFIKRQLVETRQITKHVAQILDSRMNTKYDENDKLIREVKVITLKSKLVSDFRKDFQFYKVREINNYHHAHDAYLNAVVGTALIKKYPKLESEFVYGDYKVYDVRKMIAKSEQEIGKATAKYFFYSNIMNFFKTEITLANGEIRKRPLIETNGETGEIVWDKGRDFATVRKVLSMPQVNIVKKTEVQTGGFSKESILPKRNSDKLIARKKDWDPKKYGGFDSPTVAYSVLVVAKVEKGKSKKLKSVKELLGITIMERSSFEKNPIDFLEAKGYKEVKKDLIIKLPKYSLFELENGRKRMLASAGELQKGNELALPSKYVNFLYLASHYEKLKGSPEDNEQKQLFVEQHKHYLDEIIEQISEFSKRVILADANLDKVLSAYNKHRDKPIREQAENIIHLFTLTNLGAPAAFKYFDTTIDRKRYTSTKEVLDATLIHQSITGLYETRIDLSQLGGDGGEAAAKGGSGSSGGTLNIEDEYRLHETSKGPDVPLGSTWLSDFPQAWAETGGMGLAVRQAPLIIPLKATSTPVSIKQYPMSQEARLGIKPHIQRLLDQGILVPCQSPWNTPLLPVKKPGTNDYRPVQDLREVNKRVEDIHPTVPNPYNLLSGLPPSHQWYTVLDLKDAFFCLRLHPTSQSLFAFEWRDPEMGISGQLTWTRLPQGFKNSPTLFNEALHRDLADFRIQHPDLILLQYVDDLLLAATSELDCQQGTRALLQTLGDLGYRASAKKAQICQKQVKYLGYLLKEGQRWLTEARKETVMGQPTPKTPRQLREFLGTAGFCRLWIPGFAEMAAPLYPLTKPGTLFEWGPDQQKAYQEIKQALLTAPALGLPDLTKPFELFVDEKQGYAKGVLTQKLGPWRRPVAYLSKKLDPVAAGWPPCLRMVAAIAVLTKDAGKLTMGQPLVILAPHAVEALVKQPPDRWLSNARMTHYQALLLDTDRVQFGPIVALNPATLLPLPEEGLQHDCLDILAEAHGTRPDLTDQPLPDADHTWYTDGSSFLQEGQRKAGAAVTTETEVVWAKALPAGTSAQRAELIALTQALKMAEGKKLNVYTDSRYAFATAHIHGEIYRRRGWLTSEGKEIKNKDEILALLKALFLPKRLSIIHCPGHQKGNRAEARGNRMADQAAREVATRETPETSTLLAGKRTADGSEFEKRTADGSEFESPKKKAKVE

SEQ ID NO: 2461 - protein, 2096 aa, synthetic construct
MPAAKRVKLDGGDKKYSIGLDIGTNSVGWAVITDEYKVPSKKFKVLGNTDRHSIKKNLIGALLFDSGETAEATRLKRTARRRYTRRKNRICYLQEIFSNEMAKVDDSFFHRLEESFLVEEDKKHERHPIFGNIVDEVAYHEKYPTIYHLRKKLVDSTDKADLRLIYLALAHMIKFRGHFLIEGDLNPDNSDVDKLFIQLVQTYNQLFEENPINASGVDAKAILSARLSKSRRLENLIAQLPGEKKNGLFGNLIALSLGLTPNFKSNFDLAEDAKLQLSKDTYDDDLDNLLAQIGDQYADLFLAAKNLSDAILLSDILRVNTEITKAPLSASMIKRYDEHHQDLTLLKALVRQQLPEKYKEIFFDQSKNGYAGYIDGGASQEEFYKFIKPILEKMDGTEELLVKLNREDLLRKQRTFDNGSIPHQIHLGELHAILRRQEDFYPFLKDNREKIEKILTFRIPYYVGPLARGNSRFAWMTRKSEETITPWNFEEVVDKGASAQSFIERMTNFDKNLPNEKVLPKHSLLYEYFTVYNELTKVKYVTEGMRKPAFLSGEQKKAIVDLLFKTNRKVTVKQLKEDYFKKIECFDSVEISGVEDRFNASLGTYHDLLKIIKDKDFLDNEENEDILEDIVLTLTLFEDREMIEERLKTYAHLFDDKVMKQLKRRRYTGWGRLSRKLINGIRDKQSGKTILDFLKSDGFANRNFMQLIHDDSLTFKEDIQKAQVSGQGDSLHEHIANLAGSPAIKKGILQTVKVVDELVKVMGRHKPENIVIEMARENQTTQKGQKNSRERMKRIEEGIKELGSQILKEHPVENTQLQNEKLYLYYLQNGRDMYVDQELDINRLSDYDVDHIVPQSFLKDDSIDNKVLTRSDKARGKSDNVPSEEVVKKMKNYWRQLLNAKLITQRKFDNLTKAERGGLSELDKAGFIKRQLVETRQITKHVAQILDSRMNTKYDENDKLIREVKVITLKSKLVSDFRKDFQFYKVREINNYHHAHDAYLNAVVGTALIKKYPKLESEFVYGDYKVYDVRKMIAKSEQEIGKATAKYFFYSNIMNFFKTEITLANGEIRKRPLIETNGETGEIVWDKGRDFATVRKVLSMPQVNIVKKTEVQTGGFSKESILPKRNSDKLIARKKDWDPKKYGGFDSPTVAYSVLVVAKVEKGKSKKLKSVKELLGITIMERSSFEKNPIDFLEAKGYKEVKKDLIIKLPKYSLFELENGRKRMLASAGELQKGNELALPSKYVNFLYLASHYEKLKGSPEDNEQKQLFVEQHKHYLDEIIEQISEFSKRVILADANLDKVLSAYNKHRDKPIREQAENIIHLFTLTNLGAPAAFKYFDTTIDRKRYTSTKEVLDATLIHQSITGLYETRIDLSQLGGDGGGGGGSSEAAAKGGTLNIEDEYRLHETSKGPDVPLGSTWLSDFPQAWAETGGMGLAVRQAPLIIPLKATSTPVSIKQYPMSQEARLGIKPHIQRLLDQGILVPCQSPWNTPLLPVKKPGTNDYRPVQDLREVNKRVEDIHPTVPNPYNLLSGLPPSHQWYTVLDLKDAFFCLRLHPTSQSLFAFEWRDPEMGISGQLTWTRLPQGFKNSPTLFNEALHRDLADFRIQHPDLILLQYVDDLLLAATSELDCQQGTRALLQTLGDLGYRASAKKAQICQKQVKYLGYLLKEGQRWLTEARKETVMGQPTPKTPRQLREFLGTAGFCRLWIPGFAEMAAPLYPLTKPGTLFEWGPDQQKAYQEIKQALLTAPALGLPDLTKPFELFVDEKQGYAKGVLTQKLGPWRRPVAYLSKKLDPVAAGWPPCLRMVAAIAVLTKDAGKLTMGQPLVILAPHAVEALVKQPPDRWLSNARMTHYQALLLDTDRVQFGPIVALNPATLLPLPEEGLQHDCLDILAEAHGTRPDLTDQPLPDADHTWYTDGSSFLQEGQRKAGAAVTTETEVVWAKALPAGTSAQRAELIALTQALKMAEGKKLNVYTDSRYAFATAHIHGEIYRRRGWLTSEGKEIKNKDEILALLKALFLPKRLSIIHCPGHQKGNRAEARGNRMADQAAREVATRETPETSTLLAGKRTADGSEFEKRTADGSEFESPKKKAKVE

SEQ ID NO: 2462 - protein, 2096 aa, synthetic construct
MPAAKRVKLDGGDKKYSIGLDIGTNSVGWAVITDEYKVPSKKFKVLGNTDRHSIKKNLIGALLFDSGETAEATRLKRTARRRYTRRKNRICYLQEIFSNEMAKVDDSFFHRLEESFLVEEDKKHERHPIFGNIVDEVAYHEKYPTIYHLRKKLVDSTDKADLRLIYLALAHMIKFRGHFLIEGDLNPDNSDVDKLFIQLVQTYNQLFEENPINASGVDAKAILSARLSKSRRLENLIAQLPGEKKNGLFGNLIALSLGLTPNFKSNFDLAEDAKLQLSKDTYDDDLDNLLAQIGDQYADLFLAAKNLSDAILLSDILRVNTEITKAPLSASMIKRYDEHHQDLTLLKALVRQQLPEKYKEIFFDQSKNGYAGYIDGGASQEEFYKFIKPILEKMDGTEELLVKLNREDLLRKQRTFDNGSIPHQIHLGELHAILRRQEDFYPFLKDNREKIEKILTFRIPYYVGPLARGNSRFAWMTRKSEETITPWNFEEVVDKGASAQSFIERMTNFDKNLPNEKVLPKHSLLYEYFTVYNELTKVKYVTEGMRKPAFLSGEQKKAIVDLLFKTNRKVTVKQLKEDYFKKIECFDSVEISGVEDRFNASLGTYHDLLKIIKDKDFLDNEENEDILEDIVLTLTLFEDREMIEERLKTYAHLFDDKVMKQLKRRRYTGWGRLSRKLINGIRDKQSGKTILDFLKSDGFANRNFMQLIHDDSLTFKEDIQKAQVSGQGDSLHEHIANLAGSPAIKKGILQTVKVVDELVKVMGRHKPENIVIEMARENQTTQKGQKNSRERMKRIEEGIKELGSQILKEHPVENTQLQNEKLYLYYLQNGRDMYVDQELDINRLSDYDVDHIVPQSFLKDDSIDNKVLTRSDKARGKSDNVPSEEVVKKMKNYWRQLLNAKLITQRKFDNLTKAERGGLSELDKAGFIKRQLVETRQITKHVAQILDSRMNTKYDENDKLIREVKVITLKSKLVSDFRKDFQFYKVREINNYHHAHDAYLNAVVGTALIKKYPKLESEFVYGDYKVYDVRKMIAKSEQEIGKATAKYFFYSNIMNFFKTEITLANGEIRKRPLIETNGETGEIVWDKGRDFATVRKVLSMPQVNIVKKTEVQTGGFSKESILPKRNSDKLIARKKDWDPKKYGGFDSPTVAYSVLVVAKVEKGKSKKLKSVKELLGITIMERSSFEKNPIDFLEAKGYKEVKKDLIIKLPKYSLFELENGRKRMLASAGELQKGNELALPSKYVNFLYLASHYEKLKGSPEDNEQKQLFVEQHKHYLDEIIEQISEFSKRVILADANLDKVLSAYNKHRDKPIREQAENIIHLFTLTNLGAPAAFKYFDTTIDRKRYTSTKEVLDATLIHQSITGLYETRIDLSQLGGDGGEAAAKGGGGSSGGTLNIEDEYRLHETSKGPDVPLGSTWLSDFPQAWAETGGMGLAVRQAPLIIPLKATSTPVSIKQYPMSQEARLGIKPHIQRLLDQGILVPCQSPWNTPLLPVKKPGTNDYRPVQDLREVNKRVEDIHPTVPNPYNLLSGLPPSHQWYTVLDLKDAFFCLRLHPTSQSLFAFEWRDPEMGISGQLTWTRLPQGFKNSPTLFNEALHRDLADFRIQHPDLILLQYVDDLLLAATSELDCQQGTRALLQTLGDLGYRASAKKAQICQKQVKYLGYLLKEGQRWLTEARKETVMGQPTPKTPRQLREFLGTAGFCRLWIPGFAEMAAPLYPLTKPGTLFEWGPDQQKAYQEIKQALLTAPALGLPDLTKPFELFVDEKQGYAKGVLTQKLGPWRRPVAYLSKKLDPVAAGWPPCLRMVAAIAVLTKDAGKLTMGQPLVILAPHAVEALVKQPPDRWLSNARMTHYQALLLDTDRVQFGPIVALNPATLLPLPEEGLQHDCLDILAEAHGTRPDLTDQPLPDADHTWYTDGSSFLQEGQRKAGAAVTTETEVVWAKALPAGTSAQRAELIALTQALKMAEGKKLNVYTDSRYAFATAHIHGEIYRRRGWLTSEGKEIKNKDEILALLKALFLPKRLSIIHCPGHQKGNRAEARGNRMADQAAREVATRETPETSTLLAGKRTADGSEFEKRTADGSEFESPKKKAKVE

SEQ ID NO: 2463 - protein, 2094 aa, synthetic construct
MPAAKRVKLDGGDKKYSIGLDIGTNSVGWAVITDEYKVPSKKFKVLGNTDRHSIKKNLIGALLFDSGETAEATRLKRTARRRYTRRKNRICYLQEIFSNEMAKVDDSFFHRLEESFLVEEDKKHERHPIFGNIVDEVAYHEKYPTIYHLRKKLVDSTDKADLRLIYLALAHMIKFRGHFLIEGDLNPDNSDVDKLFIQLVQTYNQLFEENPINASGVDAKAILSARLSKSRRLENLIAQLPGEKKNGLFGNLIALSLGLTPNFKSNFDLAEDAKLQLSKDTYDDDLDNLLAQIGDQYADLFLAAKNLSDAILLSDILRVNTEITKAPLSASMIKRYDEHHQDLTLLKALVRQQLPEKYKEIFFDQSKNGYAGYIDGGASQEEFYKFIKPILEKMDGTEELLVKLNREDLLRKQRTFDNGSIPHQIHLGELHAILRRQEDFYPFLKDNREKIEKILTFRIPYYVGPLARGNSRFAWMTRKSEETITPWNFEEVVDKGASAQSFIERMTNFDKNLPNEKVLPKHSLLYEYFTVYNELTKVKYVTEGMRKPAFLSGEQKKAIVDLLFKTNRKVTVKQLKEDYFKKIECFDSVEISGVEDRFNASLGTYHDLLKIIKDKDFLDNEENEDILEDIVLTLTLFEDREMIEERLKTYAHLFDDKVMKQLKRRRYTGWGRLSRKLINGIRDKQSGKTILDFLKSDGFANRNFMQLIHDDSLTFKEDIQKAQVSGQGDSLHEHIANLAGSPAIKKGILQTVKVVDELVKVMGRHKPENIVIEMARENQTTQKGQKNSRERMKRIEEGIKELGSQILKEHPVENTQLQNEKLYLYYLQNGRDMYVDQELDINRLSDYDVDHIVPQSFLKDDSIDNKVLTRSDKARGKSDNVPSEEVVKKMKNYWRQLLNAKLITQRKFDNLTKAERGGLSELDKAGFIKRQLVETRQITKHVAQILDSRMNTKYDENDKLIREVKVITLKSKLVSDFRKDFQFYKVREINNYHHAHDAYLNAVVGTALIKKYPKLESEFVYGDYKVYDVRKMIAKSEQEIGKATAKYFFYSNIMNFFKTEITLANGEIRKRPLIETNGETGEIVWDKGRDFATVRKVLSMPQVNIVKKTEVQTGGFSKESILPKRNSDKLIARKKDWDPKKYGGFDSPTVAYSVLVVAKVEKGKSKKLKSVKELLGITIMERSSFEKNPIDFLEAKGYKEVKKDLIIKLPKYSLFELENGRKRMLASAGELQKGNELALPSKYVNFLYLASHYEKLKGSPEDNEQKQLFVEQHKHYLDEIIEQISEFSKRVILADANLDKVLSAYNKHRDKPIREQAENIIHLFTLTNLGAPAAFKYFDTTIDRKRYTSTKEVLDATLIHQSITGLYETRIDLSQLGGDGGGSSGGSGGGGGTLNIEDEYRLHETSKGPDVPLGSTWLSDFPQAWAETGGMGLAVRQAPLIIPLKATSTPVSIKQYPMSQEARLGIKPHIQRLLDQGILVPCQSPWNTPLLPVKKPGTNDYRPVQDLREVNKRVEDIHPTVPNPYNLLSGLPPSHQWYTVLDLKDAFFCLRLHPTSQSLFAFEWRDPEMGISGQLTWTRLPQGFKNSPTLFNEALHRDLADFRIQHPDLILLQYVDDLLLAATSELDCQQGTRALLQTLGDLGYRASAKKAQICQKQVKYLGYLLKEGQRWLTEARKETVMGQPTPKTPRQLREFLGTAGFCRLWIPGFAEMAAPLYPLTKPGTLFEWGPDQQKAYQEIKQALLTAPALGLPDLTKPFELFVDEKQGYAKGVLTQKLGPWRRPVAYLSKKLDPVAAGWPPCLRMVAAIAVLTKDAGKLTMGQPLVILAPHAVEALVKQPPDRWLSNARMTHYQALLLDTDRVQFGPIVALNPATLLPLPEEGLQHDCLDILAEAHGTRPDLTDQPLPDADHTWYTDGSSFLQEGQRKAGAAVTTETEVVWAKALPAGTSAQRAELIALTQALKMAEGKKLNVYTDSRYAFATAHIHGEIYRRRGWLTSEGKEIKNKDEILALLKALFLPKRLSIIHCPGHQKGNRAEARGNRMADQAAREVATRETPETSTLLAGKRTADGSEFEKRTADGSEFESPKKKAKVE

SEQ ID NO: 2464 - protein, 2105 aa, synthetic construct
MPAAKRVKLDGGDKKYSIGLDIGTNSVGWAVITDEYKVPSKKFKVLGNTDRHSIKKNLIGALLFDSGETAEATRLKRTARRRYTRRKNRICYLQEIFSNEMAKVDDSFFHRLEESFLVEEDKKHERHPIFGNIVDEVAYHEKYPTIYHLRKKLVDSTDKADLRLIYLALAHMIKFRGHFLIEGDLNPDNSDVDKLFIQLVQTYNQLFEENPINASGVDAKAILSARLSKSRRLENLIAQLPGEKKNGLFGNLIALSLGLTPNFKSNFDLAEDAKLQLSKDTYDDDLDNLLAQIGDQYADLFLAAKNLSDAILLSDILRVNTEITKAPLSASMIKRYDEHHQDLTLLKALVRQQLPEKYKEIFFDQSKNGYAGYIDGGASQEEFYKFIKPILEKMDGTEELLVKLNREDLLRKQRTFDNGSIPHQIHLGELHAILRRQEDFYPFLKDNREKIEKILTFRIPYYVGPLARGNSRFAWMTRKSEETITPWNFEEVVDKGASAQSFIERMTNFDKNLPNEKVLPKHSLLYEYFTVYNELTKVKYVTEGMRKPAFLSGEQKKAIVDLLFKTNRKVTVKQLKEDYFKKIECFDSVEISGVEDRFNASLGTYHDLLKIIKDKDFLDNEENEDILEDIVLTLTLFEDREMIEERLKTYAHLFDDKVMKQLKRRRYTGWGRLSRKLINGIRDKQSGKTILDFLKSDGFANRNFMQLIHDDSLTFKEDIQKAQVSGQGDSLHEHIANLAGSPAIKKGILQTVKVVDELVKVMGRHKPENIVIEMARENQTTQKGQKNSRERMKRIEEGIKELGSQILKEHPVENTQLQNEKLYLYYLQNGRDMYVDQELDINRLSDYDVDHIVPQSFLKDDSIDNKVLTRSDKARGKSDNVPSEEVVKKMKNYWRQLLNAKLITQRKFDNLTKAERGGLSELDKAGFIKRQLVETRQITKHVAQILDSRMNTKYDENDKLIREVKVITLKSKLVSDFRKDFQFYKVREINNYHHAHDAYLNAVVGTALIKKYPKLESEFVYGDYKVYDVRKMIAKSEQEIGKATAKYFFYSNIMNFFKTEITLANGEIRKRPLIETNGETGEIVWDKGRDFATVRKVLSMPQVNIVKKTEVQTGGFSKESILPKRNSDKLIARKKDWDPKKYGGFDSPTVAYSVLVVAKVEKGKSKKLKSVKELLGITIMERSSFEKNPIDFLEAKGYKEVKKDLIIKLPKYSLFELENGRKRMLASAGELQKGNELALPSKYVNFLYLASHYEKLKGSPEDNEQKQLFVEQHKHYLDEIIEQISEFSKRVILADANLDKVLSAYNKHRDKPIREQAENIIHLFTLTNLGAPAAFKYFDTTIDRKRYTSTKEVLDATLIHQSITGLYETRIDLSQLGGDGGGGGGSGGGGSGGGGSGGGGSGGTLNIEDEYRLHETSKGPDVPLGSTWLSDFPQAWAETGGMGLAVRQAPLIIPLKATSTPVSIKQYPMSQEARLGIKPHIQRLLDQGILVPCQSPWNTPLLPVKKPGTNDYRPVQDLREVNKRVEDIHPTVPNPYNLLSGLPPSHQWYTVLDLKDAFFCLRLHPTSQSLFAFEWRDPEMGISGQLTWTRLPQGFKNSPTLFNEALHRDLADFRIQHPDLILLQYVDDLLLAATSELDCQQGTRALLQTLGDLGYRASAKKAQICQKQVKYLGYLLKEGQRWLTEARKETVMGQPTPKTPRQLREFLGTAGFCRLWIPGFAEMAAPLYPLTKPGTLFEWGPDQQKAYQEIKQALLTAPALGLPDLTKPFELFVDEKQGYAKGVLTQKLGPWRRPVAYLSKKLDPVAAGWPPCLRMVAAIAVLTKDAGKLTMGQPLVILAPHAVEALVKQPPDRWLSNARMTHYQALLLDTDRVQFGPIVALNPATLLPLPEEGLQHDCLDILAEAHGTRPDLTDQPLPDADHTWYTDGSSFLQEGQRKAGAAVTTETEVVWAKALPAGTSAQRAELIALTQALKMAEGKKLNVYTDSRYAFATAHIHGEIYRRRGWLTSEGKEIKNKDEILALLKALFLPKRLSIIHCPGHQKGNRAEARGNRMADQAAREVATRETPETSTLLAGKRTADGSEFEKRTADGSEFESPKKKAKVE

SEQ ID NO: 2465 - protein, 2100 aa, synthetic construct
MPAAKRVKLDGGDKKYSIGLDIGTNSVGWAVITDEYKVPSKKFKVLGNTDRHSIKKNLIGALLFDSGETAEATRLKRTARRRYTRRKNRICYLQEIFSNEMAKVDDSFFHRLEESFLVEEDKKHERHPIFGNIVDEVAYHEKYPTIYHLRKKLVDSTDKADLRLIYLALAHMIKFRGHFLIEGDLNPDNSDVDKLFIQLVQTYNQLFEENPINASGVDAKAILSARLSKSRRLENLIAQLPGEKKNGLFGNLIALSLGLTPNFKSNFDLAEDAKLQLSKDTYDDDLDNLLAQIGDQYADLFLAAKNLSDAILLSDILRVNTEITKAPLSASMIKRYDEHHQDLTLLKALVRQQLPEKYKEIFFDQSKNGYAGYIDGGASQEEFYKFIKPILEKMDGTEELLVKLNREDLLRKQRTFDNGSIPHQIHLGELHAILRRQEDFYPFLKDNREKIEKILTFRIPYYVGPLARGNSRFAWMTRKSEETITPWNFEEVVDKGASAQSFIERMTNFDKNLPNEKVLPKHSLLYEYFTVYNELTKVKYVTEGMRKPAFLSGEQKKAIVDLLFKTNRKVTVKQLKEDYFKKIECFDSVEISGVEDRFNASLGTYHDLLKIIKDKDFLDNEENEDILEDIVLTLTLFEDREMIEERLKTYAHLFDDKVMKQLKRRRYTGWGRLSRKLINGIRDKQSGKTILDFLKSDGFANRNFMQLIHDDSLTFKEDIQKAQVSGQGDSLHEHIANLAGSPAIKKGILQTVKVVDELVKVMGRHKPENIVIEMARENQTTQKGQKNSRERMKRIEEGIKELGSQILKEHPVENTQLQNEKLYLYYLQNGRDMYVDQELDINRLSDYDVDHIVPQSFLKDDSIDNKVLTRSDKARGKSDNVPSEEVVKKMKNYWRQLLNAKLITQRKFDNLTKAERGGLSELDKAGFIKRQLVETRQITKHVAQILDSRMNTKYDENDKLIREVKVITLKSKLVSDFRKDFQFYKVREINNYHHAHDAYLNAVVGTALIKKYPKLESEFVYGDYKVYDVRKMIAKSEQEIGKATAKYFFYSNIMNFFKTEITLANGEIRKRPLIETNGETGEIVWDKGRDFATVRKVLSMPQVNIVKKTEVQTGGFSKESILPKRNSDKLIARKKDWDPKKYGGFDSPTVAYSVLVVAKVEKGKSKKLKSVKELLGITIMERSSFEKNPIDFLEAKGYKEVKKDLIIKLPKYSLFELENGRKRMLASAGELQKGNELALPSKYVNFLYLASHYEKLKGSPEDNEQKQLFVEQHKHYLDEIIEQISEFSKRVILADANLDKVLSAYNKHRDKPIREQAENIIHLFTLTNLGAPAAFKYFDTTIDRKRYTSTKEVLDATLIHQSITGLYETRIDLSQLGGDGGGGSGGSGGSGGSGGSGGTLNIEDEYRLHETSKGPDVPLGSTWLSDFPQAWAETGGMGLAVRQAPLIIPLKATSTPVSIKQYPMSQEARLGIKPHIQRLLDQGILVPCQSPWNTPLLPVKKPGTNDYRPVQDLREVNKRVEDIHPTVPNPYNLLSGLPPSHQWYTVLDLKDAFFCLRLHPTSQSLFAFEWRDPEMGISGQLTWTRLPQGFKNSPTLFNEALHRDLADFRIQHPDLILLQYVDDLLLAATSELDCQQGTRALLQTLGDLGYRASAKKAQICQKQVKYLGYLLKEGQRWLTEARKETVMGQPTPKTPRQLREFLGTAGFCRLWIPGFAEMAAPLYPLTKPGTLFEWGPDQQKAYQEIKQALLTAPALGLPDLTKPFELFVDEKQGYAKGVLTQKLGPWRRPVAYLSKKLDPVAAGWPPCLRMVAAIAVLTKDAGKLTMGQPLVILAPHAVEALVKQPPDRWLSNARMTHYQALLLDTDRVQFGPIVALNPATLLPLPEEGLQHDCLDILAEAHGTRPDLTDQPLPDADHTWYTDGSSFLQEGQRKAGAAVTTETEVVWAKALPAGTSAQRAELIALTQALKMAEGKKLNVYTDSRYAFATAHIHGEIYRRRGWLTSEGKEIKNKDEILALLKALFLPKRLSIIHCPGHQKGNRAEARGNRMADQAAREVATRETPETSTLLAGKRTADGSEFEKRTADGSEFESPKKKAKVE

SEQ ID NO: 2466 - protein, 2096 aa, synthetic construct
MPAAKRVKLDGGDKKYSIGLDIGTNSVGWAVITDEYKVPSKKFKVLGNTDRHSIKKNLIGALLFDSGETAEATRLKRTARRRYTRRKNRICYLQEIFSNEMAKVDDSFFHRLEESFLVEEDKKHERHPIFGNIVDEVAYHEKYPTIYHLRKKLVDSTDKADLRLIYLALAHMIKFRGHFLIEGDLNPDNSDVDKLFIQLVQTYNQLFEENPINASGVDAKAILSARLSKSRRLENLIAQLPGEKKNGLFGNLIALSLGLTPNFKSNFDLAEDAKLQLSKDTYDDDLDNLLAQIGDQYADLFLAAKNLSDAILLSDILRVNTEITKAPLSASMIKRYDEHHQDLTLLKALVRQQLPEKYKEIFFDQSKNGYAGYIDGGASQEEFYKFIKPILEKMDGTEELLVKLNREDLLRKQRTFDNGSIPHQIHLGELHAILRRQEDFYPFLKDNREKIEKILTFRIPYYVGPLARGNSRFAWMTRKSEETITPWNFEEVVDKGASAQSFIERMTNFDKNLPNEKVLPKHSLLYEYFTVYNELTKVKYVTEGMRKPAFLSGEQKKAIVDLLFKTNRKVTVKQLKEDYFKKIECFDSVEISGVEDRFNASLGTYHDLLKIIKDKDFLDNEENEDILEDIVLTLTLFEDREMIEERLKTYAHLFDDKVMKQLKRRRYTGWGRLSRKLINGIRDKQSGKTILDFLKSDGFANRNFMQLIHDDSLTFKEDIQKAQVSGQGDSLHEHIANLAGSPAIKKGILQTVKVVDELVKVMGRHKPENIVIEMARENQTTQKGQKNSRERMKRIEEGIKELGSQILKEHPVENTQLQNEKLYLYYLQNGRDMYVDQELDINRLSDYDVDHIVPQSFLKDDSIDNKVLTRSDKARGKSDNVPSEEVVKKMKNYWRQLLNAKLITQRKFDNLTKAERGGLSELDKAGFIKRQLVETRQITKHVAQILDSRMNTKYDENDKLIREVKVITLKSKLVSDFRKDFQFYKVREINNYHHAHDAYLNAVVGTALIKKYPKLESEFVYGDYKVYDVRKMIAKSEQEIGKATAKYFFYSNIMNFFKTEITLANGEIRKRPLIETNGETGEIVWDKGRDFATVRKVLSMPQVNIVKKTEVQTGGFSKESILPKRNSDKLIARKKDWDPKKYGGFDSPTVAYSVLVVAKVEKGKSKKLKSVKELLGITIMERSSFEKNPIDFLEAKGYKEVKKDLIIKLPKYSLFELENGRKRMLASAGELQKGNELALPSKYVNFLYLASHYEKLKGSPEDNEQKQLFVEQHKHYLDEIIEQISEFSKRVILADANLDKVLSAYNKHRDKPIREQAENIIHLFTLTNLGAPAAFKYFDTTIDRKRYTSTKEVLDATLIHQSITGLYETRIDLSQLGGDGGPAPEAAAKGSSGGTLNIEDEYRLHETSKGPDVPLGSTWLSDFPQAWAETGGMGLAVRQAPLIIPLKATSTPVSIKQYPMSQEARLGIKPHIQRLLDQGILVPCQSPWNTPLLPVKKPGTNDYRPVQDLREVNKRVEDIHPTVPNPYNLLSGLPPSHQWYTVLDLKDAFFCLRLHPTSQSLFAFEWRDPEMGISGQLTWTRLPQGFKNSPTLFNEALHRDLADFRIQHPDLILLQYVDDLLLAATSELDCQQGTRALLQTLGDLGYRASAKKAQICQKQVKYLGYLLKEGQRWLTEARKETVMGQPTPKTPRQLREFLGTAGFCRLWIPGFAEMAAPLYPLTKPGTLFEWGPDQQKAYQEIKQALLTAPALGLPDLTKPFELFVDEKQGYAKGVLTQKLGPWRRPVAYLSKKLDPVAAGWPPCLRMVAAIAVLTKDAGKLTMGQPLVILAPHAVEALVKQPPDRWLSNARMTHYQALLLDTDRVQFGPIVALNPATLLPLPEEGLQHDCLDILAEAHGTRPDLTDQPLPDADHTWYTDGSSFLQEGQRKAGAAVTTETEVVWAKALPAGTSAQRAELIALTQALKMAEGKKLNVYTDSRYAFATAHIHGEIYRRRGWLTSEGKEIKNKDEILALLKALFLPKRLSIIHCPGHQKGNRAEARGNRMADQAAREVATRETPETSTLLAGKRTADGSEFEKRTADGSEFESPKKKAKVE

SEQ ID NO: 2467 - protein, 2094 aa, synthetic construct
MPAAKRVKLDGGDKKYSIGLDIGTNSVGWAVITDEYKVPSKKFKVLGNTDRHSIKKNLIGALLFDSGETAEATRLKRTARRRYTRRKNRICYLQEIFSNEMAKVDDSFFHRLEESFLVEEDKKHERHPIFGNIVDEVAYHEKYPTIYHLRKKLVDSTDKADLRLIYLALAHMIKFRGHFLIEGDLNPDNSDVDKLFIQLVQTYNQLFEENPINASGVDAKAILSARLSKSRRLENLIAQLPGEKKNGLFGNLIALSLGLTPNFKSNFDLAEDAKLQLSKDTYDDDLDNLLAQIGDQYADLFLAAKNLSDAILLSDILRVNTEITKAPLSASMIKRYDEHHQDLTLLKALVRQQLPEKYKEIFFDQSKNGYAGYIDGGASQEEFYKFIKPILEKMDGTEELLVKLNREDLLRKQRTFDNGSIPHQIHLGELHAILRRQEDFYPFLKDNREKIEKILTFRIPYYVGPLARGNSRFAWMTRKSEETITPWNFEEVVDKGASAQSFIERMTNFDKNLPNEKVLPKHSLLYEYFTVYNELTKVKYVTEGMRKPAFLSGEQKKAIVDLLFKTNRKVTVKQLKEDYFKKIECFDSVEISGVEDRFNASLGTYHDLLKIIKDKDFLDNEENEDILEDIVLTLTLFEDREMIEERLKTYAHLFDDKVMKQLKRRRYTGWGRLSRKLINGIRDKQSGKTILDFLKSDGFANRNFMQLIHDDSLTFKEDIQKAQVSGQGDSLHEHIANLAGSPAIKKGILQTVKVVDELVKVMGRHKPENIVIEMARENQTTQKGQKNSRERMKRIEEGIKELGSQILKEHPVENTQLQNEKLYLYYLQNGRDMYVDQELDINRLSDYDVDHIVPQSFLKDDSIDNKVLTRSDKARGKSDNVPSEEVVKKMKNYWRQLLNAKLITQRKFDNLTKAERGGLSELDKAGFIKRQLVETRQITKHVAQILDSRMNTKYDENDKLIREVKVITLKSKLVSDFRKDFQFYKVREINNYHHAHDAYLNAVVGTALIKKYPKLESEFVYGDYKVYDVRKMIAKSEQEIGKATAKYFFYSNIMNFFKTEITLANGEIRKRPLIETNGETGEIVWDKGRDFATVRKVLSMPQVNIVKKTEVQTGGFSKESILPKRNSDKLIARKKDWDPKKYGGFDSPTVAYSVLVVAKVEKGKSKKLKSVKELLGITIMERSSFEKNPIDFLEAKGYKEVKKDLIIKLPKYSLFELENGRKRMLASAGELQKGNELALPSKYVNFLYLASHYEKLKGSPEDNEQKQLFVEQHKHYLDEIIEQISEFSKRVILADANLDKVLSAYNKHRDKPIREQAENIIHLFTLTNLGAPAAFKYFDTTIDRKRYTSTKEVLDATLIHQSITGLYETRIDLSQLGGDGGPAPGGSGSSGGTLNIEDEYRLHETSKGPDVPLGSTWLSDFPQAWAETGGMGLAVRQAPLIIPLKATSTPVSIKQYPMSQEARLGIKPHIQRLLDQGILVPCQSPWNTPLLPVKKPGTNDYRPVQDLREVNKRVEDIHPTVPNPYNLLSGLPPSHQWYTVLDLKDAFFCLRLHPTSQSLFAFEWRDPEMGISGQLTWTRLPQGFKNSPTLFNEALHRDLADFRIQHPDLILLQYVDDLLLAATSELDCQQGTRALLQTLGDLGYRASAKKAQICQKQVKYLGYLLKEGQRWLTEARKETVMGQPTPKTPRQLREFLGTAGFCRLWIPGFAEMAAPLYPLTKPGTLFEWGPDQQKAYQEIKQALLTAPALGLPDLTKPFELFVDEKQGYAKGVLTQKLGPWRRPVAYLSKKLDPVAAGWPPCLRMVAAIAVLTKDAGKLTMGQPLVILAPHAVEALVKQPPDRWLSNARMTHYQALLLDTDRVQFGPIVALNPATLLPLPEEGLQHDCLDILAEAHGTRPDLTDQPLPDADHTWYTDGSSFLQEGQRKAGAAVTTETEVVWAKALPAGTSAQRAELIALTQALKMAEGKKLNVYTDSRYAFATAHIHGEIYRRRGWLTSEGKEIKNKDEILALLKALFLPKRLSIIHCPGHQKGNRAEARGNRMADQAAREVATRETPETSTLLAGKRTADGSEFEKRTADGSEFESPKKKAKVE

SEQ ID NO: 2468 - protein, 2091 aa, synthetic construct
MPAAKRVKLDGGDKKYSIGLDIGTNSVGWAVITDEYKVPSKKFKVLGNTDRHSIKKNLIGALLFDSGETAEATRLKRTARRRYTRRKNRICYLQEIFSNEMAKVDDSFFHRLEESFLVEEDKKHERHPIFGNIVDEVAYHEKYPTIYHLRKKLVDSTDKADLRLIYLALAHMIKFRGHFLIEGDLNPDNSDVDKLFIQLVQTYNQLFEENPINASGVDAKAILSARLSKSRRLENLIAQLPGEKKNGLFGNLIALSLGLTPNFKSNFDLAEDAKLQLSKDTYDDDLDNLLAQIGDQYADLFLAAKNLSDAILLSDILRVNTEITKAPLSASMIKRYDEHHQDLTLLKALVRQQLPEKYKEIFFDQSKNGYAGYIDGGASQEEFYKFIKPILEKMDGTEELLVKLNREDLLRKQRTFDNGSIPHQIHLGELHAILRRQEDFYPFLKDNREKIEKILTFRIPYYVGPLARGNSRFAWMTRKSEETITPWNFEEVVDKGASAQSFIERMTNFDKNLPNEKVLPKHSLLYEYFTVYNELTKVKYVTEGMRKPAFLSGEQKKAIVDLLFKTNRKVTVKQLKEDYFKKIECFDSVEISGVEDRFNASLGTYHDLLKIIKDKDFLDNEENEDILEDIVLTLTLFEDREMIEERLKTYAHLFDDKVMKQLKRRRYTGWGRLSRKLINGIRDKQSGKTILDFLKSDGFANRNFMQLIHDDSLTFKEDIQKAQVSGQGDSLHEHIANLAGSPAIKKGILQTVKVVDELVKVMGRHKPENIVIEMARENQTTQKGQKNSRERMKRIEEGIKELGSQILKEHPVENTQLQNEKLYLYYLQNGRDMYVDQELDINRLSDYDVDHIVPQSFLKDDSIDNKVLTRSDKARGKSDNVPSEEVVKKMKNYWRQLLNAKLITQRKFDNLTKAERGGLSELDKAGFIKRQLVETRQITKHVAQILDSRMNTKYDENDKLIREVKVITLKSKLVSDFRKDFQFYKVREINNYHHAHDAYLNAVVGTALIKKYPKLESEFVYGDYKVYDVRKMIAKSEQEIGKATAKYFFYSNIMNFFKTEITLANGEIRKRPLIETNGETGEIVWDKGRDFATVRKVLSMPQVNIVKKTEVQTGGFSKESILPKRNSDKLIARKKDWDPKKYGGFDSPTVAYSVLVVAKVEKGKSKKLKSVKELLGITIMERSSFEKNPIDFLEAKGYKEVKKDLIIKLPKYSLFELENGRKRMLASAGELQKGNELALPSKYVNFLYLASHYEKLKGSPEDNEQKQLFVEQHKHYLDEIIEQISEFSKRVILADANLDKVLSAYNKHRDKPIREQAENIIHLFTLTNLGAPAAFKYFDTTIDRKRYTSTKEVLDATLIHQSITGLYETRIDLSQLGGDGGGGGGSSGGTLNIEDEYRLHETSKGPDVPLGSTWLSDFPQAWAETGGMGLAVRQAPLIIPLKATSTPVSIKQYPMSQEARLGIKPHIQRLLDQGILVPCQSPWNTPLLPVKKPGTNDYRPVQDLREVNKRVEDIHPTVPNPYNLLSGLPPSHQWYTVLDLKDAFFCLRLHPTSQSLFAFEWRDPEMGISGQLTWTRLPQGFKNSPTLFNEALHRDLADFRIQHPDLILLQYVDDLLLAATSELDCQQGTRALLQTLGDLGYRASAKKAQICQKQVKYLGYLLKEGQRWLTEARKETVMGQPTPKTPRQLREFLGTAGFCRLWIPGFAEMAAPLYPLTKPGTLFEWGPDQQKAYQEIKQALLTAPALGLPDLTKPFELFVDEKQGYAKGVLTQKLGPWRRPVAYLSKKLDPVAAGWPPCLRMVAAIAVLTKDAGKLTMGQPLVILAPHAVEALVKQPPDRWLSNARMTHYQALLLDTDRVQFGPIVALNPATLLPLPEEGLQHDCLDILAEAHGTRPDLTDQPLPDADHTWYTDGSSFLQEGQRKAGAAVTTETEVVWAKALPAGTSAQRAELIALTQALKMAEGKKLNVYTDSRYAFATAHIHGEIYRRRGWLTSEGKEIKNKDEILALLKALFLPKRLSIIHCPGHQKGNRAEARGNRMADQAAREVATRETPETSTLLAGKRTADGSEFEKRTADGSEFESPKKKAKVE

SEQ ID NO: 2469 - protein, 2096 aa, synthetic construct
MPAAKRVKLDGGDKKYSIGLDIGTNSVGWAVITDEYKVPSKKFKVLGNTDRHSIKKNLIGALLFDSGETAEATRLKRTARRRYTRRKNRICYLQEIFSNEMAKVDDSFFHRLEESFLVEEDKKHERHPIFGNIVDEVAYHEKYPTIYHLRKKLVDSTDKADLRLIYLALAHMIKFRGHFLIEGDLNPDNSDVDKLFIQLVQTYNQLFEENPINASGVDAKAILSARLSKSRRLENLIAQLPGEKKNGLFGNLIALSLGLTPNFKSNFDLAEDAKLQLSKDTYDDDLDNLLAQIGDQYADLFLAAKNLSDAILLSDILRVNTEITKAPLSASMIKRYDEHHQDLTLLKALVRQQLPEKYKEIFFDQSKNGYAGYIDGGASQEEFYKFIKPILEKMDGTEELLVKLNREDLLRKQRTFDNGSIPHQIHLGELHAILRRQEDFYPFLKDNREKIEKILTFRIPYYVGPLARGNSRFAWMTRKSEETITPWNFEEVVDKGASAQSFIERMTNFDKNLPNEKVLPKHSLLYEYFTVYNELTKVKYVTEGMRKPAFLSGEQKKAIVDLLFKTNRKVTVKQLKEDYFKKIECFDSVEISGVEDRFNASLGTYHDLLKIIKDKDFLDNEENEDILEDIVLTLTLFEDREMIEERLKTYAHLFDDKVMKQLKRRRYTGWGRLSRKLINGIRDKQSGKTILDFLKSDGFANRNFMQLIHDDSLTFKEDIQKAQVSGQGDSLHEHIANLAGSPAIKKGILQTVKVVDELVKVMGRHKPENIVIEMARENQTTQKGQKNSRERMKRIEEGIKELGSQILKEHPVENTQLQNEKLYLYYLQNGRDMYVDQELDINRLSDYDVDHIVPQSFLKDDSIDNKVLTRSDKARGKSDNVPSEEVVKKMKNYWRQLLNAKLITQRKFDNLTKAERGGLSELDKAGFIKRQLVETRQITKHVAQILDSRMNTKYDENDKLIREVKVITLKSKLVSDFRKDFQFYKVREINNYHHAHDAYLNAVVGTALIKKYPKLESEFVYGDYKVYDVRKMIAKSEQEIGKATAKYFFYSNIMNFFKTEITLANGEIRKRPLIETNGETGEIVWDKGRDFATVRKVLSMPQVNIVKKTEVQTGGFSKESILPKRNSDKLIARKKDWDPKKYGGFDSPTVAYSVLVVAKVEKGKSKKLKSVKELLGITIMERSSFEKNPIDFLEAKGYKEVKKDLIIKLPKYSLFELENGRKRMLASAGELQKGNELALPSKYVNFLYLASHYEKLKGSPEDNEQKQLFVEQHKHYLDEIIEQISEFSKRVILADANLDKVLSAYNKHRDKPIREQAENIIHLFTLTNLGAPAAFKYFDTTIDRKRYTSTKEVLDATLIHQSITGLYETRIDLSQLGGDGGEAAAKGSSPAPGGTLNIEDEYRLHETSKGPDVPLGSTWLSDFPQAWAETGGMGLAVRQAPLIIPLKATSTPVSIKQYPMSQEARLGIKPHIQRLLDQGILVPCQSPWNTPLLPVKKPGTNDYRPVQDLREVNKRVEDIHPTVPNPYNLLSGLPPSHQWYTVLDLKDAFFCLRLHPTSQSLFAFEWRDPEMGISGQLTWTRLPQGFKNSPTLFNEALHRDLADFRIQHPDLILLQYVDDLLLAATSELDCQQGTRALLQTLGDLGYRASAKKAQICQKQVKYLGYLLKEGQRWLTEARKETVMGQPTPKTPRQLREFLGTAGFCRLWIPGFAEMAAPLYPLTKPGTLFEWGPDQQKAYQEIKQALLTAPALGLPDLTKPFELFVDEKQGYAKGVLTQKLGPWRRPVAYLSKKLDPVAAGWPPCLRMVAAIAVLTKDAGKLTMGQPLVILAPHAVEALVKQPPDRWLSNARMTHYQALLLDTDRVQFGPIVALNPATLLPLPEEGLQHDCLDILAEAHGTRPDLTDQPLPDADHTWYTDGSSFLQEGQRKAGAAVTTETEVVWAKALPAGTSAQRAELIALTQALKMAEGKKLNVYTDSRYAFATAHIHGEIYRRRGWLTSEGKEIKNKDEILALLKALFLPKRLSIIHCPGHQKGNRAEARGNRMADQAAREVATRETPETSTLLAGKRTADGSEFEKRTADGSEFESPKKKAKVE

SEQ ID NO: 2470 - protein, 2096 aa, synthetic construct
MPAAKRVKLDGGDKKYSIGLDIGTNSVGWAVITDEYKVPSKKFKVLGNTDRHSIKKNLIGALLFDSGETAEATRLKRTARRRYTRRKNRICYLQEIFSNEMAKVDDSFFHRLEESFLVEEDKKHERHPIFGNIVDEVAYHEKYPTIYHLRKKLVDSTDKADLRLIYLALAHMIKFRGHFLIEGDLNPDNSDVDKLFIQLVQTYNQLFEENPINASGVDAKAILSARLSKSRRLENLIAQLPGEKKNGLFGNLIALSLGLTPNFKSNFDLAEDAKLQLSKDTYDDDLDNLLAQIGDQYADLFLAAKNLSDAILLSDILRVNTEITKAPLSASMIKRYDEHHQDLTLLKALVRQQLPEKYKEIFFDQSKNGYAGYIDGGASQEEFYKFIKPILEKMDGTEELLVKLNREDLLRKQRTFDNGSIPHQIHLGELHAILRRQEDFYPFLKDNREKIEKILTFRIPYYVGPLARGNSRFAWMTRKSEETITPWNFEEVVDKGASAQSFIERMTNFDKNLPNEKVLPKHSLLYEYFTVYNELTKVKYVTEGMRKPAFLSGEQKKAIVDLLFKTNRKVTVKQLKEDYFKKIECFDSVEISGVEDRFNASLGTYHDLLKIIKDKDFLDNEENEDILEDIVLTLTLFEDREMIEERLKTYAHLFDDKVMKQLKRRRYTGWGRLSRKLINGIRDKQSGKTILDFLKSDGFANRNFMQLIHDDSLTFKEDIQKAQVSGQGDSLHEHIANLAGSPAIKKGILQTVKVVDELVKVMGRHKPENIVIEMARENQTTQKGQKNSRERMKRIEEGIKELGSQILKEHPVENTQLQNEKLYLYYLQNGRDMYVDQELDINRLSDYDVDHIVPQSFLKDDSIDNKVLTRSDKARGKSDNVPSEEVVKKMKNYWRQLLNAKLITQRKFDNLTKAERGGLSELDKAGFIKRQLVETRQITKHVAQILDSRMNTKYDENDKLIREVKVITLKSKLVSDFRKDFQFYKVREINNYHHAHDAYLNAVVGTALIKKYPKLESEFVYGDYKVYDVRKMIAKSEQEIGKATAKYFFYSNIMNFFKTEITLANGEIRKRPLIETNGETGEIVWDKGRDFATVRKVLSMPQVNIVKKTEVQTGGFSKESILPKRNSDKLIARKKDWDPKKYGGFDSPTVAYSVLVVAKVEKGKSKKLKSVKELLGITIMERSSFEKNPIDFLEAKGYKEVKKDLIIKLPKYSLFELENGRKRMLASAGELQKGNELALPSKYVNFLYLASHYEKLKGSPEDNEQKQLFVEQHKHYLDEIIEQISEFSKRVILADANLDKVLSAYNKHRDKPIREQAENIIHLFTLTNLGAPAAFKYFDTTIDRKRYTSTKEVLDATLIHQSITGLYETRIDLSQLGGDGGGGSGSSEAAAKGGTLNIEDEYRLHETSKGPDVPLGSTWLSDFPQAWAETGGMGLAVRQAPLIIPLKATSTPVSIKQYPMSQEARLGIKPHIQRLLDQGILVPCQSPWNTPLLPVKKPGTNDYRPVQDLREVNKRVEDIHPTVPNPYNLLSGLPPSHQWYTVLDLKDAFFCLRLHPTSQSLFAFEWRDPEMGISGQLTWTRLPQGFKNSPTLFNEALHRDLADFRIQHPDLILLQYVDDLLLAATSELDCQQGTRALLQTLGDLGYRASAKKAQICQKQVKYLGYLLKEGQRWLTEARKETVMGQPTPKTPRQLREFLGTAGFCRLWIPGFAEMAAPLYPLTKPGTLFEWGPDQQKAYQEIKQALLTAPALGLPDLTKPFELFVDEKQGYAKGVLTQKLGPWRRPVAYLSKKLDPVAAGWPPCLRMVAAIAVLTKDAGKLTMGQPLVILAPHAVEALVKQPPDRWLSNARMTHYQALLLDTDRVQFGPIVALNPATLLPLPEEGLQHDCLDILAEAHGTRPDLTDQPLPDADHTWYTDGSSFLQEGQRKAGAAVTTETEVVWAKALPAGTSAQRAELIALTQALKMAEGKKLNVYTDSRYAFATAHIHGEIYRRRGWLTSEGKEIKNKDEILALLKALFLPKRLSIIHCPGHQKGNRAEARGNRMADQAAREVATRETPETSTLLAGKRTADGSEFEKRTADGSEFESPKKKAKVE

SEQ ID NO: 2471 - protein, 2094 aa, synthetic construct
MPAAKRVKLDGGDKKYSIGLDIGTNSVGWAVITDEYKVPSKKFKVLGNTDRHSIKKNLIGALLFDSGETAEATRLKRTARRRYTRRKNRICYLQEIFSNEMAKVDDSFFHRLEESFLVEEDKKHERHPIFGNIVDEVAYHEKYPTIYHLRKKLVDSTDKADLRLIYLALAHMIKFRGHFLIEGDLNPDNSDVDKLFIQLVQTYNQLFEENPINASGVDAKAILSARLSKSRRLENLIAQLPGEKKNGLFGNLIALSLGLTPNFKSNFDLAEDAKLQLSKDTYDDDLDNLLAQIGDQYADLFLAAKNLSDAILLSDILRVNTEITKAPLSASMIKRYDEHHQDLTLLKALVRQQLPEKYKEIFFDQSKNGYAGYIDGGASQEEFYKFIKPILEKMDGTEELLVKLNREDLLRKQRTFDNGSIPHQIHLGELHAILRRQEDFYPFLKDNREKIEKILTFRIPYYVGPLARGNSRFAWMTRKSEETITPWNFEEVVDKGASAQSFIERMTNFDKNLPNEKVLPKHSLLYEYFTVYNELTKVKYVTEGMRKPAFLSGEQKKAIVDLLFKTNRKVTVKQLKEDYFKKIECFDSVEISGVEDRFNASLGTYHDLLKIIKDKDFLDNEENEDILEDIVLTLTLFEDREMIEERLKTYAHLFDDKVMKQLKRRRYTGWGRLSRKLINGIRDKQSGKTILDFLKSDGFANRNFMQLIHDDSLTFKEDIQKAQVSGQGDSLHEHIANLAGSPAIKKGILQTVKVVDELVKVMGRHKPENIVIEMARENQTTQKGQKNSRERMKRIEEGIKELGSQILKEHPVENTQLQNEKLYLYYLQNGRDMYVDQELDINRLSDYDVDHIVPQSFLKDDSIDNKVLTRSDKARGKSDNVPSEEVVKKMKNYWRQLLNAKLITQRKFDNLTKAERGGLSELDKAGFIKRQLVETRQITKHVAQILDSRMNTKYDENDKLIREVKVITLKSKLVSDFRKDFQFYKVREINNYHHAHDAYLNAVVGTALIKKYPKLESEFVYGDYKVYDVRKMIAKSEQEIGKATAKYFFYSNIMNFFKTEITLANGEIRKRPLIETNGETGEIVWDKGRDFATVRKVLSMPQVNIVKKTEVQTGGFSKESILPKRNSDKLIARKKDWDPKKYGGFDSPTVAYSVLVVAKVEKGKSKKLKSVKELLGITIMERSSFEKNPIDFLEAKGYKEVKKDLIIKLPKYSLFELENGRKRMLASAGELQKGNELALPSKYVNFLYLASHYEKLKGSPEDNEQKQLFVEQHKHYLDEIIEQISEFSKRVILADANLDKVLSAYNKHRDKPIREQAENIIHLFTLTNLGAPAAFKYFDTTIDRKRYTSTKEVLDATLIHQSITGLYETRIDLSQLGGDGGGSSGSSGSSGGTLNIEDEYRLHETSKGPDVPLGSTWLSDFPQAWAETGGMGLAVRQAPLIIPLKATSTPVSIKQYPMSQEARLGIKPHIQRLLDQGILVPCQSPWNTPLLPVKKPGTNDYRPVQDLREVNKRVEDIHPTVPNPYNLLSGLPPSHQWYTVLDLKDAFFCLRLHPTSQSLFAFEWRDPEMGISGQLTWTRLPQGFKNSPTLFNEALHRDLADFRIQHPDLILLQYVDDLLLAATSELDCQQGTRALLQTLGDLGYRASAKKAQICQKQVKYLGYLLKEGQRWLTEARKETVMGQPTPKTPRQLREFLGTAGFCRLWIPGFAEMAAPLYPLTKPGTLFEWGPDQQKAYQEIKQALLTAPALGLPDLTKPFELFVDEKQGYAKGVLTQKLGPWRRPVAYLSKKLDPVAAGWPPCLRMVAAIAVLTKDAGKLTMGQPLVILAPHAVEALVKQPPDRWLSNARMTHYQALLLDTDRVQFGPIVALNPATLLPLPEEGLQHDCLDILAEAHGTRPDLTDQPLPDADHTWYTDGSSFLQEGQRKAGAAVTTETEVVWAKALPAGTSAQRAELIALTQALKMAEGKKLNVYTDSRYAFATAHIHGEIYRRRGWLTSEGKEIKNKDEILALLKALFLPKRLSIIHCPGHQKGNRAEARGNRMADQAAREVATRETPETSTLLAGKRTADGSEFEKRTADGSEFESPKKKAKVE

SEQ ID NO: 2472 - protein, 2096 aa, synthetic construct
MPAAKRVKLDGGDKKYSIGLDIGTNSVGWAVITDEYKVPSKKFKVLGNTDRHSIKKNLIGALLFDSGETAEATRLKRTARRRYTRRKNRICYLQEIFSNEMAKVDDSFFHRLEESFLVEEDKKHERHPIFGNIVDEVAYHEKYPTIYHLRKKLVDSTDKADLRLIYLALAHMIKFRGHFLIEGDLNPDNSDVDKLFIQLVQTYNQLFEENPINASGVDAKAILSARLSKSRRLENLIAQLPGEKKNGLFGNLIALSLGLTPNFKSNFDLAEDAKLQLSKDTYDDDLDNLLAQIGDQYADLFLAAKNLSDAILLSDILRVNTEITKAPLSASMIKRYDEHHQDLTLLKALVRQQLPEKYKEIFFDQSKNGYAGYIDGGASQEEFYKFIKPILEKMDGTEELLVKLNREDLLRKQRTFDNGSIPHQIHLGELHAILRRQEDFYPFLKDNREKIEKILTFRIPYYVGPLARGNSRFAWMTRKSEETITPWNFEEVVDKGASAQSFIERMTNFDKNLPNEKVLPKHSLLYEYFTVYNELTKVKYVTEGMRKPAFLSGEQKKAIVDLLFKTNRKVTVKQLKEDYFKKIECFDSVEISGVEDRFNASLGTYHDLLKIIKDKDFLDNEENEDILEDIVLTLTLFEDREMIEERLKTYAHLFDDKVMKQLKRRRYTGWGRLSRKLINGIRDKQSGKTILDFLKSDGFANRNFMQLIHDDSLTFKEDIQKAQVSGQGDSLHEHIANLAGSPAIKKGILQTVKVVDELVKVMGRHKPENIVIEMARENQTTQKGQKNSRERMKRIEEGIKELGSQILKEHPVENTQLQNEKLYLYYLQNGRDMYVDQELDINRLSDYDVDHIVPQSFLKDDSIDNKVLTRSDKARGKSDNVPSEEVVKKMKNYWRQLLNAKLITQRKFDNLTKAERGGLSELDKAGFIKRQLVETRQITKHVAQILDSRMNTKYDENDKLIREVKVITLKSKLVSDFRKDFQFYKVREINNYHHAHDAYLNAVVGTALIKKYPKLESEFVYGDYKVYDVRKMIAKSEQEIGKATAKYFFYSNIMNFFKTEITLANGEIRKRPLIETNGETGEIVWDKGRDFATVRKVLSMPQVNIVKKTEVQTGGFSKESILPKRNSDKLIARKKDWDPKKYGGFDSPTVAYSVLVVAKVEKGKSKKLKSVKELLGITIMERSSFEKNPIDFLEAKGYKEVKKDLIIKLPKYSLFELENGRKRMLASAGELQKGNELALPSKYVNFLYLASHYEKLKGSPEDNEQKQLFVEQHKHYLDEIIEQISEFSKRVILADANLDKVLSAYNKHRDKPIREQAENIIHLFTLTNLGAPAAFKYFDTTIDRKRYTSTKEVLDATLIHQSITGLYETRIDLSQLGGDGGGGGPAPEAAAKGGTLNIEDEYRLHETSKGPDVPLGSTWLSDFPQAWAETGGMGLAVRQAPLIIPLKATSTPVSIKQYPMSQEARLGIKPHIQRLLDQGILVPCQSPWNTPLLPVKKPGTNDYRPVQDLREVNKRVEDIHPTVPNPYNLLSGLPPSHQWYTVLDLKDAFFCLRLHPTSQSLFAFEWRDPEMGISGQLTWTRLPQGFKNSPTLFNEALHRDLADFRIQHPDLILLQYVDDLLLAATSELDCQQGTRALLQTLGDLGYRASAKKAQICQKQVKYLGYLLKEGQRWLTEARKETVMGQPTPKTPRQLREFLGTAGFCRLWIPGFAEMAAPLYPLTKPGTLFEWGPDQQKAYQEIKQALLTAPALGLPDLTKPFELFVDEKQGYAKGVLTQKLGPWRRPVAYLSKKLDPVAAGWPPCLRMVAAIAVLTKDAGKLTMGQPLVILAPHAVEALVKQPPDRWLSNARMTHYQALLLDTDRVQFGPIVALNPATLLPLPEEGLQHDCLDILAEAHGTRPDLTDQPLPDADHTWYTDGSSFLQEGQRKAGAAVTTETEVVWAKALPAGTSAQRAELIALTQALKMAEGKKLNVYTDSRYAFATAHIHGEIYRRRGWLTSEGKEIKNKDEILALLKALFLPKRLSIIHCPGHQKGNRAEARGNRMADQAAREVATRETPETSTLLAGKRTADGSEFEKRTADGSEFESPKKKAKVE

SEQ ID NO: 2473 - protein, 2096 aa, synthetic construct
MPAAKRVKLDGGDKKYSIGLDIGTNSVGWAVITDEYKVPSKKFKVLGNTDRHSIKKNLIGALLFDSGETAEATRLKRTARRRYTRRKNRICYLQEIFSNEMAKVDDSFFHRLEESFLVEEDKKHERHPIFGNIVDEVAYHEKYPTIYHLRKKLVDSTDKADLRLIYLALAHMIKFRGHFLIEGDLNPDNSDVDKLFIQLVQTYNQLFEENPINASGVDAKAILSARLSKSRRLENLIAQLPGEKKNGLFGNLIALSLGLTPNFKSNFDLAEDAKLQLSKDTYDDDLDNLLAQIGDQYADLFLAAKNLSDAILLSDILRVNTEITKAPLSASMIKRYDEHHQDLTLLKALVRQQLPEKYKEIFFDQSKNGYAGYIDGGASQEEFYKFIKPILEKMDGTEELLVKLNREDLLRKQRTFDNGSIPHQIHLGELHAILRRQEDFYPFLKDNREKIEKILTFRIPYYVGPLARGNSRFAWMTRKSEETITPWNFEEVVDKGASAQSFIERMTNFDKNLPNEKVLPKHSLLYEYFTVYNELTKVKYVTEGMRKPAFLSGEQKKAIVDLLFKTNRKVTVKQLKEDYFKKIECFDSVEISGVEDRFNASLGTYHDLLKIIKDKDFLDNEENEDILEDIVLTLTLFEDREMIEERLKTYAHLFDDKVMKQLKRRRYTGWGRLSRKLINGIRDKQSGKTILDFLKSDGFANRNFMQLIHDDSLTFKEDIQKAQVSGQGDSLHEHIANLAGSPAIKKGILQTVKVVDELVKVMGRHKPENIVIEMARENQTTQKGQKNSRERMKRIEEGIKELGSQILKEHPVENTQLQNEKLYLYYLQNGRDMYVDQELDINRLSDYDVDHIVPQSFLKDDSIDNKVLTRSDKARGKSDNVPSEEVVKKMKNYWRQLLNAKLITQRKFDNLTKAERGGLSELDKAGFIKRQLVETRQITKHVAQILDSRMNTKYDENDKLIREVKVITLKSKLVSDFRKDFQFYKVREINNYHHAHDAYLNAVVGTALIKKYPKLESEFVYGDYKVYDVRKMIAKSEQEIGKATAKYFFYSNIMNFFKTEITLANGEIRKRPLIETNGETGEIVWDKGRDFATVRKVLSMPQVNIVKKTEVQTGGFSKESILPKRNSDKLIARKKDWDPKKYGGFDSPTVAYSVLVVAKVEKGKSKKLKSVKELLGITIMERSSFEKNPIDFLEAKGYKEVKKDLIIKLPKYSLFELENGRKRMLASAGELQKGNELALPSKYVNFLYLASHYEKLKGSPEDNEQKQLFVEQHKHYLDEIIEQISEFSKRVILADANLDKVLSAYNKHRDKPIREQAENIIHLFTLTNLGAPAAFKYFDTTIDRKRYTSTKEVLDATLIHQSITGLYETRIDLSQLGGDGGEAAAKPAPGSSGGTLNIEDEYRLHETSKGPDVPLGSTWLSDFPQAWAETGGMGLAVRQAPLIIPLKATSTPVSIKQYPMSQEARLGIKPHIQRLLDQGILVPCQSPWNTPLLPVKKPGTNDYRPVQDLREVNKRVEDIHPTVPNPYNLLSGLPPSHQWYTVLDLKDAFFCLRLHPTSQSLFAFEWRDPEMGISGQLTWTRLPQGFKNSPTLFNEALHRDLADFRIQHPDLILLQYVDDLLLAATSELDCQQGTRALLQTLGDLGYRASAKKAQICQKQVKYLGYLLKEGQRWLTEARKETVMGQPTPKTPRQLREFLGTAGFCRLWIPGFAEMAAPLYPLTKPGTLFEWGPDQQKAYQEIKQALLTAPALGLPDLTKPFELFVDEKQGYAKGVLTQKLGPWRRPVAYLSKKLDPVAAGWPPCLRMVAAIAVLTKDAGKLTMGQPLVILAPHAVEALVKQPPDRWLSNARMTHYQALLLDTDRVQFGPIVALNPATLLPLPEEGLQHDCLDILAEAHGTRPDLTDQPLPDADHTWYTDGSSFLQEGQRKAGAAVTTETEVVWAKALPAGTSAQRAELIALTQALKMAEGKKLNVYTDSRYAFATAHIHGEIYRRRGWLTSEGKEIKNKDEILALLKALFLPKRLSIIHCPGHQKGNRAEARGNRMADQAAREVATRETPETSTLLAGKRTADGSEFEKRTADGSEFESPKKKAKVE

SEQ ID NO: 2474 - protein, 2096 aa, synthetic construct
MPAAKRVKLDGGDKKYSIGLDIGTNSVGWAVITDEYKVPSKKFKVLGNTDRHSIKKNLIGALLFDSGETAEATRLKRTARRRYTRRKNRICYLQEIFSNEMAKVDDSFFHRLEESFLVEEDKKHERHPIFGNIVDEVAYHEKYPTIYHLRKKLVDSTDKADLRLIYLALAHMIKFRGHFLIEGDLNPDNSDVDKLFIQLVQTYNQLFEENPINASGVDAKAILSARLSKSRRLENLIAQLPGEKKNGLFGNLIALSLGLTPNFKSNFDLAEDAKLQLSKDTYDDDLDNLLAQIGDQYADLFLAAKNLSDAILLSDILRVNTEITKAPLSASMIKRYDEHHQDLTLLKALVRQQLPEKYKEIFFDQSKNGYAGYIDGGASQEEFYKFIKPILEKMDGTEELLVKLNREDLLRKQRTFDNGSIPHQIHLGELHAILRRQEDFYPFLKDNREKIEKILTFRIPYYVGPLARGNSRFAWMTRKSEETITPWNFEEVVDKGASAQSFIERMTNFDKNLPNEKVLPKHSLLYEYFTVYNELTKVKYVTEGMRKPAFLSGEQKKAIVDLLFKTNRKVTVKQLKEDYFKKIECFDSVEISGVEDRFNASLGTYHDLLKIIKDKDFLDNEENEDILEDIVLTLTLFEDREMIEERLKTYAHLFDDKVMKQLKRRRYTGWGRLSRKLINGIRDKQSGKTILDFLKSDGFANRNFMQLIHDDSLTFKEDIQKAQVSGQGDSLHEHIANLAGSPAIKKGILQTVKVVDELVKVMGRHKPENIVIEMARENQTTQKGQKNSRERMKRIEEGIKELGSQILKEHPVENTQLQNEKLYLYYLQNGRDMYVDQELDINRLSDYDVDHIVPQSFLKDDSIDNKVLTRSDKARGKSDNVPSEEVVKKMKNYWRQLLNAKLITQRKFDNLTKAERGGLSELDKAGFIKRQLVETRQITKHVAQILDSRMNTKYDENDKLIREVKVITLKSKLVSDFRKDFQFYKVREINNYHHAHDAYLNAVVGTALIKKYPKLESEFVYGDYKVYDVRKMIAKSEQEIGKATAKYFFYSNIMNFFKTEITLANGEIRKRPLIETNGETGEIVWDKGRDFATVRKVLSMPQVNIVKKTEVQTGGFSKESILPKRNSDKLIARKKDWDPKKYGGFDSPTVAYSVLVVAKVEKGKSKKLKSVKELLGITIMERSSFEKNPIDFLEAKGYKEVKKDLIIKLPKYSLFELENGRKRMLASAGELQKGNELALPSKYVNFLYLASHYEKLKGSPEDNEQKQLFVEQHKHYLDEIIEQISEFSKRVILADANLDKVLSAYNKHRDKPIREQAENIIHLFTLTNLGAPAAFKYFDTTIDRKRYTSTKEVLDATLIHQSITGLYETRIDLSQLGGDGGEAAAKGGSPAPGGTLNIEDEYRLHETSKGPDVPLGSTWLSDFPQAWAETGGMGLAVRQAPLIIPLKATSTPVSIKQYPMSQEARLGIKPHIQRLLDQGILVPCQSPWNTPLLPVKKPGTNDYRPVQDLREVNKRVEDIHPTVPNPYNLLSGLPPSHQWYTVLDLKDAFFCLRLHPTSQSLFAFEWRDPEMGISGQLTWTRLPQGFKNSPTLFNEALHRDLADFRIQHPDLILLQYVDDLLLAATSELDCQQGTRALLQTLGDLGYRASAKKAQICQKQVKYLGYLLKEGQRWLTEARKETVMGQPTPKTPRQLREFLGTAGFCRLWIPGFAEMAAPLYPLTKPGTLFEWGPDQQKAYQEIKQALLTAPALGLPDLTKPFELFVDEKQGYAKGVLTQKLGPWRRPVAYLSKKLDPVAAGWPPCLRMVAAIAVLTKDAGKLTMGQPLVILAPHAVEALVKQPPDRWLSNARMTHYQALLLDTDRVQFGPIVALNPATLLPLPEEGLQHDCLDILAEAHGTRPDLTDQPLPDADHTWYTDGSSFLQEGQRKAGAAVTTETEVVWAKALPAGTSAQRAELIALTQALKMAEGKKLNVYTDSRYAFATAHIHGEIYRRRGWLTSEGKEIKNKDEILALLKALFLPKRLSIIHCPGHQKGNRAEARGNRMADQAAREVATRETPETSTLLAGKRTADGSEFEKRTADGSEFESPKKKAKVE

SEQ ID NO: 2475 - protein, 2093 aa, synthetic construct
MPAAKRVKLDGGDKKYSIGLDIGTNSVGWAVITDEYKVPSKKFKVLGNTDRHSIKKNLIGALLFDSGETAEATRLKRTARRRYTRRKNRICYLQEIFSNEMAKVDDSFFHRLEESFLVEEDKKHERHPIFGNIVDEVAYHEKYPTIYHLRKKLVDSTDKADLRLIYLALAHMIKFRGHFLIEGDLNPDNSDVDKLFIQLVQTYNQLFEENPINASGVDAKAILSARLSKSRRLENLIAQLPGEKKNGLFGNLIALSLGLTPNFKSNFDLAEDAKLQLSKDTYDDDLDNLLAQIGDQYADLFLAAKNLSDAILLSDILRVNTEITKAPLSASMIKRYDEHHQDLTLLKALVRQQLPEKYKEIFFDQSKNGYAGYIDGGASQEEFYKFIKPILEKMDGTEELLVKLNREDLLRKQRTFDNGSIPHQIHLGELHAILRRQEDFYPFLKDNREKIEKILTFRIPYYVGPLARGNSRFAWMTRKSEETITPWNFEEVVDKGASAQSFIERMTNFDKNLPNEKVLPKHSLLYEYFTVYNELTKVKYVTEGMRKPAFLSGEQKKAIVDLLFKTNRKVTVKQLKEDYFKKIECFDSVEISGVEDRFNASLGTYHDLLKIIKDKDFLDNEENEDILEDIVLTLTLFEDREMIEERLKTYAHLFDDKVMKQLKRRRYTGWGRLSRKLINGIRDKQSGKTILDFLKSDGFANRNFMQLIHDDSLTFKEDIQKAQVSGQGDSLHEHIANLAGSPAIKKGILQTVKVVDELVKVMGRHKPENIVIEMARENQTTQKGQKNSRERMKRIEEGIKELGSQILKEHPVENTQLQNEKLYLYYLQNGRDMYVDQELDINRLSDYDVDHIVPQSFLKDDSIDNKVLTRSDKARGKSDNVPSEEVVKKMKNYWRQLLNAKLITQRKFDNLTKAERGGLSELDKAGFIKRQLVETRQITKHVAQILDSRMNTKYDENDKLIREVKVITLKSKLVSDFRKDFQFYKVREINNYHHAHDAYLNAVVGTALIKKYPKLESEFVYGDYKVYDVRKMIAKSEQEIGKATAKYFFYSNIMNFFKTEITLANGEIRKRPLIETNGETGEIVWDKGRDFATVRKVLSMPQVNIVKKTEVQTGGFSKESILPKRNSDKLIARKKDWDPKKYGGFDSPTVAYSVLVVAKVEKGKSKKLKSVKELLGITIMERSSFEKNPIDFLEAKGYKEVKKDLIIKLPKYSLFELENGRKRMLASAGELQKGNELALPSKYVNFLYLASHYEKLKGSPEDNEQKQLFVEQHKHYLDEIIEQISEFSKRVILADANLDKVLSAYNKHRDKPIREQAENIIHLFTLTNLGAPAAFKYFDTTIDRKRYTSTKEVLDATLIHQSITGLYETRIDLSQLGGDGGGSSEAAAKGGTLNIEDEYRLHETSKGPDVPLGSTWLSDFPQAWAETGGMGLAVRQAPLIIPLKATSTPVSIKQYPMSQEARLGIKPHIQRLLDQGILVPCQSPWNTPLLPVKKPGTNDYRPVQDLREVNKRVEDIHPTVPNPYNLLSGLPPSHQWYTVLDLKDAFFCLRLHPTSQSLFAFEWRDPEMGISGQLTWTRLPQGFKNSPTLFNEALHRDLADFRIQHPDLILLQYVDDLLLAATSELDCQQGTRALLQTLGDLGYRASAKKAQICQKQVKYLGYLLKEGQRWLTEARKETVMGQPTPKTPRQLREFLGTAGFCRLWIPGFAEMAAPLYPLTKPGTLFEWGPDQQKAYQEIKQALLTAPALGLPDLTKPFELFVDEKQGYAKGVLTQKLGPWRRPVAYLSKKLDPVAAGWPPCLRMVAAIAVLTKDAGKLTMGQPLVILAPHAVEALVKQPPDRWLSNARMTHYQALLLDTDRVQFGPIVALNPATLLPLPEEGLQHDCLDILAEAHGTRPDLTDQPLPDADHTWYTDGSSFLQEGQRKAGAAVTTETEVVWAKALPAGTSAQRAELIALTQALKMAEGKKLNVYTDSRYAFATAHIHGEIYRRRGWLTSEGKEIKNKDEILALLKALFLPKRLSIIHCPGHQKGNRAEARGNRMADQAAREVATRETPETSTLLAGKRTADGSEFEKRTADGSEFESPKKKAKVE

SEQ ID NO: 2476 - protein, 2094 aa, synthetic construct
MPAAKRVKLDGGDKKYSIGLDIGTNSVGWAVITDEYKVPSKKFKVLGNTDRHSIKKNLIGALLFDSGETAEATRLKRTARRRYTRRKNRICYLQEIFSNEMAKVDDSFFHRLEESFLVEEDKKHERHPIFGNIVDEVAYHEKYPTIYHLRKKLVDSTDKADLRLIYLALAHMIKFRGHFLIEGDLNPDNSDVDKLFIQLVQTYNQLFEENPINASGVDAKAILSARLSKSRRLENLIAQLPGEKKNGLFGNLIALSLGLTPNFKSNFDLAEDAKLQLSKDTYDDDLDNLLAQIGDQYADLFLAAKNLSDAILLSDILRVNTEITKAPLSASMIKRYDEHHQDLTLLKALVRQQLPEKYKEIFFDQSKNGYAGYIDGGASQEEFYKFIKPILEKMDGTEELLVKLNREDLLRKQRTFDNGSIPHQIHLGELHAILRRQEDFYPFLKDNREKIEKILTFRIPYYVGPLARGNSRFAWMTRKSEETITPWNFEEVVDKGASAQSFIERMTNFDKNLPNEKVLPKHSLLYEYFTVYNELTKVKYVTEGMRKPAFLSGEQKKAIVDLLFKTNRKVTVKQLKEDYFKKIECFDSVEISGVEDRFNASLGTYHDLLKIIKDKDFLDNEENEDILEDIVLTLTLFEDREMIEERLKTYAHLFDDKVMKQLKRRRYTGWGRLSRKLINGIRDKQSGKTILDFLKSDGFANRNFMQLIHDDSLTFKEDIQKAQVSGQGDSLHEHIANLAGSPAIKKGILQTVKVVDELVKVMGRHKPENIVIEMARENQTTQKGQKNSRERMKRIEEGIKELGSQILKEHPVENTQLQNEKLYLYYLQNGRDMYVDQELDINRLSDYDVDHIVPQSFLKDDSIDNKVLTRSDKARGKSDNVPSEEVVKKMKNYWRQLLNAKLITQRKFDNLTKAERGGLSELDKAGFIKRQLVETRQITKHVAQILDSRMNTKYDENDKLIREVKVITLKSKLVSDFRKDFQFYKVREINNYHHAHDAYLNAVVGTALIKKYPKLESEFVYGDYKVYDVRKMIAKSEQEIGKATAKYFFYSNIMNFFKTEITLANGEIRKRPLIETNGETGEIVWDKGRDFATVRKVLSMPQVNIVKKTEVQTGGFSKESILPKRNSDKLIARKKDWDPKKYGGFDSPTVAYSVLVVAKVEKGKSKKLKSVKELLGITIMERSSFEKNPIDFLEAKGYKEVKKDLIIKLPKYSLFELENGRKRMLASAGELQKGNELALPSKYVNFLYLASHYEKLKGSPEDNEQKQLFVEQHKHYLDEIIEQISEFSKRVILADANLDKVLSAYNKHRDKPIREQAENIIHLFTLTNLGAPAAFKYFDTTIDRKRYTSTKEVLDATLIHQSITGLYETRIDLSQLGGDGGGGSPAPGGGGGTLNIEDEYRLHETSKGPDVPLGSTWLSDFPQAWAETGGMGLAVRQAPLIIPLKATSTPVSIKQYPMSQEARLGIKPHIQRLLDQGILVPCQSPWNTPLLPVKKPGTNDYRPVQDLREVNKRVEDIHPTVPNPYNLLSGLPPSHQWYTVLDLKDAFFCLRLHPTSQSLFAFEWRDPEMGISGQLTWTRLPQGFKNSPTLFNEALHRDLADFRIQHPDLILLQYVDDLLLAATSELDCQQGTRALLQTLGDLGYRASAKKAQICQKQVKYLGYLLKEGQRWLTEARKETVMGQPTPKTPRQLREFLGTAGFCRLWIPGFAEMAAPLYPLTKPGTLFEWGPDQQKAYQEIKQALLTAPALGLPDLTKPFELFVDEKQGYAKGVLTQKLGPWRRPVAYLSKKLDPVAAGWPPCLRMVAAIAVLTKDAGKLTMGQPLVILAPHAVEALVKQPPDRWLSNARMTHYQALLLDTDRVQFGPIVALNPATLLPLPEEGLQHDCLDILAEAHGTRPDLTDQPLPDADHTWYTDGSSFLQEGQRKAGAAVTTETEVVWAKALPAGTSAQRAELIALTQALKMAEGKKLNVYTDSRYAFATAHIHGEIYRRRGWLTSEGKEIKNKDEILALLKALFLPKRLSIIHCPGHQKGNRAEARGNRMADQAAREVATRETPETSTLLAGKRTADGSEFEKRTADGSEFESPKKKAKVE

SEQ ID NO: 2477 - protein, 2091 aa, synthetic construct
MPAAKRVKLDGGDKKYSIGLDIGTNSVGWAVITDEYKVPSKKFKVLGNTDRHSIKKNLIGALLFDSGETAEATRLKRTARRRYTRRKNRICYLQEIFSNEMAKVDDSFFHRLEESFLVEEDKKHERHPIFGNIVDEVAYHEKYPTIYHLRKKLVDSTDKADLRLIYLALAHMIKFRGHFLIEGDLNPDNSDVDKLFIQLVQTYNQLFEENPINASGVDAKAILSARLSKSRRLENLIAQLPGEKKNGLFGNLIALSLGLTPNFKSNFDLAEDAKLQLSKDTYDDDLDNLLAQIGDQYADLFLAAKNLSDAILLSDILRVNTEITKAPLSASMIKRYDEHHQDLTLLKALVRQQLPEKYKEIFFDQSKNGYAGYIDGGASQEEFYKFIKPILEKMDGTEELLVKLNREDLLRKQRTFDNGSIPHQIHLGELHAILRRQEDFYPFLKDNREKIEKILTFRIPYYVGPLARGNSRFAWMTRKSEETITPWNFEEVVDKGASAQSFIERMTNFDKNLPNEKVLPKHSLLYEYFTVYNELTKVKYVTEGMRKPAFLSGEQKKAIVDLLFKTNRKVTVKQLKEDYFKKIECFDSVEISGVEDRFNASLGTYHDLLKIIKDKDFLDNEENEDILEDIVLTLTLFEDREMIEERLKTYAHLFDDKVMKQLKRRRYTGWGRLSRKLINGIRDKQSGKTILDFLKSDGFANRNFMQLIHDDSLTFKEDIQKAQVSGQGDSLHEHIANLAGSPAIKKGILQTVKVVDELVKVMGRHKPENIVIEMARENQTTQKGQKNSRERMKRIEEGIKELGSQILKEHPVENTQLQNEKLYLYYLQNGRDMYVDQELDINRLSDYDVDHIVPQSFLKDDSIDNKVLTRSDKARGKSDNVPSEEVVKKMKNYWRQLLNAKLITQRKFDNLTKAERGGLSELDKAGFIKRQLVETRQITKHVAQILDSRMNTKYDENDKLIREVKVITLKSKLVSDFRKDFQFYKVREINNYHHAHDAYLNAVVGTALIKKYPKLESEFVYGDYKVYDVRKMIAKSEQEIGKATAKYFFYSNIMNFFKTEITLANGEIRKRPLIETNGETGEIVWDKGRDFATVRKVLSMPQVNIVKKTEVQTGGFSKESILPKRNSDKLIARKKDWDPKKYGGFDSPTVAYSVLVVAKVEKGKSKKLKSVKELLGITIMERSSFEKNPIDFLEAKGYKEVKKDLIIKLPKYSLFELENGRKRMLASAGELQKGNELALPSKYVNFLYLASHYEKLKGSPEDNEQKQLFVEQHKHYLDEIIEQISEFSKRVILADANLDKVLSAYNKHRDKPIREQAENIIHLFTLTNLGAPAAFKYFDTTIDRKRYTSTKEVLDATLIHQSITGLYETRIDLSQLGGDGGGSSPAPGGTLNIEDEYRLHETSKGPDVPLGSTWLSDFPQAWAETGGMGLAVRQAPLIIPLKATSTPVSIKQYPMSQEARLGIKPHIQRLLDQGILVPCQSPWNTPLLPVKKPGTNDYRPVQDLREVNKRVEDIHPTVPNPYNLLSGLPPSHQWYTVLDLKDAFFCLRLHPTSQSLFAFEWRDPEMGISGQLTWTRLPQGFKNSPTLFNEALHRDLADFRIQHPDLILLQYVDDLLLAATSELDCQQGTRALLQTLGDLGYRASAKKAQICQKQVKYLGYLLKEGQRWLTEARKETVMGQPTPKTPRQLREFLGTAGFCRLWIPGFAEMAAPLYPLTKPGTLFEWGPDQQKAYQEIKQALLTAPALGLPDLTKPFELFVDEKQGYAKGVLTQKLGPWRRPVAYLSKKLDPVAAGWPPCLRMVAAIAVLTKDAGKLTMGQPLVILAPHAVEALVKQPPDRWLSNARMTHYQALLLDTDRVQFGPIVALNPATLLPLPEEGLQHDCLDILAEAHGTRPDLTDQPLPDADHTWYTDGSSFLQEGQRKAGAAVTTETEVVWAKALPAGTSAQRAELIALTQALKMAEGKKLNVYTDSRYAFATAHIHGEIYRRRGWLTSEGKEIKNKDEILALLKALFLPKRLSIIHCPGHQKGNRAEARGNRMADQAAREVATRETPETSTLLAGKRTADGSEFEKRTADGSEFESPKKKAKVE

SEQ ID NO: 2478 - protein, 2091 aa, synthetic construct
MPAAKRVKLDGGDKKYSIGLDIGTNSVGWAVITDEYKVPSKKFKVLGNTDRHSIKKNLIGALLFDSGETAEATRLKRTARRRYTRRKNRICYLQEIFSNEMAKVDDSFFHRLEESFLVEEDKKHERHPIFGNIVDEVAYHEKYPTIYHLRKKLVDSTDKADLRLIYLALAHMIKFRGHFLIEGDLNPDNSDVDKLFIQLVQTYNQLFEENPINASGVDAKAILSARLSKSRRLENLIAQLPGEKKNGLFGNLIALSLGLTPNFKSNFDLAEDAKLQLSKDTYDDDLDNLLAQIGDQYADLFLAAKNLSDAILLSDILRVNTEITKAPLSASMIKRYDEHHQDLTLLKALVRQQLPEKYKEIFFDQSKNGYAGYIDGGASQEEFYKFIKPILEKMDGTEELLVKLNREDLLRKQRTFDNGSIPHQIHLGELHAILRRQEDFYPFLKDNREKIEKILTFRIPYYVGPLARGNSRFAWMTRKSEETITPWNFEEVVDKGASAQSFIERMTNFDKNLPNEKVLPKHSLLYEYFTVYNELTKVKYVTEGMRKPAFLSGEQKKAIVDLLFKTNRKVTVKQLKEDYFKKIECFDSVEISGVEDRFNASLGTYHDLLKIIKDKDFLDNEENEDILEDIVLTLTLFEDREMIEERLKTYAHLFDDKVMKQLKRRRYTGWGRLSRKLINGIRDKQSGKTILDFLKSDGFANRNFMQLIHDDSLTFKEDIQKAQVSGQGDSLHEHIANLAGSPAIKKGILQTVKVVDELVKVMGRHKPENIVIEMARENQTTQKGQKNSRERMKRIEEGIKELGSQILKEHPVENTQLQNEKLYLYYLQNGRDMYVDQELDINRLSDYDVDHIVPQSFLKDDSIDNKVLTRSDKARGKSDNVPSEEVVKKMKNYWRQLLNAKLITQRKFDNLTKAERGGLSELDKAGFIKRQLVETRQITKHVAQILDSRMNTKYDENDKLIREVKVITLKSKLVSDFRKDFQFYKVREINNYHHAHDAYLNAVVGTALIKKYPKLESEFVYGDYKVYDVRKMIAKSEQEIGKATAKYFFYSNIMNFFKTEITLANGEIRKRPLIETNGETGEIVWDKGRDFATVRKVLSMPQVNIVKKTEVQTGGFSKESILPKRNSDKLIARKKDWDPKKYGGFDSPTVAYSVLVVAKVEKGKSKKLKSVKELLGITIMERSSFEKNPIDFLEAKGYKEVKKDLIIKLPKYSLFELENGRKRMLASAGELQKGNELALPSKYVNFLYLASHYEKLKGSPEDNEQKQLFVEQHKHYLDEIIEQISEFSKRVILADANLDKVLSAYNKHRDKPIREQAENIIHLFTLTNLGAPAAFKYFDTTIDRKRYTSTKEVLDATLIHQSITGLYETRIDLSQLGGDGGGGSGGGGGTLNIEDEYRLHETSKGPDVPLGSTWLSDFPQAWAETGGMGLAVRQAPLIIPLKATSTPVSIKQYPMSQEARLGIKPHIQRLLDQGILVPCQSPWNTPLLPVKKPGTNDYRPVQDLREVNKRVEDIHPTVPNPYNLLSGLPPSHQWYTVLDLKDAFFCLRLHPTSQSLFAFEWRDPEMGISGQLTWTRLPQGFKNSPTLFNEALHRDLADFRIQHPDLILLQYVDDLLLAATSELDCQQGTRALLQTLGDLGYRASAKKAQICQKQVKYLGYLLKEGQRWLTEARKETVMGQPTPKTPRQLREFLGTAGFCRLWIPGFAEMAAPLYPLTKPGTLFEWGPDQQKAYQEIKQALLTAPALGLPDLTKPFELFVDEKQGYAKGVLTQKLGPWRRPVAYLSKKLDPVAAGWPPCLRMVAAIAVLTKDAGKLTMGQPLVILAPHAVEALVKQPPDRWLSNARMTHYQALLLDTDRVQFGPIVALNPATLLPLPEEGLQHDCLDILAEAHGTRPDLTDQPLPDADHTWYTDGSSFLQEGQRKAGAAVTTETEVVWAKALPAGTSAQRAELIALTQALKMAEGKKLNVYTDSRYAFATAHIHGEIYRRRGWLTSEGKEIKNKDEILALLKALFLPKRLSIIHCPGHQKGNRAEARGNRMADQAAREVATRETPETSTLLAGKRTADGSEFEKRTADGSEFESPKKKAKVE

SEQ ID NO: 2479 - protein, 2094 aa, synthetic construct
MPAAKRVKLDGGDKKYSIGLDIGTNSVGWAVITDEYKVPSKKFKVLGNTDRHSIKKNLIGALLFDSGETAEATRLKRTARRRYTRRKNRICYLQEIFSNEMAKVDDSFFHRLEESFLVEEDKKHERHPIFGNIVDEVAYHEKYPTIYHLRKKLVDSTDKADLRLIYLALAHMIKFRGHFLIEGDLNPDNSDVDKLFIQLVQTYNQLFEENPINASGVDAKAILSARLSKSRRLENLIAQLPGEKKNGLFGNLIALSLGLTPNFKSNFDLAEDAKLQLSKDTYDDDLDNLLAQIGDQYADLFLAAKNLSDAILLSDILRVNTEITKAPLSASMIKRYDEHHQDLTLLKALVRQQLPEKYKEIFFDQSKNGYAGYIDGGASQEEFYKFIKPILEKMDGTEELLVKLNREDLLRKQRTFDNGSIPHQIHLGELHAILRRQEDFYPFLKDNREKIEKILTFRIPYYVGPLARGNSRFAWMTRKSEETITPWNFEEVVDKGASAQSFIERMTNFDKNLPNEKVLPKHSLLYEYFTVYNELTKVKYVTEGMRKPAFLSGEQKKAIVDLLFKTNRKVTVKQLKEDYFKKIECFDSVEISGVEDRFNASLGTYHDLLKIIKDKDFLDNEENEDILEDIVLTLTLFEDREMIEERLKTYAHLFDDKVMKQLKRRRYTGWGRLSRKLINGIRDKQSGKTILDFLKSDGFANRNFMQLIHDDSLTFKEDIQKAQVSGQGDSLHEHIANLAGSPAIKKGILQTVKVVDELVKVMGRHKPENIVIEMARENQTTQKGQKNSRERMKRIEEGIKELGSQILKEHPVENTQLQNEKLYLYYLQNGRDMYVDQELDINRLSDYDVDHIVPQSFLKDDSIDNKVLTRSDKARGKSDNVPSEEVVKKMKNYWRQLLNAKLITQRKFDNLTKAERGGLSELDKAGFIKRQLVETRQITKHVAQILDSRMNTKYDENDKLIREVKVITLKSKLVSDFRKDFQFYKVREINNYHHAHDAYLNAVVGTALIKKYPKLESEFVYGDYKVYDVRKMIAKSEQEIGKATAKYFFYSNIMNFFKTEITLANGEIRKRPLIETNGETGEIVWDKGRDFATVRKVLSMPQVNIVKKTEVQTGGFSKESILPKRNSDKLIARKKDWDPKKYGGFDSPTVAYSVLVVAKVEKGKSKKLKSVKELLGITIMERSSFEKNPIDFLEAKGYKEVKKDLIIKLPKYSLFELENGRKRMLASAGELQKGNELALPSKYVNFLYLASHYEKLKGSPEDNEQKQLFVEQHKHYLDEIIEQISEFSKRVILADANLDKVLSAYNKHRDKPIREQAENIIHLFTLTNLGAPAAFKYFDTTIDRKRYTSTKEVLDATLIHQSITGLYETRIDLSQLGGDGGGGSGGGGSSGGTLNIEDEYRLHETSKGPDVPLGSTWLSDFPQAWAETGGMGLAVRQAPLIIPLKATSTPVSIKQYPMSQEARLGIKPHIQRLLDQGILVPCQSPWNTPLLPVKKPGTNDYRPVQDLREVNKRVEDIHPTVPNPYNLLSGLPPSHQWYTVLDLKDAFFCLRLHPTSQSLFAFEWRDPEMGISGQLTWTRLPQGFKNSPTLFNEALHRDLADFRIQHPDLILLQYVDDLLLAATSELDCQQGTRALLQTLGDLGYRASAKKAQICQKQVKYLGYLLKEGQRWLTEARKETVMGQPTPKTPRQLREFLGTAGFCRLWIPGFAEMAAPLYPLTKPGTLFEWGPDQQKAYQEIKQALLTAPALGLPDLTKPFELFVDEKQGYAKGVLTQKLGPWRRPVAYLSKKLDPVAAGWPPCLRMVAAIAVLTKDAGKLTMGQPLVILAPHAVEALVKQPPDRWLSNARMTHYQALLLDTDRVQFGPIVALNPATLLPLPEEGLQHDCLDILAEAHGTRPDLTDQPLPDADHTWYTDGSSFLQEGQRKAGAAVTTETEVVWAKALPAGTSAQRAELIALTQALKMAEGKKLNVYTDSRYAFATAHIHGEIYRRRGWLTSEGKEIKNKDEILALLKALFLPKRLSIIHCPGHQKGNRAEARGNRMADQAAREVATRETPETSTLLAGKRTADGSEFEKRTADGSEFESPKKKAKVE

SEQ ID NO: 2480 - protein, 2096 aa, synthetic construct
MPAAKRVKLDGGDKKYSIGLDIGTNSVGWAVITDEYKVPSKKFKVLGNTDRHSIKKNLIGALLFDSGETAEATRLKRTARRRYTRRKNRICYLQEIFSNEMAKVDDSFFHRLEESFLVEEDKKHERHPIFGNIVDEVAYHEKYPTIYHLRKKLVDSTDKADLRLIYLALAHMIKFRGHFLIEGDLNPDNSDVDKLFIQLVQTYNQLFEENPINASGVDAKAILSARLSKSRRLENLIAQLPGEKKNGLFGNLIALSLGLTPNFKSNFDLAEDAKLQLSKDTYDDDLDNLLAQIGDQYADLFLAAKNLSDAILLSDILRVNTEITKAPLSASMIKRYDEHHQDLTLLKALVRQQLPEKYKEIFFDQSKNGYAGYIDGGASQEEFYKFIKPILEKMDGTEELLVKLNREDLLRKQRTFDNGSIPHQIHLGELHAILRRQEDFYPFLKDNREKIEKILTFRIPYYVGPLARGNSRFAWMTRKSEETITPWNFEEVVDKGASAQSFIERMTNFDKNLPNEKVLPKHSLLYEYFTVYNELTKVKYVTEGMRKPAFLSGEQKKAIVDLLFKTNRKVTVKQLKEDYFKKIECFDSVEISGVEDRFNASLGTYHDLLKIIKDKDFLDNEENEDILEDIVLTLTLFEDREMIEERLKTYAHLFDDKVMKQLKRRRYTGWGRLSRKLINGIRDKQSGKTILDFLKSDGFANRNFMQLIHDDSLTFKEDIQKAQVSGQGDSLHEHIANLAGSPAIKKGILQTVKVVDELVKVMGRHKPENIVIEMARENQTTQKGQKNSRERMKRIEEGIKELGSQILKEHPVENTQLQNEKLYLYYLQNGRDMYVDQELDINRLSDYDVDHIVPQSFLKDDSIDNKVLTRSDKARGKSDNVPSEEVVKKMKNYWRQLLNAKLITQRKFDNLTKAERGGLSELDKAGFIKRQLVETRQITKHVAQILDSRMNTKYDENDKLIREVKVITLKSKLVSDFRKDFQFYKVREINNYHHAHDAYLNAVVGTALIKKYPKLESEFVYGDYKVYDVRKMIAKSEQEIGKATAKYFFYSNIMNFFKTEITLANGEIRKRPLIETNGETGEIVWDKGRDFATVRKVLSMPQVNIVKKTEVQTGGFSKESILPKRNSDKLIARKKDWDPKKYGGFDSPTVAYSVLVVAKVEKGKSKKLKSVKELLGITIMERSSFEKNPIDFLEAKGYKEVKKDLIIKLPKYSLFELENGRKRMLASAGELQKGNELALPSKYVNFLYLASHYEKLKGSPEDNEQKQLFVEQHKHYLDEIIEQISEFSKRVILADANLDKVLSAYNKHRDKPIREQAENIIHLFTLTNLGAPAAFKYFDTTIDRKRYTSTKEVLDATLIHQSITGLYETRIDLSQLGGDGGGSSPAPEAAAKGGTLNIEDEYRLHETSKGPDVPLGSTWLSDFPQAWAETGGMGLAVRQAPLIIPLKATSTPVSIKQYPMSQEARLGIKPHIQRLLDQGILVPCQSPWNTPLLPVKKPGTNDYRPVQDLREVNKRVEDIHPTVPNPYNLLSGLPPSHQWYTVLDLKDAFFCLRLHPTSQSLFAFEWRDPEMGISGQLTWTRLPQGFKNSPTLFNEALHRDLADFRIQHPDLILLQYVDDLLLAATSELDCQQGTRALLQTLGDLGYRASAKKAQICQKQVKYLGYLLKEGQRWLTEARKETVMGQPTPKTPRQLREFLGTAGFCRLWIPGFAEMAAPLYPLTKPGTLFEWGPDQQKAYQEIKQALLTAPALGLPDLTKPFELFVDEKQGYAKGVLTQKLGPWRRPVAYLSKKLDPVAAGWPPCLRMVAAIAVLTKDAGKLTMGQPLVILAPHAVEALVKQPPDRWLSNARMTHYQALLLDTDRVQFGPIVALNPATLLPLPEEGLQHDCLDILAEAHGTRPDLTDQPLPDADHTWYTDGSSFLQEGQRKAGAAVTTETEVVWAKALPAGTSAQRAELIALTQALKMAEGKKLNVYTDSRYAFATAHIHGEIYRRRGWLTSEGKEIKNKDEILALLKALFLPKRLSIIHCPGHQKGNRAEARGNRMADQAAREVATRETPETSTLLAGKRTADGSEFEKRTADGSEFESPKKKAKVE

SEQ ID NO: 2481 - protein, 2091 aa, synthetic construct
MPAAKRVKLDGGDKKYSIGLDIGTNSVGWAVITDEYKVPSKKFKVLGNTDRHSIKKNLIGALLFDSGETAEATRLKRTARRRYTRRKNRICYLQEIFSNEMAKVDDSFFHRLEESFLVEEDKKHERHPIFGNIVDEVAYHEKYPTIYHLRKKLVDSTDKADLRLIYLALAHMIKFRGHFLIEGDLNPDNSDVDKLFIQLVQTYNQLFEENPINASGVDAKAILSARLSKSRRLENLIAQLPGEKKNGLFGNLIALSLGLTPNFKSNFDLAEDAKLQLSKDTYDDDLDNLLAQIGDQYADLFLAAKNLSDAILLSDILRVNTEITKAPLSASMIKRYDEHHQDLTLLKALVRQQLPEKYKEIFFDQSKNGYAGYIDGGASQEEFYKFIKPILEKMDGTEELLVKLNREDLLRKQRTFDNGSIPHQIHLGELHAILRRQEDFYPFLKDNREKIEKILTFRIPYYVGPLARGNSRFAWMTRKSEETITPWNFEEVVDKGASAQSFIERMTNFDKNLPNEKVLPKHSLLYEYFTVYNELTKVKYVTEGMRKPAFLSGEQKKAIVDLLFKTNRKVTVKQLKEDYFKKIECFDSVEISGVEDRFNASLGTYHDLLKIIKDKDFLDNEENEDILEDIVLTLTLFEDREMIEERLKTYAHLFDDKVMKQLKRRRYTGWGRLSRKLINGIRDKQSGKTILDFLKSDGFANRNFMQLIHDDSLTFKEDIQKAQVSGQGDSLHEHIANLAGSPAIKKGILQTVKVVDELVKVMGRHKPENIVIEMARENQTTQKGQKNSRERMKRIEEGIKELGSQILKEHPVENTQLQNEKLYLYYLQNGRDMYVDQELDINRLSDYDVDHIVPQSFLKDDSIDNKVLTRSDKARGKSDNVPSEEVVKKMKNYWRQLLNAKLITQRKFDNLTKAERGGLSELDKAGFIKRQLVETRQITKHVAQILDSRMNTKYDENDKLIREVKVITLKSKLVSDFRKDFQFYKVREINNYHHAHDAYLNAVVGTALIKKYPKLESEFVYGDYKVYDVRKMIAKSEQEIGKATAKYFFYSNIMNFFKTEITLANGEIRKRPLIETNGETGEIVWDKGRDFATVRKVLSMPQVNIVKKTEVQTGGFSKESILPKRNSDKLIARKKDWDPKKYGGFDSPTVAYSVLVVAKVEKGKSKKLKSVKELLGITIMERSSFEKNPIDFLEAKGYKEVKKDLIIKLPKYSLFELENGRKRMLASAGELQKGNELALPSKYVNFLYLASHYEKLKGSPEDNEQKQLFVEQHKHYLDEIIEQISEFSKRVILADANLDKVLSAYNKHRDKPIREQAENIIHLFTLTNLGAPAAFKYFDTTIDRKRYTSTKEVLDATLIHQSITGLYETRIDLSQLGGDGGGGSPAPGGTLNIEDEYRLHETSKGPDVPLGSTWLSDFPQAWAETGGMGLAVRQAPLIIPLKATSTPVSIKQYPMSQEARLGIKPHIQRLLDQGILVPCQSPWNTPLLPVKKPGTNDYRPVQDLREVNKRVEDIHPTVPNPYNLLSGLPPSHQWYTVLDLKDAFFCLRLHPTSQSLFAFEWRDPEMGISGQLTWTRLPQGFKNSPTLFNEALHRDLADFRIQHPDLILLQYVDDLLLAATSELDCQQGTRALLQTLGDLGYRASAKKAQICQKQVKYLGYLLKEGQRWLTEARKETVMGQPTPKTPRQLREFLGTAGFCRLWIPGFAEMAAPLYPLTKPGTLFEWGPDQQKAYQEIKQALLTAPALGLPDLTKPFELFVDEKQGYAKGVLTQKLGPWRRPVAYLSKKLDPVAAGWPPCLRMVAAIAVLTKDAGKLTMGQPLVILAPHAVEALVKQPPDRWLSNARMTHYQALLLDTDRVQFGPIVALNPATLLPLPEEGLQHDCLDILAEAHGTRPDLTDQPLPDADHTWYTDGSSFLQEGQRKAGAAVTTETEVVWAKALPAGTSAQRAELIALTQALKMAEGKKLNVYTDSRYAFATAHIHGEIYRRRGWLTSEGKEIKNKDEILALLKALFLPKRLSIIHCPGHQKGNRAEARGNRMADQAAREVATRETPETSTLLAGKRTADGSEFEKRTADGSEFESPKKKAKVE

SEQ ID NO: 2482 - protein, 2090 aa, synthetic construct
MPAAKRVKLDGGDKKYSIGLDIGTNSVGWAVITDEYKVPSKKFKVLGNTDRHSIKKNLIGALLFDSGETAEATRLKRTARRRYTRRKNRICYLQEIFSNEMAKVDDSFFHRLEESFLVEEDKKHERHPIFGNIVDEVAYHEKYPTIYHLRKKLVDSTDKADLRLIYLALAHMIKFRGHFLIEGDLNPDNSDVDKLFIQLVQTYNQLFEENPINASGVDAKAILSARLSKSRRLENLIAQLPGEKKNGLFGNLIALSLGLTPNFKSNFDLAEDAKLQLSKDTYDDDLDNLLAQIGDQYADLFLAAKNLSDAILLSDILRVNTEITKAPLSASMIKRYDEHHQDLTLLKALVRQQLPEKYKEIFFDQSKNGYAGYIDGGASQEEFYKFIKPILEKMDGTEELLVKLNREDLLRKQRTFDNGSIPHQIHLGELHAILRRQEDFYPFLKDNREKIEKILTFRIPYYVGPLARGNSRFAWMTRKSEETITPWNFEEVVDKGASAQSFIERMTNFDKNLPNEKVLPKHSLLYEYFTVYNELTKVKYVTEGMRKPAFLSGEQKKAIVDLLFKTNRKVTVKQLKEDYFKKIECFDSVEISGVEDRFNASLGTYHDLLKIIKDKDFLDNEENEDILEDIVLTLTLFEDREMIEERLKTYAHLFDDKVMKQLKRRRYTGWGRLSRKLINGIRDKQSGKTILDFLKSDGFANRNFMQLIHDDSLTFKEDIQKAQVSGQGDSLHEHIANLAGSPAIKKGILQTVKVVDELVKVMGRHKPENIVIEMARENQTTQKGQKNSRERMKRIEEGIKELGSQILKEHPVENTQLQNEKLYLYYLQNGRDMYVDQELDINRLSDYDVDHIVPQSFLKDDSIDNKVLTRSDKARGKSDNVPSEEVVKKMKNYWRQLLNAKLITQRKFDNLTKAERGGLSELDKAGFIKRQLVETRQITKHVAQILDSRMNTKYDENDKLIREVKVITLKSKLVSDFRKDFQFYKVREINNYHHAHDAYLNAVVGTALIKKYPKLESEFVYGDYKVYDVRKMIAKSEQEIGKATAKYFFYSNIMNFFKTEITLANGEIRKRPLIETNGETGEIVWDKGRDFATVRKVLSMPQVNIVKKTEVQTGGFSKESILPKRNSDKLIARKKDWDPKKYGGFDSPTVAYSVLVVAKVEKGKSKKLKSVKELLGITIMERSSFEKNPIDFLEAKGYKEVKKDLIIKLPKYSLFELENGRKRMLASAGELQKGNELALPSKYVNFLYLASHYEKLKGSPEDNEQKQLFVEQHKHYLDEIIEQISEFSKRVILADANLDKVLSAYNKHRDKPIREQAENIIHLFTLTNLGAPAAFKYFDTTIDRKRYTSTKEVLDATLIHQSITGLYETRIDLSQLGGDGGGGGGSGGTLNIEDEYRLHETSKGPDVPLGSTWLSDFPQAWAETGGMGLAVRQAPLIIPLKATSTPVSIKQYPMSQEARLGIKPHIQRLLDQGILVPCQSPWNTPLLPVKKPGTNDYRPVQDLREVNKRVEDIHPTVPNPYNLLSGLPPSHQWYTVLDLKDAFFCLRLHPTSQSLFAFEWRDPEMGISGQLTWTRLPQGFKNSPTLFNEALHRDLADFRIQHPDLILLQYVDDLLLAATSELDCQQGTRALLQTLGDLGYRASAKKAQICQKQVKYLGYLLKEGQRWLTEARKETVMGQPTPKTPRQLREFLGTAGFCRLWIPGFAEMAAPLYPLTKPGTLFEWGPDQQKAYQEIKQALLTAPALGLPDLTKPFELFVDEKQGYAKGVLTQKLGPWRRPVAYLSKKLDPVAAGWPPCLRMVAAIAVLTKDAGKLTMGQPLVILAPHAVEALVKQPPDRWLSNARMTHYQALLLDTDRVQFGPIVALNPATLLPLPEEGLQHDCLDILAEAHGTRPDLTDQPLPDADHTWYTDGSSFLQEGQRKAGAAVTTETEVVWAKALPAGTSAQRAELIALTQALKMAEGKKLNVYTDSRYAFATAHIHGEIYRRRGWLTSEGKEIKNKDEILALLKALFLPKRLSIIHCPGHQKGNRAEARGNRMADQAAREVATRETPETSTLLAGKRTADGSEFEKRTADGSEFESPKKKAKVE

SEQ ID NO: 2483 - protein, 2096 aa, synthetic construct
MPAAKRVKLDGGDKKYSIGLDIGTNSVGWAVITDEYKVPSKKFKVLGNTDRHSIKKNLIGALLFDSGETAEATRLKRTARRRYTRRKNRICYLQEIFSNEMAKVDDSFFHRLEESFLVEEDKKHERHPIFGNIVDEVAYHEKYPTIYHLRKKLVDSTDKADLRLIYLALAHMIKFRGHFLIEGDLNPDNSDVDKLFIQLVQTYNQLFEENPINASGVDAKAILSARLSKSRRLENLIAQLPGEKKNGLFGNLIALSLGLTPNFKSNFDLAEDAKLQLSKDTYDDDLDNLLAQIGDQYADLFLAAKNLSDAILLSDILRVNTEITKAPLSASMIKRYDEHHQDLTLLKALVRQQLPEKYKEIFFDQSKNGYAGYIDGGASQEEFYKFIKPILEKMDGTEELLVKLNREDLLRKQRTFDNGSIPHQIHLGELHAILRRQEDFYPFLKDNREKIEKILTFRIPYYVGPLARGNSRFAWMTRKSEETITPWNFEEVVDKGASAQSFIERMTNFDKNLPNEKVLPKHSLLYEYFTVYNELTKVKYVTEGMRKPAFLSGEQKKAIVDLLFKTNRKVTVKQLKEDYFKKIECFDSVEISGVEDRFNASLGTYHDLLKIIKDKDFLDNEENEDILEDIVLTLTLFEDREMIEERLKTYAHLFDDKVMKQLKRRRYTGWGRLSRKLINGIRDKQSGKTILDFLKSDGFANRNFMQLIHDDSLTFKEDIQKAQVSGQGDSLHEHIANLAGSPAIKKGILQTVKVVDELVKVMGRHKPENIVIEMARENQTTQKGQKNSRERMKRIEEGIKELGSQILKEHPVENTQLQNEKLYLYYLQNGRDMYVDQELDINRLSDYDVDHIVPQSFLKDDSIDNKVLTRSDKARGKSDNVPSEEVVKKMKNYWRQLLNAKLITQRKFDNLTKAERGGLSELDKAGFIKRQLVETRQITKHVAQILDSRMNTKYDENDKLIREVKVITLKSKLVSDFRKDFQFYKVREINNYHHAHDAYLNAVVGTALIKKYPKLESEFVYGDYKVYDVRKMIAKSEQEIGKATAKYFFYSNIMNFFKTEITLANGEIRKRPLIETNGETGEIVWDKGRDFATVRKVLSMPQVNIVKKTEVQTGGFSKESILPKRNSDKLIARKKDWDPKKYGGFDSPTVAYSVLVVAKVEKGKSKKLKSVKELLGITIMERSSFEKNPIDFLEAKGYKEVKKDLIIKLPKYSLFELENGRKRMLASAGELQKGNELALPSKYVNFLYLASHYEKLKGSPEDNEQKQLFVEQHKHYLDEIIEQISEFSKRVILADANLDKVLSAYNKHRDKPIREQAENIIHLFTLTNLGAPAAFKYFDTTIDRKRYTSTKEVLDATLIHQSITGLYETRIDLSQLGGDGGEAAAKGGGGGSGGTLNIEDEYRLHETSKGPDVPLGSTWLSDFPQAWAETGGMGLAVRQAPLIIPLKATSTPVSIKQYPMSQEARLGIKPHIQRLLDQGILVPCQSPWNTPLLPVKKPGTNDYRPVQDLREVNKRVEDIHPTVPNPYNLLSGLPPSHQWYTVLDLKDAFFCLRLHPTSQSLFAFEWRDPEMGISGQLTWTRLPQGFKNSPTLFNEALHRDLADFRIQHPDLILLQYVDDLLLAATSELDCQQGTRALLQTLGDLGYRASAKKAQICQKQVKYLGYLLKEGQRWLTEARKETVMGQPTPKTPRQLREFLGTAGFCRLWIPGFAEMAAPLYPLTKPGTLFEWGPDQQKAYQEIKQALLTAPALGLPDLTKPFELFVDEKQGYAKGVLTQKLGPWRRPVAYLSKKLDPVAAGWPPCLRMVAAIAVLTKDAGKLTMGQPLVILAPHAVEALVKQPPDRWLSNARMTHYQALLLDTDRVQFGPIVALNPATLLPLPEEGLQHDCLDILAEAHGTRPDLTDQPLPDADHTWYTDGSSFLQEGQRKAGAAVTTETEVVWAKALPAGTSAQRAELIALTQALKMAEGKKLNVYTDSRYAFATAHIHGEIYRRRGWLTSEGKEIKNKDEILALLKALFLPKRLSIIHCPGHQKGNRAEARGNRMADQAAREVATRETPETSTLLAGKRTADGSEFEKRTADGSEFESPKKKAKVE

SEQ ID NO: 2484 - protein, 2095 aa, synthetic construct
MPAAKRVKLDGGDKKYSIGLDIGTNSVGWAVITDEYKVPSKKFKVLGNTDRHSIKKNLIGALLFDSGETAEATRLKRTARRRYTRRKNRICYLQEIFSNEMAKVDDSFFHRLEESFLVEEDKKHERHPIFGNIVDEVAYHEKYPTIYHLRKKLVDSTDKADLRLIYLALAHMIKFRGHFLIEGDLNPDNSDVDKLFIQLVQTYNQLFEENPINASGVDAKAILSARLSKSRRLENLIAQLPGEKKNGLFGNLIALSLGLTPNFKSNFDLAEDAKLQLSKDTYDDDLDNLLAQIGDQYADLFLAAKNLSDAILLSDILRVNTEITKAPLSASMIKRYDEHHQDLTLLKALVRQQLPEKYKEIFFDQSKNGYAGYIDGGASQEEFYKFIKPILEKMDGTEELLVKLNREDLLRKQRTFDNGSIPHQIHLGELHAILRRQEDFYPFLKDNREKIEKILTFRIPYYVGPLARGNSRFAWMTRKSEETITPWNFEEVVDKGASAQSFIERMTNFDKNLPNEKVLPKHSLLYEYFTVYNELTKVKYVTEGMRKPAFLSGEQKKAIVDLLFKTNRKVTVKQLKEDYFKKIECFDSVEISGVEDRFNASLGTYHDLLKIIKDKDFLDNEENEDILEDIVLTLTLFEDREMIEERLKTYAHLFDDKVMKQLKRRRYTGWGRLSRKLINGIRDKQSGKTILDFLKSDGFANRNFMQLIHDDSLTFKEDIQKAQVSGQGDSLHEHIANLAGSPAIKKGILQTVKVVDELVKVMGRHKPENIVIEMARENQTTQKGQKNSRERMKRIEEGIKELGSQILKEHPVENTQLQNEKLYLYYLQNGRDMYVDQELDINRLSDYDVDHIVPQSFLKDDSIDNKVLTRSDKARGKSDNVPSEEVVKKMKNYWRQLLNAKLITQRKFDNLTKAERGGLSELDKAGFIKRQLVETRQITKHVAQILDSRMNTKYDENDKLIREVKVITLKSKLVSDFRKDFQFYKVREINNYHHAHDAYLNAVVGTALIKKYPKLESEFVYGDYKVYDVRKMIAKSEQEIGKATAKYFFYSNIMNFFKTEITLANGEIRKRPLIETNGETGEIVWDKGRDFATVRKVLSMPQVNIVKKTEVQTGGFSKESILPKRNSDKLIARKKDWDPKKYGGFDSPTVAYSVLVVAKVEKGKSKKLKSVKELLGITIMERSSFEKNPIDFLEAKGYKEVKKDLIIKLPKYSLFELENGRKRMLASAGELQKGNELALPSKYVNFLYLASHYEKLKGSPEDNEQKQLFVEQHKHYLDEIIEQISEFSKRVILADANLDKVLSAYNKHRDKPIREQAENIIHLFTLTNLGAPAAFKYFDTTIDRKRYTSTKEVLDATLIHQSITGLYETRIDLSQLGGDGGEAAAKEAAAKGGTLNIEDEYRLHETSKGPDVPLGSTWLSDFPQAWAETGGMGLAVRQAPLIIPLKATSTPVSIKQYPMSQEARLGIKPHIQRLLDQGILVPCQSPWNTPLLPVKKPGTNDYRPVQDLREVNKRVEDIHPTVPNPYNLLSGLPPSHQWYTVLDLKDAFFCLRLHPTSQSLFAFEWRDPEMGISGQLTWTRLPQGFKNSPTLFNEALHRDLADFRIQHPDLILLQYVDDLLLAATSELDCQQGTRALLQTLGDLGYRASAKKAQICQKQVKYLGYLLKEGQRWLTEARKETVMGQPTPKTPRQLREFLGTAGFCRLWIPGFAEMAAPLYPLTKPGTLFEWGPDQQKAYQEIKQALLTAPALGLPDLTKPFELFVDEKQGYAKGVLTQKLGPWRRPVAYLSKKLDPVAAGWPPCLRMVAAIAVLTKDAGKLTMGQPLVILAPHAVEALVKQPPDRWLSNARMTHYQALLLDTDRVQFGPIVALNPATLLPLPEEGLQHDCLDILAEAHGTRPDLTDQPLPDADHTWYTDGSSFLQEGQRKAGAAVTTETEVVWAKALPAGTSAQRAELIALTQALKMAEGKKLNVYTDSRYAFATAHIHGEIYRRRGWLTSEGKEIKNKDEILALLKALFLPKRLSIIHCPGHQKGNRAEARGNRMADQAAREVATRETPETSTLLAGKRTADGSEFEKRTADGSEFESPKKKAKVE

SEQ ID NO: 2485 - protein, 2096 aa, synthetic construct
MPAAKRVKLDGGDKKYSIGLDIGTNSVGWAVITDEYKVPSKKFKVLGNTDRHSIKKNLIGALLFDSGETAEATRLKRTARRRYTRRKNRICYLQEIFSNEMAKVDDSFFHRLEESFLVEEDKKHERHPIFGNIVDEVAYHEKYPTIYHLRKKLVDSTDKADLRLIYLALAHMIKFRGHFLIEGDLNPDNSDVDKLFIQLVQTYNQLFEENPINASGVDAKAILSARLSKSRRLENLIAQLPGEKKNGLFGNLIALSLGLTPNFKSNFDLAEDAKLQLSKDTYDDDLDNLLAQIGDQYADLFLAAKNLSDAILLSDILRVNTEITKAPLSASMIKRYDEHHQDLTLLKALVRQQLPEKYKEIFFDQSKNGYAGYIDGGASQEEFYKFIKPILEKMDGTEELLVKLNREDLLRKQRTFDNGSIPHQIHLGELHAILRRQEDFYPFLKDNREKIEKILTFRIPYYVGPLARGNSRFAWMTRKSEETITPWNFEEVVDKGASAQSFIERMTNFDKNLPNEKVLPKHSLLYEYFTVYNELTKVKYVTEGMRKPAFLSGEQKKAIVDLLFKTNRKVTVKQLKEDYFKKIECFDSVEISGVEDRFNASLGTYHDLLKIIKDKDFLDNEENEDILEDIVLTLTLFEDREMIEERLKTYAHLFDDKVMKQLKRRRYTGWGRLSRKLINGIRDKQSGKTILDFLKSDGFANRNFMQLIHDDSLTFKEDIQKAQVSGQGDSLHEHIANLAGSPAIKKGILQTVKVVDELVKVMGRHKPENIVIEMARENQTTQKGQKNSRERMKRIEEGIKELGSQILKEHPVENTQLQNEKLYLYYLQNGRDMYVDQELDINRLSDYDVDHIVPQSFLKDDSIDNKVLTRSDKARGKSDNVPSEEVVKKMKNYWRQLLNAKLITQRKFDNLTKAERGGLSELDKAGFIKRQLVETRQITKHVAQILDSRMNTKYDENDKLIREVKVITLKSKLVSDFRKDFQFYKVREINNYHHAHDAYLNAVVGTALIKKYPKLESEFVYGDYKVYDVRKMIAKSEQEIGKATAKYFFYSNIMNFFKTEITLANGEIRKRPLIETNGETGEIVWDKGRDFATVRKVLSMPQVNIVKKTEVQTGGFSKESILPKRNSDKLIARKKDWDPKKYGGFDSPTVAYSVLVVAKVEKGKSKKLKSVKELLGITIMERSSFEKNPIDFLEAKGYKEVKKDLIIKLPKYSLFELENGRKRMLASAGELQKGNELALPSKYVNFLYLASHYEKLKGSPEDNEQKQLFVEQHKHYLDEIIEQISEFSKRVILADANLDKVLSAYNKHRDKPIREQAENIIHLFTLTNLGAPAAFKYFDTTIDRKRYTSTKEVLDATLIHQSITGLYETRIDLSQLGGDGGGSSEAAAKPAPGGTLNIEDEYRLHETSKGPDVPLGSTWLSDFPQAWAETGGMGLAVRQAPLIIPLKATSTPVSIKQYPMSQEARLGIKPHIQRLLDQGILVPCQSPWNTPLLPVKKPGTNDYRPVQDLREVNKRVEDIHPTVPNPYNLLSGLPPSHQWYTVLDLKDAFFCLRLHPTSQSLFAFEWRDPEMGISGQLTWTRLPQGFKNSPTLFNEALHRDLADFRIQHPDLILLQYVDDLLLAATSELDCQQGTRALLQTLGDLGYRASAKKAQICQKQVKYLGYLLKEGQRWLTEARKETVMGQPTPKTPRQLREFLGTAGFCRLWIPGFAEMAAPLYPLTKPGTLFEWGPDQQKAYQEIKQALLTAPALGLPDLTKPFELFVDEKQGYAKGVLTQKLGPWRRPVAYLSKKLDPVAAGWPPCLRMVAAIAVLTKDAGKLTMGQPLVILAPHAVEALVKQPPDRWLSNARMTHYQALLLDTDRVQFGPIVALNPATLLPLPEEGLQHDCLDILAEAHGTRPDLTDQPLPDADHTWYTDGSSFLQEGQRKAGAAVTTETEVVWAKALPAGTSAQRAELIALTQALKMAEGKKLNVYTDSRYAFATAHIHGEIYRRRGWLTSEGKEIKNKDEILALLKALFLPKRLSIIHCPGHQKGNRAEARGNRMADQAAREVATRETPETSTLLAGKRTADGSEFEKRTADGSEFESPKKKAKVE

SEQ ID NO: 2486 - protein, 2096 aa, synthetic construct
MPAAKRVKLDGGDKKYSIGLDIGTNSVGWAVITDEYKVPSKKFKVLGNTDRHSIKKNLIGALLFDSGETAEATRLKRTARRRYTRRKNRICYLQEIFSNEMAKVDDSFFHRLEESFLVEEDKKHERHPIFGNIVDEVAYHEKYPTIYHLRKKLVDSTDKADLRLIYLALAHMIKFRGHFLIEGDLNPDNSDVDKLFIQLVQTYNQLFEENPINASGVDAKAILSARLSKSRRLENLIAQLPGEKKNGLFGNLIALSLGLTPNFKSNFDLAEDAKLQLSKDTYDDDLDNLLAQIGDQYADLFLAAKNLSDAILLSDILRVNTEITKAPLSASMIKRYDEHHQDLTLLKALVRQQLPEKYKEIFFDQSKNGYAGYIDGGASQEEFYKFIKPILEKMDGTEELLVKLNREDLLRKQRTFDNGSIPHQIHLGELHAILRRQEDFYPFLKDNREKIEKILTFRIPYYVGPLARGNSRFAWMTRKSEETITPWNFEEVVDKGASAQSFIERMTNFDKNLPNEKVLPKHSLLYEYFTVYNELTKVKYVTEGMRKPAFLSGEQKKAIVDLLFKTNRKVTVKQLKEDYFKKIECFDSVEISGVEDRFNASLGTYHDLLKIIKDKDFLDNEENEDILEDIVLTLTLFEDREMIEERLKTYAHLFDDKVMKQLKRRRYTGWGRLSRKLINGIRDKQSGKTILDFLKSDGFANRNFMQLIHDDSLTFKEDIQKAQVSGQGDSLHEHIANLAGSPAIKKGILQTVKVVDELVKVMGRHKPENIVIEMARENQTTQKGQKNSRERMKRIEEGIKELGSQILKEHPVENTQLQNEKLYLYYLQNGRDMYVDQELDINRLSDYDVDHIVPQSFLKDDSIDNKVLTRSDKARGKSDNVPSEEVVKKMKNYWRQLLNAKLITQRKFDNLTKAERGGLSELDKAGFIKRQLVETRQITKHVAQILDSRMNTKYDENDKLIREVKVITLKSKLVSDFRKDFQFYKVREINNYHHAHDAYLNAVVGTALIKKYPKLESEFVYGDYKVYDVRKMIAKSEQEIGKATAKYFFYSNIMNFFKTEITLANGEIRKRPLIETNGETGEIVWDKGRDFATVRKVLSMPQVNIVKKTEVQTGGFSKESILPKRNSDKLIARKKDWDPKKYGGFDSPTVAYSVLVVAKVEKGKSKKLKSVKELLGITIMERSSFEKNPIDFLEAKGYKEVKKDLIIKLPKYSLFELENGRKRMLASAGELQKGNELALPSKYVNFLYLASHYEKLKGSPEDNEQKQLFVEQHKHYLDEIIEQISEFSKRVILADANLDKVLSAYNKHRDKPIREQAENIIHLFTLTNLGAPAAFKYFDTTIDRKRYTSTKEVLDATLIHQSITGLYETRIDLSQLGGDGGGGSEAAAKPAPGGTLNIEDEYRLHETSKGPDVPLGSTWLSDFPQAWAETGGMGLAVRQAPLIIPLKATSTPVSIKQYPMSQEARLGIKPHIQRLLDQGILVPCQSPWNTPLLPVKKPGTNDYRPVQDLREVNKRVEDIHPTVPNPYNLLSGLPPSHQWYTVLDLKDAFFCLRLHPTSQSLFAFEWRDPEMGISGQLTWTRLPQGFKNSPTLFNEALHRDLADFRIQHPDLILLQYVDDLLLAATSELDCQQGTRALLQTLGDLGYRASAKKAQICQKQVKYLGYLLKEGQRWLTEARKETVMGQPTPKTPRQLREFLGTAGFCRLWIPGFAEMAAPLYPLTKPGTLFEWGPDQQKAYQEIKQALLTAPALGLPDLTKPFELFVDEKQGYAKGVLTQKLGPWRRPVAYLSKKLDPVAAGWPPCLRMVAAIAVLTKDAGKLTMGQPLVILAPHAVEALVKQPPDRWLSNARMTHYQALLLDTDRVQFGPIVALNPATLLPLPEEGLQHDCLDILAEAHGTRPDLTDQPLPDADHTWYTDGSSFLQEGQRKAGAAVTTETEVVWAKALPAGTSAQRAELIALTQALKMAEGKKLNVYTDSRYAFATAHIHGEIYRRRGWLTSEGKEIKNKDEILALLKALFLPKRLSIIHCPGHQKGNRAEARGNRMADQAAREVATRETPETSTLLAGKRTADGSEFEKRTADGSEFESPKKKAKVE

SEQ ID NO: 2487 - protein, 2091 aa, synthetic construct
MPAAKRVKLDGGDKKYSIGLDIGTNSVGWAVITDEYKVPSKKFKVLGNTDRHSIKKNLIGALLFDSGETAEATRLKRTARRRYTRRKNRICYLQEIFSNEMAKVDDSFFHRLEESFLVEEDKKHERHPIFGNIVDEVAYHEKYPTIYHLRKKLVDSTDKADLRLIYLALAHMIKFRGHFLIEGDLNPDNSDVDKLFIQLVQTYNQLFEENPINASGVDAKAILSARLSKSRRLENLIAQLPGEKKNGLFGNLIALSLGLTPNFKSNFDLAEDAKLQLSKDTYDDDLDNLLAQIGDQYADLFLAAKNLSDAILLSDILRVNTEITKAPLSASMIKRYDEHHQDLTLLKALVRQQLPEKYKEIFFDQSKNGYAGYIDGGASQEEFYKFIKPILEKMDGTEELLVKLNREDLLRKQRTFDNGSIPHQIHLGELHAILRRQEDFYPFLKDNREKIEKILTFRIPYYVGPLARGNSRFAWMTRKSEETITPWNFEEVVDKGASAQSFIERMTNFDKNLPNEKVLPKHSLLYEYFTVYNELTKVKYVTEGMRKPAFLSGEQKKAIVDLLFKTNRKVTVKQLKEDYFKKIECFDSVEISGVEDRFNASLGTYHDLLKIIKDKDFLDNEENEDILEDIVLTLTLFEDREMIEERLKTYAHLFDDKVMKQLKRRRYTGWGRLSRKLINGIRDKQSGKTILDFLKSDGFANRNFMQLIHDDSLTFKEDIQKAQVSGQGDSLHEHIANLAGSPAIKKGILQTVKVVDELVKVMGRHKPENIVIEMARENQTTQKGQKNSRERMKRIEEGIKELGSQILKEHPVENTQLQNEKLYLYYLQNGRDMYVDQELDINRLSDYDVDHIVPQSFLKDDSIDNKVLTRSDKARGKSDNVPSEEVVKKMKNYWRQLLNAKLITQRKFDNLTKAERGGLSELDKAGFIKRQLVETRQITKHVAQILDSRMNTKYDENDKLIREVKVITLKSKLVSDFRKDFQFYKVREINNYHHAHDAYLNAVVGTALIKKYPKLESEFVYGDYKVYDVRKMIAKSEQEIGKATAKYFFYSNIMNFFKTEITLANGEIRKRPLIETNGETGEIVWDKGRDFATVRKVLSMPQVNIVKKTEVQTGGFSKESILPKRNSDKLIARKKDWDPKKYGGFDSPTVAYSVLVVAKVEKGKSKKLKSVKELLGITIMERSSFEKNPIDFLEAKGYKEVKKDLIIKLPKYSLFELENGRKRMLASAGELQKGNELALPSKYVNFLYLASHYEKLKGSPEDNEQKQLFVEQHKHYLDEIIEQISEFSKRVILADANLDKVLSAYNKHRDKPIREQAENIIHLFTLTNLGAPAAFKYFDTTIDRKRYTSTKEVLDATLIHQSITGLYETRIDLSQLGGDGGGGSGSSGGTLNIEDEYRLHETSKGPDVPLGSTWLSDFPQAWAETGGMGLAVRQAPLIIPLKATSTPVSIKQYPMSQEARLGIKPHIQRLLDQGILVPCQSPWNTPLLPVKKPGTNDYRPVQDLREVNKRVEDIHPTVPNPYNLLSGLPPSHQWYTVLDLKDAFFCLRLHPTSQSLFAFEWRDPEMGISGQLTWTRLPQGFKNSPTLFNEALHRDLADFRIQHPDLILLQYVDDLLLAATSELDCQQGTRALLQTLGDLGYRASAKKAQICQKQVKYLGYLLKEGQRWLTEARKETVMGQPTPKTPRQLREFLGTAGFCRLWIPGFAEMAAPLYPLTKPGTLFEWGPDQQKAYQEIKQALLTAPALGLPDLTKPFELFVDEKQGYAKGVLTQKLGPWRRPVAYLSKKLDPVAAGWPPCLRMVAAIAVLTKDAGKLTMGQPLVILAPHAVEALVKQPPDRWLSNARMTHYQALLLDTDRVQFGPIVALNPATLLPLPEEGLQHDCLDILAEAHGTRPDLTDQPLPDADHTWYTDGSSFLQEGQRKAGAAVTTETEVVWAKALPAGTSAQRAELIALTQALKMAEGKKLNVYTDSRYAFATAHIHGEIYRRRGWLTSEGKEIKNKDEILALLKALFLPKRLSIIHCPGHQKGNRAEARGNRMADQAAREVATRETPETSTLLAGKRTADGSEFEKRTADGSEFESPKKKAKVE

SEQ ID NO: 2488 - protein, 2096 aa, synthetic construct
MPAAKRVKLDGGDKKYSIGLDIGTNSVGWAVITDEYKVPSKKFKVLGNTDRHSIKKNLIGALLFDSGETAEATRLKRTARRRYTRRKNRICYLQEIFSNEMAKVDDSFFHRLEESFLVEEDKKHERHPIFGNIVDEVAYHEKYPTIYHLRKKLVDSTDKADLRLIYLALAHMIKFRGHFLIEGDLNPDNSDVDKLFIQLVQTYNQLFEENPINASGVDAKAILSARLSKSRRLENLIAQLPGEKKNGLFGNLIALSLGLTPNFKSNFDLAEDAKLQLSKDTYDDDLDNLLAQIGDQYADLFLAAKNLSDAILLSDILRVNTEITKAPLSASMIKRYDEHHQDLTLLKALVRQQLPEKYKEIFFDQSKNGYAGYIDGGASQEEFYKFIKPILEKMDGTEELLVKLNREDLLRKQRTFDNGSIPHQIHLGELHAILRRQEDFYPFLKDNREKIEKILTFRIPYYVGPLARGNSRFAWMTRKSEETITPWNFEEVVDKGASAQSFIERMTNFDKNLPNEKVLPKHSLLYEYFTVYNELTKVKYVTEGMRKPAFLSGEQKKAIVDLLFKTNRKVTVKQLKEDYFKKIECFDSVEISGVEDRFNASLGTYHDLLKIIKDKDFLDNEENEDILEDIVLTLTLFEDREMIEERLKTYAHLFDDKVMKQLKRRRYTGWGRLSRKLINGIRDKQSGKTILDFLKSDGFANRNFMQLIHDDSLTFKEDIQKAQVSGQGDSLHEHIANLAGSPAIKKGILQTVKVVDELVKVMGRHKPENIVIEMARENQTTQKGQKNSRERMKRIEEGIKELGSQILKEHPVENTQLQNEKLYLYYLQNGRDMYVDQELDINRLSDYDVDHIVPQSFLKDDSIDNKVLTRSDKARGKSDNVPSEEVVKKMKNYWRQLLNAKLITQRKFDNLTKAERGGLSELDKAGFIKRQLVETRQITKHVAQILDSRMNTKYDENDKLIREVKVITLKSKLVSDFRKDFQFYKVREINNYHHAHDAYLNAVVGTALIKKYPKLESEFVYGDYKVYDVRKMIAKSEQEIGKATAKYFFYSNIMNFFKTEITLANGEIRKRPLIETNGETGEIVWDKGRDFATVRKVLSMPQVNIVKKTEVQTGGFSKESILPKRNSDKLIARKKDWDPKKYGGFDSPTVAYSVLVVAKVEKGKSKKLKSVKELLGITIMERSSFEKNPIDFLEAKGYKEVKKDLIIKLPKYSLFELENGRKRMLASAGELQKGNELALPSKYVNFLYLASHYEKLKGSPEDNEQKQLFVEQHKHYLDEIIEQISEFSKRVILADANLDKVLSAYNKHRDKPIREQAENIIHLFTLTNLGAPAAFKYFDTTIDRKRYTSTKEVLDATLIHQSITGLYETRIDLSQLGGDGGGSSGGSEAAAKGGTLNIEDEYRLHETSKGPDVPLGSTWLSDFPQAWAETGGMGLAVRQAPLIIPLKATSTPVSIKQYPMSQEARLGIKPHIQRLLDQGILVPCQSPWNTPLLPVKKPGTNDYRPVQDLREVNKRVEDIHPTVPNPYNLLSGLPPSHQWYTVLDLKDAFFCLRLHPTSQSLFAFEWRDPEMGISGQLTWTRLPQGFKNSPTLFNEALHRDLADFRIQHPDLILLQYVDDLLLAATSELDCQQGTRALLQTLGDLGYRASAKKAQICQKQVKYLGYLLKEGQRWLTEARKETVMGQPTPKTPRQLREFLGTAGFCRLWIPGFAEMAAPLYPLTKPGTLFEWGPDQQKAYQEIKQALLTAPALGLPDLTKPFELFVDEKQGYAKGVLTQKLGPWRRPVAYLSKKLDPVAAGWPPCLRMVAAIAVLTKDAGKLTMGQPLVILAPHAVEALVKQPPDRWLSNARMTHYQALLLDTDRVQFGPIVALNPATLLPLPEEGLQHDCLDILAEAHGTRPDLTDQPLPDADHTWYTDGSSFLQEGQRKAGAAVTTETEVVWAKALPAGTSAQRAELIALTQALKMAEGKKLNVYTDSRYAFATAHIHGEIYRRRGWLTSEGKEIKNKDEILALLKALFLPKRLSIIHCPGHQKGNRAEARGNRMADQAAREVATRETPETSTLLAGKRTADGSEFEKRTADGSEFESPKKKAKVE

SEQ ID NO: 2489 - protein, 2101 aa, synthetic construct
MPAAKRVKLDGGDKKYSIGLDIGTNSVGWAVITDEYKVPSKKFKVLGNTDRHSIKKNLIGALLFDSGETAEATRLKRTARRRYTRRKNRICYLQEIFSNEMAKVDDSFFHRLEESFLVEEDKKHERHPIFGNIVDEVAYHEKYPTIYHLRKKLVDSTDKADLRLIYLALAHMIKFRGHFLIEGDLNPDNSDVDKLFIQLVQTYNQLFEENPINASGVDAKAILSARLSKSRRLENLIAQLPGEKKNGLFGNLIALSLGLTPNFKSNFDLAEDAKLQLSKDTYDDDLDNLLAQIGDQYADLFLAAKNLSDAILLSDILRVNTEITKAPLSASMIKRYDEHHQDLTLLKALVRQQLPEKYKEIFFDQSKNGYAGYIDGGASQEEFYKFIKPILEKMDGTEELLVKLNREDLLRKQRTFDNGSIPHQIHLGELHAILRRQEDFYPFLKDNREKIEKILTFRIPYYVGPLARGNSRFAWMTRKSEETITPWNFEEVVDKGASAQSFIERMTNFDKNLPNEKVLPKHSLLYEYFTVYNELTKVKYVTEGMRKPAFLSGEQKKAIVDLLFKTNRKVTVKQLKEDYFKKIECFDSVEISGVEDRFNASLGTYHDLLKIIKDKDFLDNEENEDILEDIVLTLTLFEDREMIEERLKTYAHLFDDKVMKQLKRRRYTGWGRLSRKLINGIRDKQSGKTILDFLKSDGFANRNFMQLIHDDSLTFKEDIQKAQVSGQGDSLHEHIANLAGSPAIKKGILQTVKVVDELVKVMGRHKPENIVIEMARENQTTQKGQKNSRERMKRIEEGIKELGSQILKEHPVENTQLQNEKLYLYYLQNGRDMYVDQELDINRLSDYDVDHIVPQSFLKDDSIDNKVLTRSDKARGKSDNVPSEEVVKKMKNYWRQLLNAKLITQRKFDNLTKAERGGLSELDKAGFIKRQLVETRQITKHVAQILDSRMNTKYDENDKLIREVKVITLKSKLVSDFRKDFQFYKVREINNYHHAHDAYLNAVVGTALIKKYPKLESEFVYGDYKVYDVRKMIAKSEQEIGKATAKYFFYSNIMNFFKTEITLANGEIRKRPLIETNGETGEIVWDKGRDFATVRKVLSMPQVNIVKKTEVQTGGFSKESILPKRNSDKLIARKKDWDPKKYGGFDSPTVAYSVLVVAKVEKGKSKKLKSVKELLGITIMERSSFEKNPIDFLEAKGYKEVKKDLIIKLPKYSLFELENGRKRMLASAGELQKGNELALPSKYVNFLYLASHYEKLKGSPEDNEQKQLFVEQHKHYLDEIIEQISEFSKRVILADANLDKVLSAYNKHRDKPIREQAENIIHLFTLTNLGAPAAFKYFDTTIDRKRYTSTKEVLDATLIHQSITGLYETRIDLSQLGGDGGSGSETPGTSESATPESGGTLNIEDEYRLHETSKGPDVPLGSTWLSDFPQAWAETGGMGLAVRQAPLIIPLKATSTPVSIKQYPMSQEARLGIKPHIQRLLDQGILVPCQSPWNTPLLPVKKPGTNDYRPVQDLREVNKRVEDIHPTVPNPYNLLSGLPPSHQWYTVLDLKDAFFCLRLHPTSQSLFAFEWRDPEMGISGQLTWTRLPQGFKNSPTLFNEALHRDLADFRIQHPDLILLQYVDDLLLAATSELDCQQGTRALLQTLGDLGYRASAKKAQICQKQVKYLGYLLKEGQRWLTEARKETVMGQPTPKTPRQLREFLGTAGFCRLWIPGFAEMAAPLYPLTKPGTLFEWGPDQQKAYQEIKQALLTAPALGLPDLTKPFELFVDEKQGYAKGVLTQKLGPWRRPVAYLSKKLDPVAAGWPPCLRMVAAIAVLTKDAGKLTMGQPLVILAPHAVEALVKQPPDRWLSNARMTHYQALLLDTDRVQFGPIVALNPATLLPLPEEGLQHDCLDILAEAHGTRPDLTDQPLPDADHTWYTDGSSFLQEGQRKAGAAVTTETEVVWAKALPAGTSAQRAELIALTQALKMAEGKKLNVYTDSRYAFATAHIHGEIYRRRGWLTSEGKEIKNKDEILALLKALFLPKRLSIIHCPGHQKGNRAEARGNRMADQAAREVATRETPETSTLLAGKRTADGSEFEKRTADGSEFESPKKKAKVE

SEQ ID NO: 2490 - protein, 2097 aa, synthetic construct
MPAAKRVKLDGGDKKYSIGLDIGTNSVGWAVITDEYKVPSKKFKVLGNTDRHSIKKNLIGALLFDSGETAEATRLKRTARRRYTRRKNRICYLQEIFSNEMAKVDDSFFHRLEESFLVEEDKKHERHPIFGNIVDEVAYHEKYPTIYHLRKKLVDSTDKADLRLIYLALAHMIKFRGHFLIEGDLNPDNSDVDKLFIQLVQTYNQLFEENPINASGVDAKAILSARLSKSRRLENLIAQLPGEKKNGLFGNLIALSLGLTPNFKSNFDLAEDAKLQLSKDTYDDDLDNLLAQIGDQYADLFLAAKNLSDAILLSDILRVNTEITKAPLSASMIKRYDEHHQDLTLLKALVRQQLPEKYKEIFFDQSKNGYAGYIDGGASQEEFYKFIKPILEKMDGTEELLVKLNREDLLRKQRTFDNGSIPHQIHLGELHAILRRQEDFYPFLKDNREKIEKILTFRIPYYVGPLARGNSRFAWMTRKSEETITPWNFEEVVDKGASAQSFIERMTNFDKNLPNEKVLPKHSLLYEYFTVYNELTKVKYVTEGMRKPAFLSGEQKKAIVDLLFKTNRKVTVKQLKEDYFKKIECFDSVEISGVEDRFNASLGTYHDLLKIIKDKDFLDNEENEDILEDIVLTLTLFEDREMIEERLKTYAHLFDDKVMKQLKRRRYTGWGRLSRKLINGIRDKQSGKTILDFLKSDGFANRNFMQLIHDDSLTFKEDIQKAQVSGQGDSLHEHIANLAGSPAIKKGILQTVKVVDELVKVMGRHKPENIVIEMARENQTTQKGQKNSRERMKRIEEGIKELGSQILKEHPVENTQLQNEKLYLYYLQNGRDMYVDQELDINRLSDYDVDHIVPQSFLKDDSIDNKVLTRSDKARGKSDNVPSEEVVKKMKNYWRQLLNAKLITQRKFDNLTKAERGGLSELDKAGFIKRQLVETRQITKHVAQILDSRMNTKYDENDKLIREVKVITLKSKLVSDFRKDFQFYKVREINNYHHAHDAYLNAVVGTALIKKYPKLESEFVYGDYKVYDVRKMIAKSEQEIGKATAKYFFYSNIMNFFKTEITLANGEIRKRPLIETNGETGEIVWDKGRDFATVRKVLSMPQVNIVKKTEVQTGGFSKESILPKRNSDKLIARKKDWDPKKYGGFDSPTVAYSVLVVAKVEKGKSKKLKSVKELLGITIMERSSFEKNPIDFLEAKGYKEVKKDLIIKLPKYSLFELENGRKRMLASAGELQKGNELALPSKYVNFLYLASHYEKLKGSPEDNEQKQLFVEQHKHYLDEIIEQISEFSKRVILADANLDKVLSAYNKHRDKPIREQAENIIHLFTLTNLGAPAAFKYFDTTIDRKRYTSTKEVLDATLIHQSITGLYETRIDLSQLGGDGGGSAGSAAGSGEFGGTLNIEDEYRLHETSKGPDVPLGSTWLSDFPQAWAETGGMGLAVRQAPLIIPLKATSTPVSIKQYPMSQEARLGIKPHIQRLLDQGILVPCQSPWNTPLLPVKKPGTNDYRPVQDLREVNKRVEDIHPTVPNPYNLLSGLPPSHQWYTVLDLKDAFFCLRLHPTSQSLFAFEWRDPEMGISGQLTWTRLPQGFKNSPTLFNEALHRDLADFRIQHPDLILLQYVDDLLLAATSELDCQQGTRALLQTLGDLGYRASAKKAQICQKQVKYLGYLLKEGQRWLTEARKETVMGQPTPKTPRQLREFLGTAGFCRLWIPGFAEMAAPLYPLTKPGTLFEWGPDQQKAYQEIKQALLTAPALGLPDLTKPFELFVDEKQGYAKGVLTQKLGPWRRPVAYLSKKLDPVAAGWPPCLRMVAAIAVLTKDAGKLTMGQPLVILAPHAVEALVKQPPDRWLSNARMTHYQALLLDTDRVQFGPIVALNPATLLPLPEEGLQHDCLDILAEAHGTRPDLTDQPLPDADHTWYTDGSSFLQEGQRKAGAAVTTETEVVWAKALPAGTSAQRAELIALTQALKMAEGKKLNVYTDSRYAFATAHIHGEIYRRRGWLTSEGKEIKNKDEILALLKALFLPKRLSIIHCPGHQKGNRAEARGNRMADQAAREVATRETPETSTLLAGKRTADGSEFEKRTADGSEFESPKKKAKVE

SEQ ID NO: 2491 - protein, 2094 aa, synthetic construct
MPAAKRVKLDGGDKKYSIGLDIGTNSVGWAVITDEYKVPSKKFKVLGNTDRHSIKKNLIGALLFDSGETAEATRLKRTARRRYTRRKNRICYLQEIFSNEMAKVDDSFFHRLEESFLVEEDKKHERHPIFGNIVDEVAYHEKYPTIYHLRKKLVDSTDKADLRLIYLALAHMIKFRGHFLIEGDLNPDNSDVDKLFIQLVQTYNQLFEENPINASGVDAKAILSARLSKSRRLENLIAQLPGEKKNGLFGNLIALSLGLTPNFKSNFDLAEDAKLQLSKDTYDDDLDNLLAQIGDQYADLFLAAKNLSDAILLSDILRVNTEITKAPLSASMIKRYDEHHQDLTLLKALVRQQLPEKYKEIFFDQSKNGYAGYIDGGASQEEFYKFIKPILEKMDGTEELLVKLNREDLLRKQRTFDNGSIPHQIHLGELHAILRRQEDFYPFLKDNREKIEKILTFRIPYYVGPLARGNSRFAWMTRKSEETITPWNFEEVVDKGASAQSFIERMTNFDKNLPNEKVLPKHSLLYEYFTVYNELTKVKYVTEGMRKPAFLSGEQKKAIVDLLFKTNRKVTVKQLKEDYFKKIECFDSVEISGVEDRFNASLGTYHDLLKIIKDKDFLDNEENEDILEDIVLTLTLFEDREMIEERLKTYAHLFDDKVMKQLKRRRYTGWGRLSRKLINGIRDKQSGKTILDFLKSDGFANRNFMQLIHDDSLTFKEDIQKAQVSGQGDSLHEHIANLAGSPAIKKGILQTVKVVDELVKVMGRHKPENIVIEMARENQTTQKGQKNSRERMKRIEEGIKELGSQILKEHPVENTQLQNEKLYLYYLQNGRDMYVDQELDINRLSDYDVDHIVPQSFLKDDSIDNKVLTRSDKARGKSDNVPSEEVVKKMKNYWRQLLNAKLITQRKFDNLTKAERGGLSELDKAGFIKRQLVETRQITKHVAQILDSRMNTKYDENDKLIREVKVITLKSKLVSDFRKDFQFYKVREINNYHHAHDAYLNAVVGTALIKKYPKLESEFVYGDYKVYDVRKMIAKSEQEIGKATAKYFFYSNIMNFFKTEITLANGEIRKRPLIETNGETGEIVWDKGRDFATVRKVLSMPQVNIVKKTEVQTGGFSKESILPKRNSDKLIARKKDWDPKKYGGFDSPTVAYSVLVVAKVEKGKSKKLKSVKELLGITIMERSSFEKNPIDFLEAKGYKEVKKDLIIKLPKYSLFELENGRKRMLASAGELQKGNELALPSKYVNFLYLASHYEKLKGSPEDNEQKQLFVEQHKHYLDEIIEQISEFSKRVILADANLDKVLSAYNKHRDKPIREQAENIIHLFTLTNLGAPAAFKYFDTTIDRKRYTSTKEVLDATLIHQSITGLYETRIDLSQLGGDGGGSSGGSPAPGGTLNIEDEYRLHETSKGPDVPLGSTWLSDFPQAWAETGGMGLAVRQAPLIIPLKATSTPVSIKQYPMSQEARLGIKPHIQRLLDQGILVPCQSPWNTPLLPVKKPGTNDYRPVQDLREVNKRVEDIHPTVPNPYNLLSGLPPSHQWYTVLDLKDAFFCLRLHPTSQSLFAFEWRDPEMGISGQLTWTRLPQGFKNSPTLFNEALHRDLADFRIQHPDLILLQYVDDLLLAATSELDCQQGTRALLQTLGDLGYRASAKKAQICQKQVKYLGYLLKEGQRWLTEARKETVMGQPTPKTPRQLREFLGTAGFCRLWIPGFAEMAAPLYPLTKPGTLFEWGPDQQKAYQEIKQALLTAPALGLPDLTKPFELFVDEKQGYAKGVLTQKLGPWRRPVAYLSKKLDPVAAGWPPCLRMVAAIAVLTKDAGKLTMGQPLVILAPHAVEALVKQPPDRWLSNARMTHYQALLLDTDRVQFGPIVALNPATLLPLPEEGLQHDCLDILAEAHGTRPDLTDQPLPDADHTWYTDGSSFLQEGQRKAGAAVTTETEVVWAKALPAGTSAQRAELIALTQALKMAEGKKLNVYTDSRYAFATAHIHGEIYRRRGWLTSEGKEIKNKDEILALLKALFLPKRLSIIHCPGHQKGNRAEARGNRMADQAAREVATRETPETSTLLAGKRTADGSEFEKRTADGSEFESPKKKAKVE

SEQ ID NO: 2492 - protein, 2091 aa, synthetic construct
MPAAKRVKLDGGDKKYSIGLDIGTNSVGWAVITDEYKVPSKKFKVLGNTDRHSIKKNLIGALLFDSGETAEATRLKRTARRRYTRRKNRICYLQEIFSNEMAKVDDSFFHRLEESFLVEEDKKHERHPIFGNIVDEVAYHEKYPTIYHLRKKLVDSTDKADLRLIYLALAHMIKFRGHFLIEGDLNPDNSDVDKLFIQLVQTYNQLFEENPINASGVDAKAILSARLSKSRRLENLIAQLPGEKKNGLFGNLIALSLGLTPNFKSNFDLAEDAKLQLSKDTYDDDLDNLLAQIGDQYADLFLAAKNLSDAILLSDILRVNTEITKAPLSASMIKRYDEHHQDLTLLKALVRQQLPEKYKEIFFDQSKNGYAGYIDGGASQEEFYKFIKPILEKMDGTEELLVKLNREDLLRKQRTFDNGSIPHQIHLGELHAILRRQEDFYPFLKDNREKIEKILTFRIPYYVGPLARGNSRFAWMTRKSEETITPWNFEEVVDKGASAQSFIERMTNFDKNLPNEKVLPKHSLLYEYFTVYNELTKVKYVTEGMRKPAFLSGEQKKAIVDLLFKTNRKVTVKQLKEDYFKKIECFDSVEISGVEDRFNASLGTYHDLLKIIKDKDFLDNEENEDILEDIVLTLTLFEDREMIEERLKTYAHLFDDKVMKQLKRRRYTGWGRLSRKLINGIRDKQSGKTILDFLKSDGFANRNFMQLIHDDSLTFKEDIQKAQVSGQGDSLHEHIANLAGSPAIKKGILQTVKVVDELVKVMGRHKPENIVIEMARENQTTQKGQKNSRERMKRIEEGIKELGSQILKEHPVENTQLQNEKLYLYYLQNGRDMYVDQELDINRLSDYDVDHIVPQSFLKDDSIDNKVLTRSDKARGKSDNVPSEEVVKKMKNYWRQLLNAKLITQRKFDNLTKAERGGLSELDKAGFIKRQLVETRQITKHVAQILDSRMNTKYDENDKLIREVKVITLKSKLVSDFRKDFQFYKVREINNYHHAHDAYLNAVVGTALIKKYPKLESEFVYGDYKVYDVRKMIAKSEQEIGKATAKYFFYSNIMNFFKTEITLANGEIRKRPLIETNGETGEIVWDKGRDFATVRKVLSMPQVNIVKKTEVQTGGFSKESILPKRNSDKLIARKKDWDPKKYGGFDSPTVAYSVLVVAKVEKGKSKKLKSVKELLGITIMERSSFEKNPIDFLEAKGYKEVKKDLIIKLPKYSLFELENGRKRMLASAGELQKGNELALPSKYVNFLYLASHYEKLKGSPEDNEQKQLFVEQHKHYLDEIIEQISEFSKRVILADANLDKVLSAYNKHRDKPIREQAENIIHLFTLTNLGAPAAFKYFDTTIDRKRYTSTKEVLDATLIHQSITGLYETRIDLSQLGGDGGPAPGGGGGTLNIEDEYRLHETSKGPDVPLGSTWLSDFPQAWAETGGMGLAVRQAPLIIPLKATSTPVSIKQYPMSQEARLGIKPHIQRLLDQGILVPCQSPWNTPLLPVKKPGTNDYRPVQDLREVNKRVEDIHPTVPNPYNLLSGLPPSHQWYTVLDLKDAFFCLRLHPTSQSLFAFEWRDPEMGISGQLTWTRLPQGFKNSPTLFNEALHRDLADFRIQHPDLILLQYVDDLLLAATSELDCQQGTRALLQTLGDLGYRASAKKAQICQKQVKYLGYLLKEGQRWLTEARKETVMGQPTPKTPRQLREFLGTAGFCRLWIPGFAEMAAPLYPLTKPGTLFEWGPDQQKAYQEIKQALLTAPALGLPDLTKPFELFVDEKQGYAKGVLTQKLGPWRRPVAYLSKKLDPVAAGWPPCLRMVAAIAVLTKDAGKLTMGQPLVILAPHAVEALVKQPPDRWLSNARMTHYQALLLDTDRVQFGPIVALNPATLLPLPEEGLQHDCLDILAEAHGTRPDLTDQPLPDADHTWYTDGSSFLQEGQRKAGAAVTTETEVVWAKALPAGTSAQRAELIALTQALKMAEGKKLNVYTDSRYAFATAHIHGEIYRRRGWLTSEGKEIKNKDEILALLKALFLPKRLSIIHCPGHQKGNRAEARGNRMADQAAREVATRETPETSTLLAGKRTADGSEFEKRTADGSEFESPKKKAKVE

SEQ ID NO: 2493 - protein, 2094 aa, synthetic construct
MPAAKRVKLDGGDKKYSIGLDIGTNSVGWAVITDEYKVPSKKFKVLGNTDRHSIKKNLIGALLFDSGETAEATRLKRTARRRYTRRKNRICYLQEIFSNEMAKVDDSFFHRLEESFLVEEDKKHERHPIFGNIVDEVAYHEKYPTIYHLRKKLVDSTDKADLRLIYLALAHMIKFRGHFLIEGDLNPDNSDVDKLFIQLVQTYNQLFEENPINASGVDAKAILSARLSKSRRLENLIAQLPGEKKNGLFGNLIALSLGLTPNFKSNFDLAEDAKLQLSKDTYDDDLDNLLAQIGDQYADLFLAAKNLSDAILLSDILRVNTEITKAPLSASMIKRYDEHHQDLTLLKALVRQQLPEKYKEIFFDQSKNGYAGYIDGGASQEEFYKFIKPILEKMDGTEELLVKLNREDLLRKQRTFDNGSIPHQIHLGELHAILRRQEDFYPFLKDNREKIEKILTFRIPYYVGPLARGNSRFAWMTRKSEETITPWNFEEVVDKGASAQSFIERMTNFDKNLPNEKVLPKHSLLYEYFTVYNELTKVKYVTEGMRKPAFLSGEQKKAIVDLLFKTNRKVTVKQLKEDYFKKIECFDSVEISGVEDRFNASLGTYHDLLKIIKDKDFLDNEENEDILEDIVLTLTLFEDREMIEERLKTYAHLFDDKVMKQLKRRRYTGWGRLSRKLINGIRDKQSGKTILDFLKSDGFANRNFMQLIHDDSLTFKEDIQKAQVSGQGDSLHEHIANLAGSPAIKKGILQTVKVVDELVKVMGRHKPENIVIEMARENQTTQKGQKNSRERMKRIEEGIKELGSQILKEHPVENTQLQNEKLYLYYLQNGRDMYVDQELDINRLSDYDVDHIVPQSFLKDDSIDNKVLTRSDKARGKSDNVPSEEVVKKMKNYWRQLLNAKLITQRKFDNLTKAERGGLSELDKAGFIKRQLVETRQITKHVAQILDSRMNTKYDENDKLIREVKVITLKSKLVSDFRKDFQFYKVREINNYHHAHDAYLNAVVGTALIKKYPKLESEFVYGDYKVYDVRKMIAKSEQEIGKATAKYFFYSNIMNFFKTEITLANGEIRKRPLIETNGETGEIVWDKGRDFATVRKVLSMPQVNIVKKTEVQTGGFSKESILPKRNSDKLIARKKDWDPKKYGGFDSPTVAYSVLVVAKVEKGKSKKLKSVKELLGITIMERSSFEKNPIDFLEAKGYKEVKKDLIIKLPKYSLFELENGRKRMLASAGELQKGNELALPSKYVNFLYLASHYEKLKGSPEDNEQKQLFVEQHKHYLDEIIEQISEFSKRVILADANLDKVLSAYNKHRDKPIREQAENIIHLFTLTNLGAPAAFKYFDTTIDRKRYTSTKEVLDATLIHQSITGLYETRIDLSQLGGDGGPAPGGSGGGGGTLNIEDEYRLHETSKGPDVPLGSTWLSDFPQAWAETGGMGLAVRQAPLIIPLKATSTPVSIKQYPMSQEARLGIKPHIQRLLDQGILVPCQSPWNTPLLPVKKPGTNDYRPVQDLREVNKRVEDIHPTVPNPYNLLSGLPPSHQWYTVLDLKDAFFCLRLHPTSQSLFAFEWRDPEMGISGQLTWTRLPQGFKNSPTLFNEALHRDLADFRIQHPDLILLQYVDDLLLAATSELDCQQGTRALLQTLGDLGYRASAKKAQICQKQVKYLGYLLKEGQRWLTEARKETVMGQPTPKTPRQLREFLGTAGFCRLWIPGFAEMAAPLYPLTKPGTLFEWGPDQQKAYQEIKQALLTAPALGLPDLTKPFELFVDEKQGYAKGVLTQKLGPWRRPVAYLSKKLDPVAAGWPPCLRMVAAIAVLTKDAGKLTMGQPLVILAPHAVEALVKQPPDRWLSNARMTHYQALLLDTDRVQFGPIVALNPATLLPLPEEGLQHDCLDILAEAHGTRPDLTDQPLPDADHTWYTDGSSFLQEGQRKAGAAVTTETEVVWAKALPAGTSAQRAELIALTQALKMAEGKKLNVYTDSRYAFATAHIHGEIYRRRGWLTSEGKEIKNKDEILALLKALFLPKRLSIIHCPGHQKGNRAEARGNRMADQAAREVATRETPETSTLLAGKRTADGSEFEKRTADGSEFESPKKKAKVE

SEQ ID NO: 2494 - protein, 2096 aa, synthetic construct
MPAAKRVKLDGGDKKYSIGLDIGTNSVGWAVITDEYKVPSKKFKVLGNTDRHSIKKNLIGALLFDSGETAEATRLKRTARRRYTRRKNRICYLQEIFSNEMAKVDDSFFHRLEESFLVEEDKKHERHPIFGNIVDEVAYHEKYPTIYHLRKKLVDSTDKADLRLIYLALAHMIKFRGHFLIEGDLNPDNSDVDKLFIQLVQTYNQLFEENPINASGVDAKAILSARLSKSRRLENLIAQLPGEKKNGLFGNLIALSLGLTPNFKSNFDLAEDAKLQLSKDTYDDDLDNLLAQIGDQYADLFLAAKNLSDAILLSDILRVNTEITKAPLSASMIKRYDEHHQDLTLLKALVRQQLPEKYKEIFFDQSKNGYAGYIDGGASQEEFYKFIKPILEKMDGTEELLVKLNREDLLRKQRTFDNGSIPHQIHLGELHAILRRQEDFYPFLKDNREKIEKILTFRIPYYVGPLARGNSRFAWMTRKSEETITPWNFEEVVDKGASAQSFIERMTNFDKNLPNEKVLPKHSLLYEYFTVYNELTKVKYVTEGMRKPAFLSGEQKKAIVDLLFKTNRKVTVKQLKEDYFKKIECFDSVEISGVEDRFNASLGTYHDLLKIIKDKDFLDNEENEDILEDIVLTLTLFEDREMIEERLKTYAHLFDDKVMKQLKRRRYTGWGRLSRKLINGIRDKQSGKTILDFLKSDGFANRNFMQLIHDDSLTFKEDIQKAQVSGQGDSLHEHIANLAGSPAIKKGILQTVKVVDELVKVMGRHKPENIVIEMARENQTTQKGQKNSRERMKRIEEGIKELGSQILKEHPVENTQLQNEKLYLYYLQNGRDMYVDQELDINRLSDYDVDHIVPQSFLKDDSIDNKVLTRSDKARGKSDNVPSEEVVKKMKNYWRQLLNAKLITQRKFDNLTKAERGGLSELDKAGFIKRQLVETRQITKHVAQILDSRMNTKYDENDKLIREVKVITLKSKLVSDFRKDFQFYKVREINNYHHAHDAYLNAVVGTALIKKYPKLESEFVYGDYKVYDVRKMIAKSEQEIGKATAKYFFYSNIMNFFKTEITLANGEIRKRPLIETNGETGEIVWDKGRDFATVRKVLSMPQVNIVKKTEVQTGGFSKESILPKRNSDKLIARKKDWDPKKYGGFDSPTVAYSVLVVAKVEKGKSKKLKSVKELLGITIMERSSFEKNPIDFLEAKGYKEVKKDLIIKLPKYSLFELENGRKRMLASAGELQKGNELALPSKYVNFLYLASHYEKLKGSPEDNEQKQLFVEQHKHYLDEIIEQISEFSKRVILADANLDKVLSAYNKHRDKPIREQAENIIHLFTLTNLGAPAAFKYFDTTIDRKRYTSTKEVLDATLIHQSITGLYETRIDLSQLGGDGGPAPEAAAKGGGGGTLNIEDEYRLHETSKGPDVPLGSTWLSDFPQAWAETGGMGLAVRQAPLIIPLKATSTPVSIKQYPMSQEARLGIKPHIQRLLDQGILVPCQSPWNTPLLPVKKPGTNDYRPVQDLREVNKRVEDIHPTVPNPYNLLSGLPPSHQWYTVLDLKDAFFCLRLHPTSQSLFAFEWRDPEMGISGQLTWTRLPQGFKNSPTLFNEALHRDLADFRIQHPDLILLQYVDDLLLAATSELDCQQGTRALLQTLGDLGYRASAKKAQICQKQVKYLGYLLKEGQRWLTEARKETVMGQPTPKTPRQLREFLGTAGFCRLWIPGFAEMAAPLYPLTKPGTLFEWGPDQQKAYQEIKQALLTAPALGLPDLTKPFELFVDEKQGYAKGVLTQKLGPWRRPVAYLSKKLDPVAAGWPPCLRMVAAIAVLTKDAGKLTMGQPLVILAPHAVEALVKQPPDRWLSNARMTHYQALLLDTDRVQFGPIVALNPATLLPLPEEGLQHDCLDILAEAHGTRPDLTDQPLPDADHTWYTDGSSFLQEGQRKAGAAVTTETEVVWAKALPAGTSAQRAELIALTQALKMAEGKKLNVYTDSRYAFATAHIHGEIYRRRGWLTSEGKEIKNKDEILALLKALFLPKRLSIIHCPGHQKGNRAEARGNRMADQAAREVATRETPETSTLLAGKRTADGSEFEKRTADGSEFESPKKKAKVE

SEQ ID NO: 2495 - protein, 2096 aa, synthetic construct
MPAAKRVKLDGGDKKYSIGLDIGTNSVGWAVITDEYKVPSKKFKVLGNTDRHSIKKNLIGALLFDSGETAEATRLKRTARRRYTRRKNRICYLQEIFSNEMAKVDDSFFHRLEESFLVEEDKKHERHPIFGNIVDEVAYHEKYPTIYHLRKKLVDSTDKADLRLIYLALAHMIKFRGHFLIEGDLNPDNSDVDKLFIQLVQTYNQLFEENPINASGVDAKAILSARLSKSRRLENLIAQLPGEKKNGLFGNLIALSLGLTPNFKSNFDLAEDAKLQLSKDTYDDDLDNLLAQIGDQYADLFLAAKNLSDAILLSDILRVNTEITKAPLSASMIKRYDEHHQDLTLLKALVRQQLPEKYKEIFFDQSKNGYAGYIDGGASQEEFYKFIKPILEKMDGTEELLVKLNREDLLRKQRTFDNGSIPHQIHLGELHAILRRQEDFYPFLKDNREKIEKILTFRIPYYVGPLARGNSRFAWMTRKSEETITPWNFEEVVDKGASAQSFIERMTNFDKNLPNEKVLPKHSLLYEYFTVYNELTKVKYVTEGMRKPAFLSGEQKKAIVDLLFKTNRKVTVKQLKEDYFKKIECFDSVEISGVEDRFNASLGTYHDLLKIIKDKDFLDNEENEDILEDIVLTLTLFEDREMIEERLKTYAHLFDDKVMKQLKRRRYTGWGRLSRKLINGIRDKQSGKTILDFLKSDGFANRNFMQLIHDDSLTFKEDIQKAQVSGQGDSLHEHIANLAGSPAIKKGILQTVKVVDELVKVMGRHKPENIVIEMARENQTTQKGQKNSRERMKRIEEGIKELGSQILKEHPVENTQLQNEKLYLYYLQNGRDMYVDQELDINRLSDYDVDHIVPQSFLKDDSIDNKVLTRSDKARGKSDNVPSEEVVKKMKNYWRQLLNAKLITQRKFDNLTKAERGGLSELDKAGFIKRQLVETRQITKHVAQILDSRMNTKYDENDKLIREVKVITLKSKLVSDFRKDFQFYKVREINNYHHAHDAYLNAVVGTALIKKYPKLESEFVYGDYKVYDVRKMIAKSEQEIGKATAKYFFYSNIMNFFKTEITLANGEIRKRPLIETNGETGEIVWDKGRDFATVRKVLSMPQVNIVKKTEVQTGGFSKESILPKRNSDKLIARKKDWDPKKYGGFDSPTVAYSVLVVAKVEKGKSKKLKSVKELLGITIMERSSFEKNPIDFLEAKGYKEVKKDLIIKLPKYSLFELENGRKRMLASAGELQKGNELALPSKYVNFLYLASHYEKLKGSPEDNEQKQLFVEQHKHYLDEIIEQISEFSKRVILADANLDKVLSAYNKHRDKPIREQAENIIHLFTLTNLGAPAAFKYFDTTIDRKRYTSTKEVLDATLIHQSITGLYETRIDLSQLGGDGGEAAAKPAPGGSGGTLNIEDEYRLHETSKGPDVPLGSTWLSDFPQAWAETGGMGLAVRQAPLIIPLKATSTPVSIKQYPMSQEARLGIKPHIQRLLDQGILVPCQSPWNTPLLPVKKPGTNDYRPVQDLREVNKRVEDIHPTVPNPYNLLSGLPPSHQWYTVLDLKDAFFCLRLHPTSQSLFAFEWRDPEMGISGQLTWTRLPQGFKNSPTLFNEALHRDLADFRIQHPDLILLQYVDDLLLAATSELDCQQGTRALLQTLGDLGYRASAKKAQICQKQVKYLGYLLKEGQRWLTEARKETVMGQPTPKTPRQLREFLGTAGFCRLWIPGFAEMAAPLYPLTKPGTLFEWGPDQQKAYQEIKQALLTAPALGLPDLTKPFELFVDEKQGYAKGVLTQKLGPWRRPVAYLSKKLDPVAAGWPPCLRMVAAIAVLTKDAGKLTMGQPLVILAPHAVEALVKQPPDRWLSNARMTHYQALLLDTDRVQFGPIVALNPATLLPLPEEGLQHDCLDILAEAHGTRPDLTDQPLPDADHTWYTDGSSFLQEGQRKAGAAVTTETEVVWAKALPAGTSAQRAELIALTQALKMAEGKKLNVYTDSRYAFATAHIHGEIYRRRGWLTSEGKEIKNKDEILALLKALFLPKRLSIIHCPGHQKGNRAEARGNRMADQAAREVATRETPETSTLLAGKRTADGSEFEKRTADGSEFESPKKKAKVE

SEQ ID NO: 2496 - protein, 2094 aa, synthetic construct
MPAAKRVKLDGGDKKYSIGLDIGTNSVGWAVITDEYKVPSKKFKVLGNTDRHSIKKNLIGALLFDSGETAEATRLKRTARRRYTRRKNRICYLQEIFSNEMAKVDDSFFHRLEESFLVEEDKKHERHPIFGNIVDEVAYHEKYPTIYHLRKKLVDSTDKADLRLIYLALAHMIKFRGHFLIEGDLNPDNSDVDKLFIQLVQTYNQLFEENPINASGVDAKAILSARLSKSRRLENLIAQLPGEKKNGLFGNLIALSLGLTPNFKSNFDLAEDAKLQLSKDTYDDDLDNLLAQIGDQYADLFLAAKNLSDAILLSDILRVNTEITKAPLSASMIKRYDEHHQDLTLLKALVRQQLPEKYKEIFFDQSKNGYAGYIDGGASQEEFYKFIKPILEKMDGTEELLVKLNREDLLRKQRTFDNGSIPHQIHLGELHAILRRQEDFYPFLKDNREKIEKILTFRIPYYVGPLARGNSRFAWMTRKSEETITPWNFEEVVDKGASAQSFIERMTNFDKNLPNEKVLPKHSLLYEYFTVYNELTKVKYVTEGMRKPAFLSGEQKKAIVDLLFKTNRKVTVKQLKEDYFKKIECFDSVEISGVEDRFNASLGTYHDLLKIIKDKDFLDNEENEDILEDIVLTLTLFEDREMIEERLKTYAHLFDDKVMKQLKRRRYTGWGRLSRKLINGIRDKQSGKTILDFLKSDGFANRNFMQLIHDDSLTFKEDIQKAQVSGQGDSLHEHIANLAGSPAIKKGILQTVKVVDELVKVMGRHKPENIVIEMARENQTTQKGQKNSRERMKRIEEGIKELGSQILKEHPVENTQLQNEKLYLYYLQNGRDMYVDQELDINRLSDYDVDHIVPQSFLKDDSIDNKVLTRSDKARGKSDNVPSEEVVKKMKNYWRQLLNAKLITQRKFDNLTKAERGGLSELDKAGFIKRQLVETRQITKHVAQILDSRMNTKYDENDKLIREVKVITLKSKLVSDFRKDFQFYKVREINNYHHAHDAYLNAVVGTALIKKYPKLESEFVYGDYKVYDVRKMIAKSEQEIGKATAKYFFYSNIMNFFKTEITLANGEIRKRPLIETNGETGEIVWDKGRDFATVRKVLSMPQVNIVKKTEVQTGGFSKESILPKRNSDKLIARKKDWDPKKYGGFDSPTVAYSVLVVAKVEKGKSKKLKSVKELLGITIMERSSFEKNPIDFLEAKGYKEVKKDLIIKLPKYSLFELENGRKRMLASAGELQKGNELALPSKYVNFLYLASHYEKLKGSPEDNEQKQLFVEQHKHYLDEIIEQISEFSKRVILADANLDKVLSAYNKHRDKPIREQAENIIHLFTLTNLGAPAAFKYFDTTIDRKRYTSTKEVLDATLIHQSITGLYETRIDLSQLGGDGGGGGPAPGGSGGTLNIEDEYRLHETSKGPDVPLGSTWLSDFPQAWAETGGMGLAVRQAPLIIPLKATSTPVSIKQYPMSQEARLGIKPHIQRLLDQGILVPCQSPWNTPLLPVKKPGTNDYRPVQDLREVNKRVEDIHPTVPNPYNLLSGLPPSHQWYTVLDLKDAFFCLRLHPTSQSLFAFEWRDPEMGISGQLTWTRLPQGFKNSPTLFNEALHRDLADFRIQHPDLILLQYVDDLLLAATSELDCQQGTRALLQTLGDLGYRASAKKAQICQKQVKYLGYLLKEGQRWLTEARKETVMGQPTPKTPRQLREFLGTAGFCRLWIPGFAEMAAPLYPLTKPGTLFEWGPDQQKAYQEIKQALLTAPALGLPDLTKPFELFVDEKQGYAKGVLTQKLGPWRRPVAYLSKKLDPVAAGWPPCLRMVAAIAVLTKDAGKLTMGQPLVILAPHAVEALVKQPPDRWLSNARMTHYQALLLDTDRVQFGPIVALNPATLLPLPEEGLQHDCLDILAEAHGTRPDLTDQPLPDADHTWYTDGSSFLQEGQRKAGAAVTTETEVVWAKALPAGTSAQRAELIALTQALKMAEGKKLNVYTDSRYAFATAHIHGEIYRRRGWLTSEGKEIKNKDEILALLKALFLPKRLSIIHCPGHQKGNRAEARGNRMADQAAREVATRETPETSTLLAGKRTADGSEFEKRTADGSEFESPKKKAKVE

SEQ ID NO: 2497 - protein, 2091 aa, synthetic construct
MPAAKRVKLDGGDKKYSIGLDIGTNSVGWAVITDEYKVPSKKFKVLGNTDRHSIKKNLIGALLFDSGETAEATRLKRTARRRYTRRKNRICYLQEIFSNEMAKVDDSFFHRLEESFLVEEDKKHERHPIFGNIVDEVAYHEKYPTIYHLRKKLVDSTDKADLRLIYLALAHMIKFRGHFLIEGDLNPDNSDVDKLFIQLVQTYNQLFEENPINASGVDAKAILSARLSKSRRLENLIAQLPGEKKNGLFGNLIALSLGLTPNFKSNFDLAEDAKLQLSKDTYDDDLDNLLAQIGDQYADLFLAAKNLSDAILLSDILRVNTEITKAPLSASMIKRYDEHHQDLTLLKALVRQQLPEKYKEIFFDQSKNGYAGYIDGGASQEEFYKFIKPILEKMDGTEELLVKLNREDLLRKQRTFDNGSIPHQIHLGELHAILRRQEDFYPFLKDNREKIEKILTFRIPYYVGPLARGNSRFAWMTRKSEETITPWNFEEVVDKGASAQSFIERMTNFDKNLPNEKVLPKHSLLYEYFTVYNELTKVKYVTEGMRKPAFLSGEQKKAIVDLLFKTNRKVTVKQLKEDYFKKIECFDSVEISGVEDRFNASLGTYHDLLKIIKDKDFLDNEENEDILEDIVLTLTLFEDREMIEERLKTYAHLFDDKVMKQLKRRRYTGWGRLSRKLINGIRDKQSGKTILDFLKSDGFANRNFMQLIHDDSLTFKEDIQKAQVSGQGDSLHEHIANLAGSPAIKKGILQTVKVVDELVKVMGRHKPENIVIEMARENQTTQKGQKNSRERMKRIEEGIKELGSQILKEHPVENTQLQNEKLYLYYLQNGRDMYVDQELDINRLSDYDVDHIVPQSFLKDDSIDNKVLTRSDKARGKSDNVPSEEVVKKMKNYWRQLLNAKLITQRKFDNLTKAERGGLSELDKAGFIKRQLVETRQITKHVAQILDSRMNTKYDENDKLIREVKVITLKSKLVSDFRKDFQFYKVREINNYHHAHDAYLNAVVGTALIKKYPKLESEFVYGDYKVYDVRKMIAKSEQEIGKATAKYFFYSNIMNFFKTEITLANGEIRKRPLIETNGETGEIVWDKGRDFATVRKVLSMPQVNIVKKTEVQTGGFSKESILPKRNSDKLIARKKDWDPKKYGGFDSPTVAYSVLVVAKVEKGKSKKLKSVKELLGITIMERSSFEKNPIDFLEAKGYKEVKKDLIIKLPKYSLFELENGRKRMLASAGELQKGNELALPSKYVNFLYLASHYEKLKGSPEDNEQKQLFVEQHKHYLDEIIEQISEFSKRVILADANLDKVLSAYNKHRDKPIREQAENIIHLFTLTNLGAPAAFKYFDTTIDRKRYTSTKEVLDATLIHQSITGLYETRIDLSQLGGDGGPAPGGSGGTLNIEDEYRLHETSKGPDVPLGSTWLSDFPQAWAETGGMGLAVRQAPLIIPLKATSTPVSIKQYPMSQEARLGIKPHIQRLLDQGILVPCQSPWNTPLLPVKKPGTNDYRPVQDLREVNKRVEDIHPTVPNPYNLLSGLPPSHQWYTVLDLKDAFFCLRLHPTSQSLFAFEWRDPEMGISGQLTWTRLPQGFKNSPTLFNEALHRDLADFRIQHPDLILLQYVDDLLLAATSELDCQQGTRALLQTLGDLGYRASAKKAQICQKQVKYLGYLLKEGQRWLTEARKETVMGQPTPKTPRQLREFLGTAGFCRLWIPGFAEMAAPLYPLTKPGTLFEWGPDQQKAYQEIKQALLTAPALGLPDLTKPFELFVDEKQGYAKGVLTQKLGPWRRPVAYLSKKLDPVAAGWPPCLRMVAAIAVLTKDAGKLTMGQPLVILAPHAVEALVKQPPDRWLSNARMTHYQALLLDTDRVQFGPIVALNPATLLPLPEEGLQHDCLDILAEAHGTRPDLTDQPLPDADHTWYTDGSSFLQEGQRKAGAAVTTETEVVWAKALPAGTSAQRAELIALTQALKMAEGKKLNVYTDSRYAFATAHIHGEIYRRRGWLTSEGKEIKNKDEILALLKALFLPKRLSIIHCPGHQKGNRAEARGNRMADQAAREVATRETPETSTLLAGKRTADGSEFEKRTADGSEFESPKKKAKVE

SEQ ID NO: 2498 - protein, 2094 aa, synthetic construct
MPAAKRVKLDGGDKKYSIGLDIGTNSVGWAVITDEYKVPSKKFKVLGNTDRHSIKKNLIGALLFDSGETAEATRLKRTARRRYTRRKNRICYLQEIFSNEMAKVDDSFFHRLEESFLVEEDKKHERHPIFGNIVDEVAYHEKYPTIYHLRKKLVDSTDKADLRLIYLALAHMIKFRGHFLIEGDLNPDNSDVDKLFIQLVQTYNQLFEENPINASGVDAKAILSARLSKSRRLENLIAQLPGEKKNGLFGNLIALSLGLTPNFKSNFDLAEDAKLQLSKDTYDDDLDNLLAQIGDQYADLFLAAKNLSDAILLSDILRVNTEITKAPLSASMIKRYDEHHQDLTLLKALVRQQLPEKYKEIFFDQSKNGYAGYIDGGASQEEFYKFIKPILEKMDGTEELLVKLNREDLLRKQRTFDNGSIPHQIHLGELHAILRRQEDFYPFLKDNREKIEKILTFRIPYYVGPLARGNSRFAWMTRKSEETITPWNFEEVVDKGASAQSFIERMTNFDKNLPNEKVLPKHSLLYEYFTVYNELTKVKYVTEGMRKPAFLSGEQKKAIVDLLFKTNRKVTVKQLKEDYFKKIECFDSVEISGVEDRFNASLGTYHDLLKIIKDKDFLDNEENEDILEDIVLTLTLFEDREMIEERLKTYAHLFDDKVMKQLKRRRYTGWGRLSRKLINGIRDKQSGKTILDFLKSDGFANRNFMQLIHDDSLTFKEDIQKAQVSGQGDSLHEHIANLAGSPAIKKGILQTVKVVDELVKVMGRHKPENIVIEMARENQTTQKGQKNSRERMKRIEEGIKELGSQILKEHPVENTQLQNEKLYLYYLQNGRDMYVDQELDINRLSDYDVDHIVPQSFLKDDSIDNKVLTRSDKARGKSDNVPSEEVVKKMKNYWRQLLNAKLITQRKFDNLTKAERGGLSELDKAGFIKRQLVETRQITKHVAQILDSRMNTKYDENDKLIREVKVITLKSKLVSDFRKDFQFYKVREINNYHHAHDAYLNAVVGTALIKKYPKLESEFVYGDYKVYDVRKMIAKSEQEIGKATAKYFFYSNIMNFFKTEITLANGEIRKRPLIETNGETGEIVWDKGRDFATVRKVLSMPQVNIVKKTEVQTGGFSKESILPKRNSDKLIARKKDWDPKKYGGFDSPTVAYSVLVVAKVEKGKSKKLKSVKELLGITIMERSSFEKNPIDFLEAKGYKEVKKDLIIKLPKYSLFELENGRKRMLASAGELQKGNELALPSKYVNFLYLASHYEKLKGSPEDNEQKQLFVEQHKHYLDEIIEQISEFSKRVILADANLDKVLSAYNKHRDKPIREQAENIIHLFTLTNLGAPAAFKYFDTTIDRKRYTSTKEVLDATLIHQSITGLYETRIDLSQLGGDGGGGGGGSPAPGGTLNIEDEYRLHETSKGPDVPLGSTWLSDFPQAWAETGGMGLAVRQAPLIIPLKATSTPVSIKQYPMSQEARLGIKPHIQRLLDQGILVPCQSPWNTPLLPVKKPGTNDYRPVQDLREVNKRVEDIHPTVPNPYNLLSGLPPSHQWYTVLDLKDAFFCLRLHPTSQSLFAFEWRDPEMGISGQLTWTRLPQGFKNSPTLFNEALHRDLADFRIQHPDLILLQYVDDLLLAATSELDCQQGTRALLQTLGDLGYRASAKKAQICQKQVKYLGYLLKEGQRWLTEARKETVMGQPTPKTPRQLREFLGTAGFCRLWIPGFAEMAAPLYPLTKPGTLFEWGPDQQKAYQEIKQALLTAPALGLPDLTKPFELFVDEKQGYAKGVLTQKLGPWRRPVAYLSKKLDPVAAGWPPCLRMVAAIAVLTKDAGKLTMGQPLVILAPHAVEALVKQPPDRWLSNARMTHYQALLLDTDRVQFGPIVALNPATLLPLPEEGLQHDCLDILAEAHGTRPDLTDQPLPDADHTWYTDGSSFLQEGQRKAGAAVTTETEVVWAKALPAGTSAQRAELIALTQALKMAEGKKLNVYTDSRYAFATAHIHGEIYRRRGWLTSEGKEIKNKDEILALLKALFLPKRLSIIHCPGHQKGNRAEARGNRMADQAAREVATRETPETSTLLAGKRTADGSEFEKRTADGSEFESPKKKAKVE

SEQ ID NO: 2499 - protein, 2094 aa, synthetic construct
MPAAKRVKLDGGDKKYSIGLDIGTNSVGWAVITDEYKVPSKKFKVLGNTDRHSIKKNLIGALLFDSGETAEATRLKRTARRRYTRRKNRICYLQEIFSNEMAKVDDSFFHRLEESFLVEEDKKHERHPIFGNIVDEVAYHEKYPTIYHLRKKLVDSTDKADLRLIYLALAHMIKFRGHFLIEGDLNPDNSDVDKLFIQLVQTYNQLFEENPINASGVDAKAILSARLSKSRRLENLIAQLPGEKKNGLFGNLIALSLGLTPNFKSNFDLAEDAKLQLSKDTYDDDLDNLLAQIGDQYADLFLAAKNLSDAILLSDILRVNTEITKAPLSASMIKRYDEHHQDLTLLKALVRQQLPEKYKEIFFDQSKNGYAGYIDGGASQEEFYKFIKPILEKMDGTEELLVKLNREDLLRKQRTFDNGSIPHQIHLGELHAILRRQEDFYPFLKDNREKIEKILTFRIPYYVGPLARGNSRFAWMTRKSEETITPWNFEEVVDKGASAQSFIERMTNFDKNLPNEKVLPKHSLLYEYFTVYNELTKVKYVTEGMRKPAFLSGEQKKAIVDLLFKTNRKVTVKQLKEDYFKKIECFDSVEISGVEDRFNASLGTYHDLLKIIKDKDFLDNEENEDILEDIVLTLTLFEDREMIEERLKTYAHLFDDKVMKQLKRRRYTGWGRLSRKLINGIRDKQSGKTILDFLKSDGFANRNFMQLIHDDSLTFKEDIQKAQVSGQGDSLHEHIANLAGSPAIKKGILQTVKVVDELVKVMGRHKPENIVIEMARENQTTQKGQKNSRERMKRIEEGIKELGSQILKEHPVENTQLQNEKLYLYYLQNGRDMYVDQELDINRLSDYDVDHIVPQSFLKDDSIDNKVLTRSDKARGKSDNVPSEEVVKKMKNYWRQLLNAKLITQRKFDNLTKAERGGLSELDKAGFIKRQLVETRQITKHVAQILDSRMNTKYDENDKLIREVKVITLKSKLVSDFRKDFQFYKVREINNYHHAHDAYLNAVVGTALIKKYPKLESEFVYGDYKVYDVRKMIAKSEQEIGKATAKYFFYSNIMNFFKTEITLANGEIRKRPLIETNGETGEIVWDKGRDFATVRKVLSMPQVNIVKKTEVQTGGFSKESILPKRNSDKLIARKKDWDPKKYGGFDSPTVAYSVLVVAKVEKGKSKKLKSVKELLGITIMERSSFEKNPIDFLEAKGYKEVKKDLIIKLPKYSLFELENGRKRMLASAGELQKGNELALPSKYVNFLYLASHYEKLKGSPEDNEQKQLFVEQHKHYLDEIIEQISEFSKRVILADANLDKVLSAYNKHRDKPIREQAENIIHLFTLTNLGAPAAFKYFDTTIDRKRYTSTKEVLDATLIHQSITGLYETRIDLSQLGGDGGGGSGGSGGSGGTLNIEDEYRLHETSKGPDVPLGSTWLSDFPQAWAETGGMGLAVRQAPLIIPLKATSTPVSIKQYPMSQEARLGIKPHIQRLLDQGILVPCQSPWNTPLLPVKKPGTNDYRPVQDLREVNKRVEDIHPTVPNPYNLLSGLPPSHQWYTVLDLKDAFFCLRLHPTSQSLFAFEWRDPEMGISGQLTWTRLPQGFKNSPTLFNEALHRDLADFRIQHPDLILLQYVDDLLLAATSELDCQQGTRALLQTLGDLGYRASAKKAQICQKQVKYLGYLLKEGQRWLTEARKETVMGQPTPKTPRQLREFLGTAGFCRLWIPGFAEMAAPLYPLTKPGTLFEWGPDQQKAYQEIKQALLTAPALGLPDLTKPFELFVDEKQGYAKGVLTQKLGPWRRPVAYLSKKLDPVAAGWPPCLRMVAAIAVLTKDAGKLTMGQPLVILAPHAVEALVKQPPDRWLSNARMTHYQALLLDTDRVQFGPIVALNPATLLPLPEEGLQHDCLDILAEAHGTRPDLTDQPLPDADHTWYTDGSSFLQEGQRKAGAAVTTETEVVWAKALPAGTSAQRAELIALTQALKMAEGKKLNVYTDSRYAFATAHIHGEIYRRRGWLTSEGKEIKNKDEILALLKALFLPKRLSIIHCPGHQKGNRAEARGNRMADQAAREVATRETPETSTLLAGKRTADGSEFEKRTADGSEFESPKKKAKVE

SEQ ID NO: 2500 - protein, 2093 aa, synthetic construct
MPAAKRVKLDGGDKKYSIGLDIGTNSVGWAVITDEYKVPSKKFKVLGNTDRHSIKKNLIGALLFDSGETAEATRLKRTARRRYTRRKNRICYLQEIFSNEMAKVDDSFFHRLEESFLVEEDKKHERHPIFGNIVDEVAYHEKYPTIYHLRKKLVDSTDKADLRLIYLALAHMIKFRGHFLIEGDLNPDNSDVDKLFIQLVQTYNQLFEENPINASGVDAKAILSARLSKSRRLENLIAQLPGEKKNGLFGNLIALSLGLTPNFKSNFDLAEDAKLQLSKDTYDDDLDNLLAQIGDQYADLFLAAKNLSDAILLSDILRVNTEITKAPLSASMIKRYDEHHQDLTLLKALVRQQLPEKYKEIFFDQSKNGYAGYIDGGASQEEFYKFIKPILEKMDGTEELLVKLNREDLLRKQRTFDNGSIPHQIHLGELHAILRRQEDFYPFLKDNREKIEKILTFRIPYYVGPLARGNSRFAWMTRKSEETITPWNFEEVVDKGASAQSFIERMTNFDKNLPNEKVLPKHSLLYEYFTVYNELTKVKYVTEGMRKPAFLSGEQKKAIVDLLFKTNRKVTVKQLKEDYFKKIECFDSVEISGVEDRFNASLGTYHDLLKIIKDKDFLDNEENEDILEDIVLTLTLFEDREMIEERLKTYAHLFDDKVMKQLKRRRYTGWGRLSRKLINGIRDKQSGKTILDFLKSDGFANRNFMQLIHDDSLTFKEDIQKAQVSGQGDSLHEHIANLAGSPAIKKGILQTVKVVDELVKVMGRHKPENIVIEMARENQTTQKGQKNSRERMKRIEEGIKELGSQILKEHPVENTQLQNEKLYLYYLQNGRDMYVDQELDINRLSDYDVDHIVPQSFLKDDSIDNKVLTRSDKARGKSDNVPSEEVVKKMKNYWRQLLNAKLITQRKFDNLTKAERGGLSELDKAGFIKRQLVETRQITKHVAQILDSRMNTKYDENDKLIREVKVITLKSKLVSDFRKDFQFYKVREINNYHHAHDAYLNAVVGTALIKKYPKLESEFVYGDYKVYDVRKMIAKSEQEIGKATAKYFFYSNIMNFFKTEITLANGEIRKRPLIETNGETGEIVWDKGRDFATVRKVLSMPQVNIVKKTEVQTGGFSKESILPKRNSDKLIARKKDWDPKKYGGFDSPTVAYSVLVVAKVEKGKSKKLKSVKELLGITIMERSSFEKNPIDFLEAKGYKEVKKDLIIKLPKYSLFELENGRKRMLASAGELQKGNELALPSKYVNFLYLASHYEKLKGSPEDNEQKQLFVEQHKHYLDEIIEQISEFSKRVILADANLDKVLSAYNKHRDKPIREQAENIIHLFTLTNLGAPAAFKYFDTTIDRKRYTSTKEVLDATLIHQSITGLYETRIDLSQLGGDGGGGGGGGGGGGTLNIEDEYRLHETSKGPDVPLGSTWLSDFPQAWAETGGMGLAVRQAPLIIPLKATSTPVSIKQYPMSQEARLGIKPHIQRLLDQGILVPCQSPWNTPLLPVKKPGTNDYRPVQDLREVNKRVEDIHPTVPNPYNLLSGLPPSHQWYTVLDLKDAFFCLRLHPTSQSLFAFEWRDPEMGISGQLTWTRLPQGFKNSPTLFNEALHRDLADFRIQHPDLILLQYVDDLLLAATSELDCQQGTRALLQTLGDLGYRASAKKAQICQKQVKYLGYLLKEGQRWLTEARKETVMGQPTPKTPRQLREFLGTAGFCRLWIPGFAEMAAPLYPLTKPGTLFEWGPDQQKAYQEIKQALLTAPALGLPDLTKPFELFVDEKQGYAKGVLTQKLGPWRRPVAYLSKKLDPVAAGWPPCLRMVAAIAVLTKDAGKLTMGQPLVILAPHAVEALVKQPPDRWLSNARMTHYQALLLDTDRVQFGPIVALNPATLLPLPEEGLQHDCLDILAEAHGTRPDLTDQPLPDADHTWYTDGSSFLQEGQRKAGAAVTTETEVVWAKALPAGTSAQRAELIALTQALKMAEGKKLNVYTDSRYAFATAHIHGEIYRRRGWLTSEGKEIKNKDEILALLKALFLPKRLSIIHCPGHQKGNRAEARGNRMADQAAREVATRETPETSTLLAGKRTADGSEFEKRTADGSEFESPKKKAKVE

SEQ ID NO: 2501 - protein, 2094 aa, synthetic construct
MPAAKRVKLDGGDKKYSIGLDIGTNSVGWAVITDEYKVPSKKFKVLGNTDRHSIKKNLIGALLFDSGETAEATRLKRTARRRYTRRKNRICYLQEIFSNEMAKVDDSFFHRLEESFLVEEDKKHERHPIFGNIVDEVAYHEKYPTIYHLRKKLVDSTDKADLRLIYLALAHMIKFRGHFLIEGDLNPDNSDVDKLFIQLVQTYNQLFEENPINASGVDAKAILSARLSKSRRLENLIAQLPGEKKNGLFGNLIALSLGLTPNFKSNFDLAEDAKLQLSKDTYDDDLDNLLAQIGDQYADLFLAAKNLSDAILLSDILRVNTEITKAPLSASMIKRYDEHHQDLTLLKALVRQQLPEKYKEIFFDQSKNGYAGYIDGGASQEEFYKFIKPILEKMDGTEELLVKLNREDLLRKQRTFDNGSIPHQIHLGELHAILRRQEDFYPFLKDNREKIEKILTFRIPYYVGPLARGNSRFAWMTRKSEETITPWNFEEVVDKGASAQSFIERMTNFDKNLPNEKVLPKHSLLYEYFTVYNELTKVKYVTEGMRKPAFLSGEQKKAIVDLLFKTNRKVTVKQLKEDYFKKIECFDSVEISGVEDRFNASLGTYHDLLKIIKDKDFLDNEENEDILEDIVLTLTLFEDREMIEERLKTYAHLFDDKVMKQLKRRRYTGWGRLSRKLINGIRDKQSGKTILDFLKSDGFANRNFMQLIHDDSLTFKEDIQKAQVSGQGDSLHEHIANLAGSPAIKKGILQTVKVVDELVKVMGRHKPENIVIEMARENQTTQKGQKNSRERMKRIEEGIKELGSQILKEHPVENTQLQNEKLYLYYLQNGRDMYVDQELDINRLSDYDVDHIVPQSFLKDDSIDNKVLTRSDKARGKSDNVPSEEVVKKMKNYWRQLLNAKLITQRKFDNLTKAERGGLSELDKAGFIKRQLVETRQITKHVAQILDSRMNTKYDENDKLIREVKVITLKSKLVSDFRKDFQFYKVREINNYHHAHDAYLNAVVGTALIKKYPKLESEFVYGDYKVYDVRKMIAKSEQEIGKATAKYFFYSNIMNFFKTEITLANGEIRKRPLIETNGETGEIVWDKGRDFATVRKVLSMPQVNIVKKTEVQTGGFSKESILPKRNSDKLIARKKDWDPKKYGGFDSPTVAYSVLVVAKVEKGKSKKLKSVKELLGITIMERSSFEKNPIDFLEAKGYKEVKKDLIIKLPKYSLFELENGRKRMLASAGELQKGNELALPSKYVNFLYLASHYEKLKGSPEDNEQKQLFVEQHKHYLDEIIEQISEFSKRVILADANLDKVLSAYNKHRDKPIREQAENIIHLFTLTNLGAPAAFKYFDTTIDRKRYTSTKEVLDATLIHQSITGLYETRIDLSQLGGDGGGSSPAPGGSGGTLNIEDEYRLHETSKGPDVPLGSTWLSDFPQAWAETGGMGLAVRQAPLIIPLKATSTPVSIKQYPMSQEARLGIKPHIQRLLDQGILVPCQSPWNTPLLPVKKPGTNDYRPVQDLREVNKRVEDIHPTVPNPYNLLSGLPPSHQWYTVLDLKDAFFCLRLHPTSQSLFAFEWRDPEMGISGQLTWTRLPQGFKNSPTLFNEALHRDLADFRIQHPDLILLQYVDDLLLAATSELDCQQGTRALLQTLGDLGYRASAKKAQICQKQVKYLGYLLKEGQRWLTEARKETVMGQPTPKTPRQLREFLGTAGFCRLWIPGFAEMAAPLYPLTKPGTLFEWGPDQQKAYQEIKQALLTAPALGLPDLTKPFELFVDEKQGYAKGVLTQKLGPWRRPVAYLSKKLDPVAAGWPPCLRMVAAIAVLTKDAGKLTMGQPLVILAPHAVEALVKQPPDRWLSNARMTHYQALLLDTDRVQFGPIVALNPATLLPLPEEGLQHDCLDILAEAHGTRPDLTDQPLPDADHTWYTDGSSFLQEGQRKAGAAVTTETEVVWAKALPAGTSAQRAELIALTQALKMAEGKKLNVYTDSRYAFATAHIHGEIYRRRGWLTSEGKEIKNKDEILALLKALFLPKRLSIIHCPGHQKGNRAEARGNRMADQAAREVATRETPETSTLLAGKRTADGSEFEKRTADGSEFESPKKKAKVE

SEQ ID NO: 2502 - protein, 2094 aa, synthetic construct
MPAAKRVKLDGGDKKYSIGLDIGTNSVGWAVITDEYKVPSKKFKVLGNTDRHSIKKNLIGALLFDSGETAEATRLKRTARRRYTRRKNRICYLQEIFSNEMAKVDDSFFHRLEESFLVEEDKKHERHPIFGNIVDEVAYHEKYPTIYHLRKKLVDSTDKADLRLIYLALAHMIKFRGHFLIEGDLNPDNSDVDKLFIQLVQTYNQLFEENPINASGVDAKAILSARLSKSRRLENLIAQLPGEKKNGLFGNLIALSLGLTPNFKSNFDLAEDAKLQLSKDTYDDDLDNLLAQIGDQYADLFLAAKNLSDAILLSDILRVNTEITKAPLSASMIKRYDEHHQDLTLLKALVRQQLPEKYKEIFFDQSKNGYAGYIDGGASQEEFYKFIKPILEKMDGTEELLVKLNREDLLRKQRTFDNGSIPHQIHLGELHAILRRQEDFYPFLKDNREKIEKILTFRIPYYVGPLARGNSRFAWMTRKSEETITPWNFEEVVDKGASAQSFIERMTNFDKNLPNEKVLPKHSLLYEYFTVYNELTKVKYVTEGMRKPAFLSGEQKKAIVDLLFKTNRKVTVKQLKEDYFKKIECFDSVEISGVEDRFNASLGTYHDLLKIIKDKDFLDNEENEDILEDIVLTLTLFEDREMIEERLKTYAHLFDDKVMKQLKRRRYTGWGRLSRKLINGIRDKQSGKTILDFLKSDGFANRNFMQLIHDDSLTFKEDIQKAQVSGQGDSLHEHIANLAGSPAIKKGILQTVKVVDELVKVMGRHKPENIVIEMARENQTTQKGQKNSRERMKRIEEGIKELGSQILKEHPVENTQLQNEKLYLYYLQNGRDMYVDQELDINRLSDYDVDHIVPQSFLKDDSIDNKVLTRSDKARGKSDNVPSEEVVKKMKNYWRQLLNAKLITQRKFDNLTKAERGGLSELDKAGFIKRQLVETRQITKHVAQILDSRMNTKYDENDKLIREVKVITLKSKLVSDFRKDFQFYKVREINNYHHAHDAYLNAVVGTALIKKYPKLESEFVYGDYKVYDVRKMIAKSEQEIGKATAKYFFYSNIMNFFKTEITLANGEIRKRPLIETNGETGEIVWDKGRDFATVRKVLSMPQVNIVKKTEVQTGGFSKESILPKRNSDKLIARKKDWDPKKYGGFDSPTVAYSVLVVAKVEKGKSKKLKSVKELLGITIMERSSFEKNPIDFLEAKGYKEVKKDLIIKLPKYSLFELENGRKRMLASAGELQKGNELALPSKYVNFLYLASHYEKLKGSPEDNEQKQLFVEQHKHYLDEIIEQISEFSKRVILADANLDKVLSAYNKHRDKPIREQAENIIHLFTLTNLGAPAAFKYFDTTIDRKRYTSTKEVLDATLIHQSITGLYETRIDLSQLGGDGGPAPGGGGGSGGTLNIEDEYRLHETSKGPDVPLGSTWLSDFPQAWAETGGMGLAVRQAPLIIPLKATSTPVSIKQYPMSQEARLGIKPHIQRLLDQGILVPCQSPWNTPLLPVKKPGTNDYRPVQDLREVNKRVEDIHPTVPNPYNLLSGLPPSHQWYTVLDLKDAFFCLRLHPTSQSLFAFEWRDPEMGISGQLTWTRLPQGFKNSPTLFNEALHRDLADFRIQHPDLILLQYVDDLLLAATSELDCQQGTRALLQTLGDLGYRASAKKAQICQKQVKYLGYLLKEGQRWLTEARKETVMGQPTPKTPRQLREFLGTAGFCRLWIPGFAEMAAPLYPLTKPGTLFEWGPDQQKAYQEIKQALLTAPALGLPDLTKPFELFVDEKQGYAKGVLTQKLGPWRRPVAYLSKKLDPVAAGWPPCLRMVAAIAVLTKDAGKLTMGQPLVILAPHAVEALVKQPPDRWLSNARMTHYQALLLDTDRVQFGPIVALNPATLLPLPEEGLQHDCLDILAEAHGTRPDLTDQPLPDADHTWYTDGSSFLQEGQRKAGAAVTTETEVVWAKALPAGTSAQRAELIALTQALKMAEGKKLNVYTDSRYAFATAHIHGEIYRRRGWLTSEGKEIKNKDEILALLKALFLPKRLSIIHCPGHQKGNRAEARGNRMADQAAREVATRETPETSTLLAGKRTADGSEFEKRTADGSEFESPKKKAKVE

SEQ ID NO: 2503 - protein, 2093 aa, synthetic construct
MPAAKRVKLDGGDKKYSIGLDIGTNSVGWAVITDEYKVPSKKFKVLGNTDRHSIKKNLIGALLFDSGETAEATRLKRTARRRYTRRKNRICYLQEIFSNEMAKVDDSFFHRLEESFLVEEDKKHERHPIFGNIVDEVAYHEKYPTIYHLRKKLVDSTDKADLRLIYLALAHMIKFRGHFLIEGDLNPDNSDVDKLFIQLVQTYNQLFEENPINASGVDAKAILSARLSKSRRLENLIAQLPGEKKNGLFGNLIALSLGLTPNFKSNFDLAEDAKLQLSKDTYDDDLDNLLAQIGDQYADLFLAAKNLSDAILLSDILRVNTEITKAPLSASMIKRYDEHHQDLTLLKALVRQQLPEKYKEIFFDQSKNGYAGYIDGGASQEEFYKFIKPILEKMDGTEELLVKLNREDLLRKQRTFDNGSIPHQIHLGELHAILRRQEDFYPFLKDNREKIEKILTFRIPYYVGPLARGNSRFAWMTRKSEETITPWNFEEVVDKGASAQSFIERMTNFDKNLPNEKVLPKHSLLYEYFTVYNELTKVKYVTEGMRKPAFLSGEQKKAIVDLLFKTNRKVTVKQLKEDYFKKIECFDSVEISGVEDRFNASLGTYHDLLKIIKDKDFLDNEENEDILEDIVLTLTLFEDREMIEERLKTYAHLFDDKVMKQLKRRRYTGWGRLSRKLINGIRDKQSGKTILDFLKSDGFANRNFMQLIHDDSLTFKEDIQKAQVSGQGDSLHEHIANLAGSPAIKKGILQTVKVVDELVKVMGRHKPENIVIEMARENQTTQKGQKNSRERMKRIEEGIKELGSQILKEHPVENTQLQNEKLYLYYLQNGRDMYVDQELDINRLSDYDVDHIVPQSFLKDDSIDNKVLTRSDKARGKSDNVPSEEVVKKMKNYWRQLLNAKLITQRKFDNLTKAERGGLSELDKAGFIKRQLVETRQITKHVAQILDSRMNTKYDENDKLIREVKVITLKSKLVSDFRKDFQFYKVREINNYHHAHDAYLNAVVGTALIKKYPKLESEFVYGDYKVYDVRKMIAKSEQEIGKATAKYFFYSNIMNFFKTEITLANGEIRKRPLIETNGETGEIVWDKGRDFATVRKVLSMPQVNIVKKTEVQTGGFSKESILPKRNSDKLIARKKDWDPKKYGGFDSPTVAYSVLVVAKVEKGKSKKLKSVKELLGITIMERSSFEKNPIDFLEAKGYKEVKKDLIIKLPKYSLFELENGRKRMLASAGELQKGNELALPSKYVNFLYLASHYEKLKGSPEDNEQKQLFVEQHKHYLDEIIEQISEFSKRVILADANLDKVLSAYNKHRDKPIREQAENIIHLFTLTNLGAPAAFKYFDTTIDRKRYTSTKEVLDATLIHQSITGLYETRIDLSQLGGDGGGSSEAAAKGGTLNIEDEYRLHETSKGPDVPLGSTWLSDFPQAWAETGGMGLAVRQAPLIIPLKATSTPVSIKQYPMSQEARLGIKPHIQRLLDQGILVPCQSPWNTPLLPVKKPGTNDYRPVQDLREVNKRVEDIHPTVPNPYNLLSGLPPSHQWYTVLDLKDAFFCLRLHPTSQSLFAFEWRDPEMGISGQLTWTRLPQGFKNSPTLFNEALHRDLADFRIQHPDLILLQYVDDLLLAATSELDCQQGTRALLQTLGDLGYRASAKKAQICQKQVKYLGYLLKEGQRWLTEARKETVMGQPTPKTPRQLREFLGKAGFCRLFIPGFAEMAAPLYPLTKPGTLFEWGPDQQKAYQEIKQALLTAPALGLPDLTKPFELFVDEKQGYAKGVLTQKLGPWRRPVAYLSKKLDPVAAGWPPCLRMVAAIAVLTKDAGKLTMGQPLVILAPHAVEALVKQPPDRWLSNARMTHYQALLLDTDRVQFGPIVALNPATLLPLPEEGLQHDCLDILAEAHGTRPDLTDQPLPDADHTWYTDGSSFLQEGQRKAGAAVTTETEVVWAKALPAGTSAQRAELIALTQALKMAEGKKLNVYTDSRYAFATAHIHGEIYRRRGWLTSEGKEIKNKDEILALLKALFLPKRLSIIHCPGHQKGNRAEARGNRMADQAAREVATRETPETSTLLAGKRTADGSEFEKRTADGSEFESPKKKAKVE

SEQ ID NO: 2504 - protein, 2090 aa, synthetic construct
MPAAKRVKLDGGDKKYSIGLDIGTNSVGWAVITDEYKVPSKKFKVLGNTDRHSIKKNLIGALLFDSGETAEATRLKRTARRRYTRRKNRICYLQEIFSNEMAKVDDSFFHRLEESFLVEEDKKHERHPIFGNIVDEVAYHEKYPTIYHLRKKLVDSTDKADLRLIYLALAHMIKFRGHFLIEGDLNPDNSDVDKLFIQLVQTYNQLFEENPINASGVDAKAILSARLSKSRRLENLIAQLPGEKKNGLFGNLIALSLGLTPNFKSNFDLAEDAKLQLSKDTYDDDLDNLLAQIGDQYADLFLAAKNLSDAILLSDILRVNTEITKAPLSASMIKRYDEHHQDLTLLKALVRQQLPEKYKEIFFDQSKNGYAGYIDGGASQEEFYKFIKPILEKMDGTEELLVKLNREDLLRKQRTFDNGSIPHQIHLGELHAILRRQEDFYPFLKDNREKIEKILTFRIPYYVGPLARGNSRFAWMTRKSEETITPWNFEEVVDKGASAQSFIERMTNFDKNLPNEKVLPKHSLLYEYFTVYNELTKVKYVTEGMRKPAFLSGEQKKAIVDLLFKTNRKVTVKQLKEDYFKKIECFDSVEISGVEDRFNASLGTYHDLLKIIKDKDFLDNEENEDILEDIVLTLTLFEDREMIEERLKTYAHLFDDKVMKQLKRRRYTGWGRLSRKLINGIRDKQSGKTILDFLKSDGFANRNFMQLIHDDSLTFKEDIQKAQVSGQGDSLHEHIANLAGSPAIKKGILQTVKVVDELVKVMGRHKPENIVIEMARENQTTQKGQKNSRERMKRIEEGIKELGSQILKEHPVENTQLQNEKLYLYYLQNGRDMYVDQELDINRLSDYDVDHIVPQSFLKDDSIDNKVLTRSDKARGKSDNVPSEEVVKKMKNYWRQLLNAKLITQRKFDNLTKAERGGLSELDKAGFIKRQLVETRQITKHVAQILDSRMNTKYDENDKLIREVKVITLKSKLVSDFRKDFQFYKVREINNYHHAHDAYLNAVVGTALIKKYPKLESEFVYGDYKVYDVRKMIAKSEQEIGKATAKYFFYSNIMNFFKTEITLANGEIRKRPLIETNGETGEIVWDKGRDFATVRKVLSMPQVNIVKKTEVQTGGFSKESILPKRNSDKLIARKKDWDPKKYGGFDSPTVAYSVLVVAKVEKGKSKKLKSVKELLGITIMERSSFEKNPIDFLEAKGYKEVKKDLIIKLPKYSLFELENGRKRMLASAGELQKGNELALPSKYVNFLYLASHYEKLKGSPEDNEQKQLFVEQHKHYLDEIIEQISEFSKRVILADANLDKVLSAYNKHRDKPIREQAENIIHLFTLTNLGAPAAFKYFDTTIDRKRYTSTKEVLDATLIHQSITGLYETRIDLSQLGGDGGGGGGSGGTLNIEDEYRLHETSKGPDVPLGSTWLSDFPQAWAETGGMGLAVRQAPLIIPLKATSTPVSIKQYPMSQEARLGIKPHIQRLLDQGILVPCQSPWNTPLLPVKKPGTNDYRPVQDLREVNKRVEDIHPTVPNPYNLLSGLPPSHQWYTVLDLKDAFFCLRLHPTSQSLFAFEWRDPEMGISGQLTWTRLPQGFKNSPTLFNEALHRDLADFRIQHPDLILLQYVDDLLLAATSELDCQQGTRALLQTLGDLGYRASAKKAQICQKQVKYLGYLLKEGQRWLTEARKETVMGQPTPKTPRQLREFLGKAGFCRLFIPGFAEMAAPLYPLTKPGTLFEWGPDQQKAYQEIKQALLTAPALGLPDLTKPFELFVDEKQGYAKGVLTQKLGPWRRPVAYLSKKLDPVAAGWPPCLRMVAAIAVLTKDAGKLTMGQPLVILAPHAVEALVKQPPDRWLSNARMTHYQALLLDTDRVQFGPIVALNPATLLPLPEEGLQHDCLDILAEAHGTRPDLTDQPLPDADHTWYTDGSSFLQEGQRKAGAAVTTETEVVWAKALPAGTSAQRAELIALTQALKMAEGKKLNVYTDSRYAFATAHIHGEIYRRRGWLTSEGKEIKNKDEILALLKALFLPKRLSIIHCPGHQKGNRAEARGNRMADQAAREVATRETPETSTLLAGKRTADGSEFEKRTADGSEFESPKKKAKVE

SEQ ID NO: 2505 - protein, 2093 aa, synthetic construct
MPAAKRVKLDGGDKKYSIGLDIGTNSVGWAVITDEYKVPSKKFKVLGNTDRHSIKKNLIGALLFDSGETAEATRLKRTARRRYTRRKNRICYLQEIFSNEMAKVDDSFFHRLEESFLVEEDKKHERHPIFGNIVDEVAYHEKYPTIYHLRKKLVDSTDKADLRLIYLALAHMIKFRGHFLIEGDLNPDNSDVDKLFIQLVQTYNQLFEENPINASGVDAKAILSARLSKSRRLENLIAQLPGEKKNGLFGNLIALSLGLTPNFKSNFDLAEDAKLQLSKDTYDDDLDNLLAQIGDQYADLFLAAKNLSDAILLSDILRVNTEITKAPLSASMIKRYDEHHQDLTLLKALVRQQLPEKYKEIFFDQSKNGYAGYIDGGASQEEFYKFIKPILEKMDGTEELLVKLNREDLLRKQRTFDNGSIPHQIHLGELHAILRRQEDFYPFLKDNREKIEKILTFRIPYYVGPLARGNSRFAWMTRKSEETITPWNFEEVVDKGASAQSFIERMTNFDKNLPNEKVLPKHSLLYEYFTVYNELTKVKYVTEGMRKPAFLSGEQKKAIVDLLFKTNRKVTVKQLKEDYFKKIECFDSVEISGVEDRFNASLGTYHDLLKIIKDKDFLDNEENEDILEDIVLTLTLFEDREMIEERLKTYAHLFDDKVMKQLKRRRYTGWGRLSRKLINGIRDKQSGKTILDFLKSDGFANRNFMQLIHDDSLTFKEDIQKAQVSGQGDSLHEHIANLAGSPAIKKGILQTVKVVDELVKVMGRHKPENIVIEMARENQTTQKGQKNSRERMKRIEEGIKELGSQILKEHPVENTQLQNEKLYLYYLQNGRDMYVDQELDINRLSDYDVDHIVPQSFLKDDSIDNKVLTRSDKARGKSDNVPSEEVVKKMKNYWRQLLNAKLITQRKFDNLTKAERGGLSELDKAGFIKRQLVETRQITKHVAQILDSRMNTKYDENDKLIREVKVITLKSKLVSDFRKDFQFYKVREINNYHHAHDAYLNAVVGTALIKKYPKLESEFVYGDYKVYDVRKMIAKSEQEIGKATAKYFFYSNIMNFFKTEITLANGEIRKRPLIETNGETGEIVWDKGRDFATVRKVLSMPQVNIVKKTEVQTGGFSKESILPKRNSDKLIARKKDWDPKKYGGFDSPTVAYSVLVVAKVEKGKSKKLKSVKELLGITIMERSSFEKNPIDFLEAKGYKEVKKDLIIKLPKYSLFELENGRKRMLASAGELQKGNELALPSKYVNFLYLASHYEKLKGSPEDNEQKQLFVEQHKHYLDEIIEQISEFSKRVILADANLDKVLSAYNKHRDKPIREQAENIIHLFTLTNLGAPAAFKYFDTTIDRKRYTSTKEVLDATLIHQSITGLYETRIDLSQLGGDGGPAPEAAAKGGTLNIEDEYRLHETSKGPDVPLGSTWLSDFPQAWAETGGMGLAVRQAPLIIPLKATSTPVSIKQYPMSQEARLGIKPHIQRLLDQGILVPCQSPWNTPLLPVKKPGTNDYRPVQDLREVNKRVEDIHPTVPNPYNLLSGLPPSHQWYTVLDLKDAFFCLRLHPTSQSLFAFEWRDPEMGISGQLTWTRLPQGFKNSPTLFNEALHRDLADFRIQHPDLILLQYVDDLLLAATSELDCQQGTRALLQTLGDLGYRASAKKAQICQKQVKYLGYLLKEGQRWLTEARKETVMGQPTPKTPRQLREFLGKAGFCRLFIPGFAEMAAPLYPLTKPGTLFEWGPDQQKAYQEIKQALLTAPALGLPDLTKPFELFVDEKQGYAKGVLTQKLGPWRRPVAYLSKKLDPVAAGWPPCLRMVAAIAVLTKDAGKLTMGQPLVILAPHAVEALVKQPPDRWLSNARMTHYQALLLDTDRVQFGPIVALNPATLLPLPEEGLQHDCLDILAEAHGTRPDLTDQPLPDADHTWYTDGSSFLQEGQRKAGAAVTTETEVVWAKALPAGTSAQRAELIALTQALKMAEGKKLNVYTDSRYAFATAHIHGEIYRRRGWLTSEGKEIKNKDEILALLKALFLPKRLSIIHCPGHQKGNRAEARGNRMADQAAREVATRETPETSTLLAGKRTADGSEFEKRTADGSEFESPKKKAKVE

SEQ ID NO: 2506 - protein, 2096 aa, synthetic construct
MPAAKRVKLDGGDKKYSIGLDIGTNSVGWAVITDEYKVPSKKFKVLGNTDRHSIKKNLIGALLFDSGETAEATRLKRTARRRYTRRKNRICYLQEIFSNEMAKVDDSFFHRLEESFLVEEDKKHERHPIFGNIVDEVAYHEKYPTIYHLRKKLVDSTDKADLRLIYLALAHMIKFRGHFLIEGDLNPDNSDVDKLFIQLVQTYNQLFEENPINASGVDAKAILSARLSKSRRLENLIAQLPGEKKNGLFGNLIALSLGLTPNFKSNFDLAEDAKLQLSKDTYDDDLDNLLAQIGDQYADLFLAAKNLSDAILLSDILRVNTEITKAPLSASMIKRYDEHHQDLTLLKALVRQQLPEKYKEIFFDQSKNGYAGYIDGGASQEEFYKFIKPILEKMDGTEELLVKLNREDLLRKQRTFDNGSIPHQIHLGELHAILRRQEDFYPFLKDNREKIEKILTFRIPYYVGPLARGNSRFAWMTRKSEETITPWNFEEVVDKGASAQSFIERMTNFDKNLPNEKVLPKHSLLYEYFTVYNELTKVKYVTEGMRKPAFLSGEQKKAIVDLLFKTNRKVTVKQLKEDYFKKIECFDSVEISGVEDRFNASLGTYHDLLKIIKDKDFLDNEENEDILEDIVLTLTLFEDREMIEERLKTYAHLFDDKVMKQLKRRRYTGWGRLSRKLINGIRDKQSGKTILDFLKSDGFANRNFMQLIHDDSLTFKEDIQKAQVSGQGDSLHEHIANLAGSPAIKKGILQTVKVVDELVKVMGRHKPENIVIEMARENQTTQKGQKNSRERMKRIEEGIKELGSQILKEHPVENTQLQNEKLYLYYLQNGRDMYVDQELDINRLSDYDVDHIVPQSFLKDDSIDNKVLTRSDKARGKSDNVPSEEVVKKMKNYWRQLLNAKLITQRKFDNLTKAERGGLSELDKAGFIKRQLVETRQITKHVAQILDSRMNTKYDENDKLIREVKVITLKSKLVSDFRKDFQFYKVREINNYHHAHDAYLNAVVGTALIKKYPKLESEFVYGDYKVYDVRKMIAKSEQEIGKATAKYFFYSNIMNFFKTEITLANGEIRKRPLIETNGETGEIVWDKGRDFATVRKVLSMPQVNIVKKTEVQTGGFSKESILPKRNSDKLIARKKDWDPKKYGGFDSPTVAYSVLVVAKVEKGKSKKLKSVKELLGITIMERSSFEKNPIDFLEAKGYKEVKKDLIIKLPKYSLFELENGRKRMLASAGELQKGNELALPSKYVNFLYLASHYEKLKGSPEDNEQKQLFVEQHKHYLDEIIEQISEFSKRVILADANLDKVLSAYNKHRDKPIREQAENIIHLFTLTNLGAPAAFKYFDTTIDRKRYTSTKEVLDATLIHQSITGLYETRIDLSQLGGDGGEAAAKPAPGGGGGTLNIEDEYRLHETSKGPDVPLGSTWLSDFPQAWAETGGMGLAVRQAPLIIPLKATSTPVSIKQYPMSQEARLGIKPHIQRLLDQGILVPCQSPWNTPLLPVKKPGTNDYRPVQDLREVNKRVEDIHPTVPNPYNLLSGLPPSHQWYTVLDLKDAFFCLRLHPTSQSLFAFEWRDPEMGISGQLTWTRLPQGFKNSPTLFNEALHRDLADFRIQHPDLILLQYVDDLLLAATSELDCQQGTRALLQTLGDLGYRASAKKAQICQKQVKYLGYLLKEGQRWLTEARKETVMGQPTPKTPRQLREFLGKAGFCRLFIPGFAEMAAPLYPLTKPGTLFEWGPDQQKAYQEIKQALLTAPALGLPDLTKPFELFVDEKQGYAKGVLTQKLGPWRRPVAYLSKKLDPVAAGWPPCLRMVAAIAVLTKDAGKLTMGQPLVILAPHAVEALVKQPPDRWLSNARMTHYQALLLDTDRVQFGPIVALNPATLLPLPEEGLQHDCLDILAEAHGTRPDLTDQPLPDADHTWYTDGSSFLQEGQRKAGAAVTTETEVVWAKALPAGTSAQRAELIALTQALKMAEGKKLNVYTDSRYAFATAHIHGEIYRRRGWLTSEGKEIKNKDEILALLKALFLPKRLSIIHCPGHQKGNRAEARGNRMADQAAREVATRETPETSTLLAGKRTADGSEFEKRTADGSEFESPKKKAKVE

SEQ ID NO: 2507 - protein, 2100 aa, synthetic construct
MPAAKRVKLDGGDKKYSIGLDIGTNSVGWAVITDEYKVPSKKFKVLGNTDRHSIKKNLIGALLFDSGETAEATRLKRTARRRYTRRKNRICYLQEIFSNEMAKVDDSFFHRLEESFLVEEDKKHERHPIFGNIVDEVAYHEKYPTIYHLRKKLVDSTDKADLRLIYLALAHMIKFRGHFLIEGDLNPDNSDVDKLFIQLVQTYNQLFEENPINASGVDAKAILSARLSKSRRLENLIAQLPGEKKNGLFGNLIALSLGLTPNFKSNFDLAEDAKLQLSKDTYDDDLDNLLAQIGDQYADLFLAAKNLSDAILLSDILRVNTEITKAPLSASMIKRYDEHHQDLTLLKALVRQQLPEKYKEIFFDQSKNGYAGYIDGGASQEEFYKFIKPILEKMDGTEELLVKLNREDLLRKQRTFDNGSIPHQIHLGELHAILRRQEDFYPFLKDNREKIEKILTFRIPYYVGPLARGNSRFAWMTRKSEETITPWNFEEVVDKGASAQSFIERMTNFDKNLPNEKVLPKHSLLYEYFTVYNELTKVKYVTEGMRKPAFLSGEQKKAIVDLLFKTNRKVTVKQLKEDYFKKIECFDSVEISGVEDRFNASLGTYHDLLKIIKDKDFLDNEENEDILEDIVLTLTLFEDREMIEERLKTYAHLFDDKVMKQLKRRRYTGWGRLSRKLINGIRDKQSGKTILDFLKSDGFANRNFMQLIHDDSLTFKEDIQKAQVSGQGDSLHEHIANLAGSPAIKKGILQTVKVVDELVKVMGRHKPENIVIEMARENQTTQKGQKNSRERMKRIEEGIKELGSQILKEHPVENTQLQNEKLYLYYLQNGRDMYVDQELDINRLSDYDVDHIVPQSFLKDDSIDNKVLTRSDKARGKSDNVPSEEVVKKMKNYWRQLLNAKLITQRKFDNLTKAERGGLSELDKAGFIKRQLVETRQITKHVAQILDSRMNTKYDENDKLIREVKVITLKSKLVSDFRKDFQFYKVREINNYHHAHDAYLNAVVGTALIKKYPKLESEFVYGDYKVYDVRKMIAKSEQEIGKATAKYFFYSNIMNFFKTEITLANGEIRKRPLIETNGETGEIVWDKGRDFATVRKVLSMPQVNIVKKTEVQTGGFSKESILPKRNSDKLIARKKDWDPKKYGGFDSPTVAYSVLVVAKVEKGKSKKLKSVKELLGITIMERSSFEKNPIDFLEAKGYKEVKKDLIIKLPKYSLFELENGRKRMLASAGELQKGNELALPSKYVNFLYLASHYEKLKGSPEDNEQKQLFVEQHKHYLDEIIEQISEFSKRVILADANLDKVLSAYNKHRDKPIREQAENIIHLFTLTNLGAPAAFKYFDTTIDRKRYTSTKEVLDATLIHQSITGLYETRIDLSQLGGDGGEAAAKEAAAKEAAAKGGTLNIEDEYRLHETSKGPDVPLGSTWLSDFPQAWAETGGMGLAVRQAPLIIPLKATSTPVSIKQYPMSQEARLGIKPHIQRLLDQGILVPCQSPWNTPLLPVKKPGTNDYRPVQDLREVNKRVEDIHPTVPNPYNLLSGLPPSHQWYTVLDLKDAFFCLRLHPTSQSLFAFEWRDPEMGISGQLTWTRLPQGFKNSPTLFNEALHRDLADFRIQHPDLILLQYVDDLLLAATSELDCQQGTRALLQTLGDLGYRASAKKAQICQKQVKYLGYLLKEGQRWLTEARKETVMGQPTPKTPRQLREFLGKAGFCRLFIPGFAEMAAPLYPLTKPGTLFEWGPDQQKAYQEIKQALLTAPALGLPDLTKPFELFVDEKQGYAKGVLTQKLGPWRRPVAYLSKKLDPVAAGWPPCLRMVAAIAVLTKDAGKLTMGQPLVILAPHAVEALVKQPPDRWLSNARMTHYQALLLDTDRVQFGPIVALNPATLLPLPEEGLQHDCLDILAEAHGTRPDLTDQPLPDADHTWYTDGSSFLQEGQRKAGAAVTTETEVVWAKALPAGTSAQRAELIALTQALKMAEGKKLNVYTDSRYAFATAHIHGEIYRRRGWLTSEGKEIKNKDEILALLKALFLPKRLSIIHCPGHQKGNRAEARGNRMADQAAREVATRETPETSTLLAGKRTADGSEFEKRTADGSEFESPKKKAKVE

SEQ ID NO: 2508 - protein, 2088 aa, synthetic construct
MPAAKRVKLDGGDKKYSIGLDIGTNSVGWAVITDEYKVPSKKFKVLGNTDRHSIKKNLIGALLFDSGETAEATRLKRTARRRYTRRKNRICYLQEIFSNEMAKVDDSFFHRLEESFLVEEDKKHERHPIFGNIVDEVAYHEKYPTIYHLRKKLVDSTDKADLRLIYLALAHMIKFRGHFLIEGDLNPDNSDVDKLFIQLVQTYNQLFEENPINASGVDAKAILSARLSKSRRLENLIAQLPGEKKNGLFGNLIALSLGLTPNFKSNFDLAEDAKLQLSKDTYDDDLDNLLAQIGDQYADLFLAAKNLSDAILLSDILRVNTEITKAPLSASMIKRYDEHHQDLTLLKALVRQQLPEKYKEIFFDQSKNGYAGYIDGGASQEEFYKFIKPILEKMDGTEELLVKLNREDLLRKQRTFDNGSIPHQIHLGELHAILRRQEDFYPFLKDNREKIEKILTFRIPYYVGPLARGNSRFAWMTRKSEETITPWNFEEVVDKGASAQSFIERMTNFDKNLPNEKVLPKHSLLYEYFTVYNELTKVKYVTEGMRKPAFLSGEQKKAIVDLLFKTNRKVTVKQLKEDYFKKIECFDSVEISGVEDRFNASLGTYHDLLKIIKDKDFLDNEENEDILEDIVLTLTLFEDREMIEERLKTYAHLFDDKVMKQLKRRRYTGWGRLSRKLINGIRDKQSGKTILDFLKSDGFANRNFMQLIHDDSLTFKEDIQKAQVSGQGDSLHEHIANLAGSPAIKKGILQTVKVVDELVKVMGRHKPENIVIEMARENQTTQKGQKNSRERMKRIEEGIKELGSQILKEHPVENTQLQNEKLYLYYLQNGRDMYVDQELDINRLSDYDVDHIVPQSFLKDDSIDNKVLTRSDKARGKSDNVPSEEVVKKMKNYWRQLLNAKLITQRKFDNLTKAERGGLSELDKAGFIKRQLVETRQITKHVAQILDSRMNTKYDENDKLIREVKVITLKSKLVSDFRKDFQFYKVREINNYHHAHDAYLNAVVGTALIKKYPKLESEFVYGDYKVYDVRKMIAKSEQEIGKATAKYFFYSNIMNFFKTEITLANGEIRKRPLIETNGETGEIVWDKGRDFATVRKVLSMPQVNIVKKTEVQTGGFSKESILPKRNSDKLIARKKDWDPKKYGGFDSPTVAYSVLVVAKVEKGKSKKLKSVKELLGITIMERSSFEKNPIDFLEAKGYKEVKKDLIIKLPKYSLFELENGRKRMLASAGELQKGNELALPSKYVNFLYLASHYEKLKGSPEDNEQKQLFVEQHKHYLDEIIEQISEFSKRVILADANLDKVLSAYNKHRDKPIREQAENIIHLFTLTNLGAPAAFKYFDTTIDRKRYTSTKEVLDATLIHQSITGLYETRIDLSQLGGDGGGSSGGTLNIEDEYRLHETSKGPDVPLGSTWLSDFPQAWAETGGMGLAVRQAPLIIPLKATSTPVSIKQYPMSQEARLGIKPHIQRLLDQGILVPCQSPWNTPLLPVKKPGTNDYRPVQDLREVNKRVEDIHPTVPNPYNLLSGLPPSHQWYTVLDLKDAFFCLRLHPTSQSLFAFEWRDPEMGISGQLTWTRLPQGFKNSPTLFNEALHRDLADFRIQHPDLILLQYVDDLLLAATSELDCQQGTRALLQTLGDLGYRASAKKAQICQKQVKYLGYLLKEGQRWLTEARKETVMGQPTPKTPRQLREFLGKAGFCRLFIPGFAEMAAPLYPLTKPGTLFEWGPDQQKAYQEIKQALLTAPALGLPDLTKPFELFVDEKQGYAKGVLTQKLGPWRRPVAYLSKKLDPVAAGWPPCLRMVAAIAVLTKDAGKLTMGQPLVILAPHAVEALVKQPPDRWLSNARMTHYQALLLDTDRVQFGPIVALNPATLLPLPEEGLQHDCLDILAEAHGTRPDLTDQPLPDADHTWYTDGSSFLQEGQRKAGAAVTTETEVVWAKALPAGTSAQRAELIALTQALKMAEGKKLNVYTDSRYAFATAHIHGEIYRRRGWLTSEGKEIKNKDEILALLKALFLPKRLSIIHCPGHQKGNRAEARGNRMADQAAREVATRETPETSTLLAGKRTADGSEFEKRTADGSEFESPKKKAKVE

SEQ ID NO: 2509 - protein, 2096 aa, synthetic construct
MPAAKRVKLDGGDKKYSIGLDIGTNSVGWAVITDEYKVPSKKFKVLGNTDRHSIKKNLIGALLFDSGETAEATRLKRTARRRYTRRKNRICYLQEIFSNEMAKVDDSFFHRLEESFLVEEDKKHERHPIFGNIVDEVAYHEKYPTIYHLRKKLVDSTDKADLRLIYLALAHMIKFRGHFLIEGDLNPDNSDVDKLFIQLVQTYNQLFEENPINASGVDAKAILSARLSKSRRLENLIAQLPGEKKNGLFGNLIALSLGLTPNFKSNFDLAEDAKLQLSKDTYDDDLDNLLAQIGDQYADLFLAAKNLSDAILLSDILRVNTEITKAPLSASMIKRYDEHHQDLTLLKALVRQQLPEKYKEIFFDQSKNGYAGYIDGGASQEEFYKFIKPILEKMDGTEELLVKLNREDLLRKQRTFDNGSIPHQIHLGELHAILRRQEDFYPFLKDNREKIEKILTFRIPYYVGPLARGNSRFAWMTRKSEETITPWNFEEVVDKGASAQSFIERMTNFDKNLPNEKVLPKHSLLYEYFTVYNELTKVKYVTEGMRKPAFLSGEQKKAIVDLLFKTNRKVTVKQLKEDYFKKIECFDSVEISGVEDRFNASLGTYHDLLKIIKDKDFLDNEENEDILEDIVLTLTLFEDREMIEERLKTYAHLFDDKVMKQLKRRRYTGWGRLSRKLINGIRDKQSGKTILDFLKSDGFANRNFMQLIHDDSLTFKEDIQKAQVSGQGDSLHEHIANLAGSPAIKKGILQTVKVVDELVKVMGRHKPENIVIEMARENQTTQKGQKNSRERMKRIEEGIKELGSQILKEHPVENTQLQNEKLYLYYLQNGRDMYVDQELDINRLSDYDVDHIVPQSFLKDDSIDNKVLTRSDKARGKSDNVPSEEVVKKMKNYWRQLLNAKLITQRKFDNLTKAERGGLSELDKAGFIKRQLVETRQITKHVAQILDSRMNTKYDENDKLIREVKVITLKSKLVSDFRKDFQFYKVREINNYHHAHDAYLNAVVGTALIKKYPKLESEFVYGDYKVYDVRKMIAKSEQEIGKATAKYFFYSNIMNFFKTEITLANGEIRKRPLIETNGETGEIVWDKGRDFATVRKVLSMPQVNIVKKTEVQTGGFSKESILPKRNSDKLIARKKDWDPKKYGGFDSPTVAYSVLVVAKVEKGKSKKLKSVKELLGITIMERSSFEKNPIDFLEAKGYKEVKKDLIIKLPKYSLFELENGRKRMLASAGELQKGNELALPSKYVNFLYLASHYEKLKGSPEDNEQKQLFVEQHKHYLDEIIEQISEFSKRVILADANLDKVLSAYNKHRDKPIREQAENIIHLFTLTNLGAPAAFKYFDTTIDRKRYTSTKEVLDATLIHQSITGLYETRIDLSQLGGDGGEAAAKGSSPAPGGTLNIEDEYRLHETSKGPDVPLGSTWLSDFPQAWAETGGMGLAVRQAPLIIPLKATSTPVSIKQYPMSQEARLGIKPHIQRLLDQGILVPCQSPWNTPLLPVKKPGTNDYRPVQDLREVNKRVEDIHPTVPNPYNLLSGLPPSHQWYTVLDLKDAFFCLRLHPTSQSLFAFEWRDPEMGISGQLTWTRLPQGFKNSPTLFNEALHRDLADFRIQHPDLILLQYVDDLLLAATSELDCQQGTRALLQTLGDLGYRASAKKAQICQKQVKYLGYLLKEGQRWLTEARKETVMGQPTPKTPRQLREFLGKAGFCRLFIPGFAEMAAPLYPLTKPGTLFEWGPDQQKAYQEIKQALLTAPALGLPDLTKPFELFVDEKQGYAKGVLTQKLGPWRRPVAYLSKKLDPVAAGWPPCLRMVAAIAVLTKDAGKLTMGQPLVILAPHAVEALVKQPPDRWLSNARMTHYQALLLDTDRVQFGPIVALNPATLLPLPEEGLQHDCLDILAEAHGTRPDLTDQPLPDADHTWYTDGSSFLQEGQRKAGAAVTTETEVVWAKALPAGTSAQRAELIALTQALKMAEGKKLNVYTDSRYAFATAHIHGEIYRRRGWLTSEGKEIKNKDEILALLKALFLPKRLSIIHCPGHQKGNRAEARGNRMADQAAREVATRETPETSTLLAGKRTADGSEFEKRTADGSEFESPKKKAKVE

SEQ ID NO: 2510 - protein, 2096 aa, synthetic construct
MPAAKRVKLDGGDKKYSIGLDIGTNSVGWAVITDEYKVPSKKFKVLGNTDRHSIKKNLIGALLFDSGETAEATRLKRTARRRYTRRKNRICYLQEIFSNEMAKVDDSFFHRLEESFLVEEDKKHERHPIFGNIVDEVAYHEKYPTIYHLRKKLVDSTDKADLRLIYLALAHMIKFRGHFLIEGDLNPDNSDVDKLFIQLVQTYNQLFEENPINASGVDAKAILSARLSKSRRLENLIAQLPGEKKNGLFGNLIALSLGLTPNFKSNFDLAEDAKLQLSKDTYDDDLDNLLAQIGDQYADLFLAAKNLSDAILLSDILRVNTEITKAPLSASMIKRYDEHHQDLTLLKALVRQQLPEKYKEIFFDQSKNGYAGYIDGGASQEEFYKFIKPILEKMDGTEELLVKLNREDLLRKQRTFDNGSIPHQIHLGELHAILRRQEDFYPFLKDNREKIEKILTFRIPYYVGPLARGNSRFAWMTRKSEETITPWNFEEVVDKGASAQSFIERMTNFDKNLPNEKVLPKHSLLYEYFTVYNELTKVKYVTEGMRKPAFLSGEQKKAIVDLLFKTNRKVTVKQLKEDYFKKIECFDSVEISGVEDRFNASLGTYHDLLKIIKDKDFLDNEENEDILEDIVLTLTLFEDREMIEERLKTYAHLFDDKVMKQLKRRRYTGWGRLSRKLINGIRDKQSGKTILDFLKSDGFANRNFMQLIHDDSLTFKEDIQKAQVSGQGDSLHEHIANLAGSPAIKKGILQTVKVVDELVKVMGRHKPENIVIEMARENQTTQKGQKNSRERMKRIEEGIKELGSQILKEHPVENTQLQNEKLYLYYLQNGRDMYVDQELDINRLSDYDVDHIVPQSFLKDDSIDNKVLTRSDKARGKSDNVPSEEVVKKMKNYWRQLLNAKLITQRKFDNLTKAERGGLSELDKAGFIKRQLVETRQITKHVAQILDSRMNTKYDENDKLIREVKVITLKSKLVSDFRKDFQFYKVREINNYHHAHDAYLNAVVGTALIKKYPKLESEFVYGDYKVYDVRKMIAKSEQEIGKATAKYFFYSNIMNFFKTEITLANGEIRKRPLIETNGETGEIVWDKGRDFATVRKVLSMPQVNIVKKTEVQTGGFSKESILPKRNSDKLIARKKDWDPKKYGGFDSPTVAYSVLVVAKVEKGKSKKLKSVKELLGITIMERSSFEKNPIDFLEAKGYKEVKKDLIIKLPKYSLFELENGRKRMLASAGELQKGNELALPSKYVNFLYLASHYEKLKGSPEDNEQKQLFVEQHKHYLDEIIEQISEFSKRVILADANLDKVLSAYNKHRDKPIREQAENIIHLFTLTNLGAPAAFKYFDTTIDRKRYTSTKEVLDATLIHQSITGLYETRIDLSQLGGDGGPAPAPAPAPAPGGTLNIEDEYRLHETSKGPDVPLGSTWLSDFPQAWAETGGMGLAVRQAPLIIPLKATSTPVSIKQYPMSQEARLGIKPHIQRLLDQGILVPCQSPWNTPLLPVKKPGTNDYRPVQDLREVNKRVEDIHPTVPNPYNLLSGLPPSHQWYTVLDLKDAFFCLRLHPTSQSLFAFEWRDPEMGISGQLTWTRLPQGFKNSPTLFNEALHRDLADFRIQHPDLILLQYVDDLLLAATSELDCQQGTRALLQTLGDLGYRASAKKAQICQKQVKYLGYLLKEGQRWLTEARKETVMGQPTPKTPRQLREFLGKAGFCRLFIPGFAEMAAPLYPLTKPGTLFEWGPDQQKAYQEIKQALLTAPALGLPDLTKPFELFVDEKQGYAKGVLTQKLGPWRRPVAYLSKKLDPVAAGWPPCLRMVAAIAVLTKDAGKLTMGQPLVILAPHAVEALVKQPPDRWLSNARMTHYQALLLDTDRVQFGPIVALNPATLLPLPEEGLQHDCLDILAEAHGTRPDLTDQPLPDADHTWYTDGSSFLQEGQRKAGAAVTTETEVVWAKALPAGTSAQRAELIALTQALKMAEGKKLNVYTDSRYAFATAHIHGEIYRRRGWLTSEGKEIKNKDEILALLKALFLPKRLSIIHCPGHQKGNRAEARGNRMADQAAREVATRETPETSTLLAGKRTADGSEFEKRTADGSEFESPKKKAKVE

SEQ ID NO: 2511 - protein, 2095 aa, synthetic construct
MPAAKRVKLDGGDKKYSIGLDIGTNSVGWAVITDEYKVPSKKFKVLGNTDRHSIKKNLIGALLFDSGETAEATRLKRTARRRYTRRKNRICYLQEIFSNEMAKVDDSFFHRLEESFLVEEDKKHERHPIFGNIVDEVAYHEKYPTIYHLRKKLVDSTDKADLRLIYLALAHMIKFRGHFLIEGDLNPDNSDVDKLFIQLVQTYNQLFEENPINASGVDAKAILSARLSKSRRLENLIAQLPGEKKNGLFGNLIALSLGLTPNFKSNFDLAEDAKLQLSKDTYDDDLDNLLAQIGDQYADLFLAAKNLSDAILLSDILRVNTEITKAPLSASMIKRYDEHHQDLTLLKALVRQQLPEKYKEIFFDQSKNGYAGYIDGGASQEEFYKFIKPILEKMDGTEELLVKLNREDLLRKQRTFDNGSIPHQIHLGELHAILRRQEDFYPFLKDNREKIEKILTFRIPYYVGPLARGNSRFAWMTRKSEETITPWNFEEVVDKGASAQSFIERMTNFDKNLPNEKVLPKHSLLYEYFTVYNELTKVKYVTEGMRKPAFLSGEQKKAIVDLLFKTNRKVTVKQLKEDYFKKIECFDSVEISGVEDRFNASLGTYHDLLKIIKDKDFLDNEENEDILEDIVLTLTLFEDREMIEERLKTYAHLFDDKVMKQLKRRRYTGWGRLSRKLINGIRDKQSGKTILDFLKSDGFANRNFMQLIHDDSLTFKEDIQKAQVSGQGDSLHEHIANLAGSPAIKKGILQTVKVVDELVKVMGRHKPENIVIEMARENQTTQKGQKNSRERMKRIEEGIKELGSQILKEHPVENTQLQNEKLYLYYLQNGRDMYVDQELDINRLSDYDVDHIVPQSFLKDDSIDNKVLTRSDKARGKSDNVPSEEVVKKMKNYWRQLLNAKLITQRKFDNLTKAERGGLSELDKAGFIKRQLVETRQITKHVAQILDSRMNTKYDENDKLIREVKVITLKSKLVSDFRKDFQFYKVREINNYHHAHDAYLNAVVGTALIKKYPKLESEFVYGDYKVYDVRKMIAKSEQEIGKATAKYFFYSNIMNFFKTEITLANGEIRKRPLIETNGETGEIVWDKGRDFATVRKVLSMPQVNIVKKTEVQTGGFSKESILPKRNSDKLIARKKDWDPKKYGGFDSPTVAYSVLVVAKVEKGKSKKLKSVKELLGITIMERSSFEKNPIDFLEAKGYKEVKKDLIIKLPKYSLFELENGRKRMLASAGELQKGNELALPSKYVNFLYLASHYEKLKGSPEDNEQKQLFVEQHKHYLDEIIEQISEFSKRVILADANLDKVLSAYNKHRDKPIREQAENIIHLFTLTNLGAPAAFKYFDTTIDRKRYTSTKEVLDATLIHQSITGLYETRIDLSQLGGDGGGGGGSGGGGSGGTLNIEDEYRLHETSKGPDVPLGSTWLSDFPQAWAETGGMGLAVRQAPLIIPLKATSTPVSIKQYPMSQEARLGIKPHIQRLLDQGILVPCQSPWNTPLLPVKKPGTNDYRPVQDLREVNKRVEDIHPTVPNPYNLLSGLPPSHQWYTVLDLKDAFFCLRLHPTSQSLFAFEWRDPEMGISGQLTWTRLPQGFKNSPTLFNEALHRDLADFRIQHPDLILLQYVDDLLLAATSELDCQQGTRALLQTLGDLGYRASAKKAQICQKQVKYLGYLLKEGQRWLTEARKETVMGQPTPKTPRQLREFLGKAGFCRLFIPGFAEMAAPLYPLTKPGTLFEWGPDQQKAYQEIKQALLTAPALGLPDLTKPFELFVDEKQGYAKGVLTQKLGPWRRPVAYLSKKLDPVAAGWPPCLRMVAAIAVLTKDAGKLTMGQPLVILAPHAVEALVKQPPDRWLSNARMTHYQALLLDTDRVQFGPIVALNPATLLPLPEEGLQHDCLDILAEAHGTRPDLTDQPLPDADHTWYTDGSSFLQEGQRKAGAAVTTETEVVWAKALPAGTSAQRAELIALTQALKMAEGKKLNVYTDSRYAFATAHIHGEIYRRRGWLTSEGKEIKNKDEILALLKALFLPKRLSIIHCPGHQKGNRAEARGNRMADQAAREVATRETPETSTLLAGKRTADGSEFEKRTADGSEFESPKKKAKVE

SEQ ID NO: 2512 - protein, 2096 aa, synthetic construct
MPAAKRVKLDGGDKKYSIGLDIGTNSVGWAVITDEYKVPSKKFKVLGNTDRHSIKKNLIGALLFDSGETAEATRLKRTARRRYTRRKNRICYLQEIFSNEMAKVDDSFFHRLEESFLVEEDKKHERHPIFGNIVDEVAYHEKYPTIYHLRKKLVDSTDKADLRLIYLALAHMIKFRGHFLIEGDLNPDNSDVDKLFIQLVQTYNQLFEENPINASGVDAKAILSARLSKSRRLENLIAQLPGEKKNGLFGNLIALSLGLTPNFKSNFDLAEDAKLQLSKDTYDDDLDNLLAQIGDQYADLFLAAKNLSDAILLSDILRVNTEITKAPLSASMIKRYDEHHQDLTLLKALVRQQLPEKYKEIFFDQSKNGYAGYIDGGASQEEFYKFIKPILEKMDGTEELLVKLNREDLLRKQRTFDNGSIPHQIHLGELHAILRRQEDFYPFLKDNREKIEKILTFRIPYYVGPLARGNSRFAWMTRKSEETITPWNFEEVVDKGASAQSFIERMTNFDKNLPNEKVLPKHSLLYEYFTVYNELTKVKYVTEGMRKPAFLSGEQKKAIVDLLFKTNRKVTVKQLKEDYFKKIECFDSVEISGVEDRFNASLGTYHDLLKIIKDKDFLDNEENEDILEDIVLTLTLFEDREMIEERLKTYAHLFDDKVMKQLKRRRYTGWGRLSRKLINGIRDKQSGKTILDFLKSDGFANRNFMQLIHDDSLTFKEDIQKAQVSGQGDSLHEHIANLAGSPAIKKGILQTVKVVDELVKVMGRHKPENIVIEMARENQTTQKGQKNSRERMKRIEEGIKELGSQILKEHPVENTQLQNEKLYLYYLQNGRDMYVDQELDINRLSDYDVDHIVPQSFLKDDSIDNKVLTRSDKARGKSDNVPSEEVVKKMKNYWRQLLNAKLITQRKFDNLTKAERGGLSELDKAGFIKRQLVETRQITKHVAQILDSRMNTKYDENDKLIREVKVITLKSKLVSDFRKDFQFYKVREINNYHHAHDAYLNAVVGTALIKKYPKLESEFVYGDYKVYDVRKMIAKSEQEIGKATAKYFFYSNIMNFFKTEITLANGEIRKRPLIETNGETGEIVWDKGRDFATVRKVLSMPQVNIVKKTEVQTGGFSKESILPKRNSDKLIARKKDWDPKKYGGFDSPTVAYSVLVVAKVEKGKSKKLKSVKELLGITIMERSSFEKNPIDFLEAKGYKEVKKDLIIKLPKYSLFELENGRKRMLASAGELQKGNELALPSKYVNFLYLASHYEKLKGSPEDNEQKQLFVEQHKHYLDEIIEQISEFSKRVILADANLDKVLSAYNKHRDKPIREQAENIIHLFTLTNLGAPAAFKYFDTTIDRKRYTSTKEVLDATLIHQSITGLYETRIDLSQLGGDGGEAAAKPAPGGSGGTLNIEDEYRLHETSKGPDVPLGSTWLSDFPQAWAETGGMGLAVRQAPLIIPLKATSTPVSIKQYPMSQEARLGIKPHIQRLLDQGILVPCQSPWNTPLLPVKKPGTNDYRPVQDLREVNKRVEDIHPTVPNPYNLLSGLPPSHQWYTVLDLKDAFFCLRLHPTSQSLFAFEWRDPEMGISGQLTWTRLPQGFKNSPTLFNEALHRDLADFRIQHPDLILLQYVDDLLLAATSELDCQQGTRALLQTLGDLGYRASAKKAQICQKQVKYLGYLLKEGQRWLTEARKETVMGQPTPKTPRQLREFLGKAGFCRLFIPGFAEMAAPLYPLTKPGTLFEWGPDQQKAYQEIKQALLTAPALGLPDLTKPFELFVDEKQGYAKGVLTQKLGPWRRPVAYLSKKLDPVAAGWPPCLRMVAAIAVLTKDAGKLTMGQPLVILAPHAVEALVKQPPDRWLSNARMTHYQALLLDTDRVQFGPIVALNPATLLPLPEEGLQHDCLDILAEAHGTRPDLTDQPLPDADHTWYTDGSSFLQEGQRKAGAAVTTETEVVWAKALPAGTSAQRAELIALTQALKMAEGKKLNVYTDSRYAFATAHIHGEIYRRRGWLTSEGKEIKNKDEILALLKALFLPKRLSIIHCPGHQKGNRAEARGNRMADQAAREVATRETPETSTLLAGKRTADGSEFEKRTADGSEFESPKKKAKVE

SEQ ID NO: 2513 - protein, 2103 aa, synthetic construct
MPAAKRVKLDGGDKKYSIGLDIGTNSVGWAVITDEYKVPSKKFKVLGNTDRHSIKKNLIGALLFDSGETAEATRLKRTARRRYTRRKNRICYLQEIFSNEMAKVDDSFFHRLEESFLVEEDKKHERHPIFGNIVDEVAYHEKYPTIYHLRKKLVDSTDKADLRLIYLALAHMIKFRGHFLIEGDLNPDNSDVDKLFIQLVQTYNQLFEENPINASGVDAKAILSARLSKSRRLENLIAQLPGEKKNGLFGNLIALSLGLTPNFKSNFDLAEDAKLQLSKDTYDDDLDNLLAQIGDQYADLFLAAKNLSDAILLSDILRVNTEITKAPLSASMIKRYDEHHQDLTLLKALVRQQLPEKYKEIFFDQSKNGYAGYIDGGASQEEFYKFIKPILEKMDGTEELLVKLNREDLLRKQRTFDNGSIPHQIHLGELHAILRRQEDFYPFLKDNREKIEKILTFRIPYYVGPLARGNSRFAWMTRKSEETITPWNFEEVVDKGASAQSFIERMTNFDKNLPNEKVLPKHSLLYEYFTVYNELTKVKYVTEGMRKPAFLSGEQKKAIVDLLFKTNRKVTVKQLKEDYFKKIECFDSVEISGVEDRFNASLGTYHDLLKIIKDKDFLDNEENEDILEDIVLTLTLFEDREMIEERLKTYAHLFDDKVMKQLKRRRYTGWGRLSRKLINGIRDKQSGKTILDFLKSDGFANRNFMQLIHDDSLTFKEDIQKAQVSGQGDSLHEHIANLAGSPAIKKGILQTVKVVDELVKVMGRHKPENIVIEMARENQTTQKGQKNSRERMKRIEEGIKELGSQILKEHPVENTQLQNEKLYLYYLQNGRDMYVDQELDINRLSDYDVDHIVPQSFLKDDSIDNKVLTRSDKARGKSDNVPSEEVVKKMKNYWRQLLNAKLITQRKFDNLTKAERGGLSELDKAGFIKRQLVETRQITKHVAQILDSRMNTKYDENDKLIREVKVITLKSKLVSDFRKDFQFYKVREINNYHHAHDAYLNAVVGTALIKKYPKLESEFVYGDYKVYDVRKMIAKSEQEIGKATAKYFFYSNIMNFFKTEITLANGEIRKRPLIETNGETGEIVWDKGRDFATVRKVLSMPQVNIVKKTEVQTGGFSKESILPKRNSDKLIARKKDWDPKKYGGFDSPTVAYSVLVVAKVEKGKSKKLKSVKELLGITIMERSSFEKNPIDFLEAKGYKEVKKDLIIKLPKYSLFELENGRKRMLASAGELQKGNELALPSKYVNFLYLASHYEKLKGSPEDNEQKQLFVEQHKHYLDEIIEQISEFSKRVILADANLDKVLSAYNKHRDKPIREQAENIIHLFTLTNLGAPAAFKYFDTTIDRKRYTSTKEVLDATLIHQSITGLYETRIDLSQLGGDGGGGSGGSGGSGGSGGSGGSGGTLNIEDEYRLHETSKGPDVPLGSTWLSDFPQAWAETGGMGLAVRQAPLIIPLKATSTPVSIKQYPMSQEARLGIKPHIQRLLDQGILVPCQSPWNTPLLPVKKPGTNDYRPVQDLREVNKRVEDIHPTVPNPYNLLSGLPPSHQWYTVLDLKDAFFCLRLHPTSQSLFAFEWRDPEMGISGQLTWTRLPQGFKNSPTLFNEALHRDLADFRIQHPDLILLQYVDDLLLAATSELDCQQGTRALLQTLGDLGYRASAKKAQICQKQVKYLGYLLKEGQRWLTEARKETVMGQPTPKTPRQLREFLGKAGFCRLFIPGFAEMAAPLYPLTKPGTLFEWGPDQQKAYQEIKQALLTAPALGLPDLTKPFELFVDEKQGYAKGVLTQKLGPWRRPVAYLSKKLDPVAAGWPPCLRMVAAIAVLTKDAGKLTMGQPLVILAPHAVEALVKQPPDRWLSNARMTHYQALLLDTDRVQFGPIVALNPATLLPLPEEGLQHDCLDILAEAHGTRPDLTDQPLPDADHTWYTDGSSFLQEGQRKAGAAVTTETEVVWAKALPAGTSAQRAELIALTQALKMAEGKKLNVYTDSRYAFATAHIHGEIYRRRGWLTSEGKEIKNKDEILALLKALFLPKRLSIIHCPGHQKGNRAEARGNRMADQAAREVATRETPETSTLLAGKRTADGSEFEKRTADGSEFESPKKKAKVE

SEQ ID NO: 2514 - protein, 2096 aa, synthetic construct
MPAAKRVKLDGGDKKYSIGLDIGTNSVGWAVITDEYKVPSKKFKVLGNTDRHSIKKNLIGALLFDSGETAEATRLKRTARRRYTRRKNRICYLQEIFSNEMAKVDDSFFHRLEESFLVEEDKKHERHPIFGNIVDEVAYHEKYPTIYHLRKKLVDSTDKADLRLIYLALAHMIKFRGHFLIEGDLNPDNSDVDKLFIQLVQTYNQLFEENPINASGVDAKAILSARLSKSRRLENLIAQLPGEKKNGLFGNLIALSLGLTPNFKSNFDLAEDAKLQLSKDTYDDDLDNLLAQIGDQYADLFLAAKNLSDAILLSDILRVNTEITKAPLSASMIKRYDEHHQDLTLLKALVRQQLPEKYKEIFFDQSKNGYAGYIDGGASQEEFYKFIKPILEKMDGTEELLVKLNREDLLRKQRTFDNGSIPHQIHLGELHAILRRQEDFYPFLKDNREKIEKILTFRIPYYVGPLARGNSRFAWMTRKSEETITPWNFEEVVDKGASAQSFIERMTNFDKNLPNEKVLPKHSLLYEYFTVYNELTKVKYVTEGMRKPAFLSGEQKKAIVDLLFKTNRKVTVKQLKEDYFKKIECFDSVEISGVEDRFNASLGTYHDLLKIIKDKDFLDNEENEDILEDIVLTLTLFEDREMIEERLKTYAHLFDDKVMKQLKRRRYTGWGRLSRKLINGIRDKQSGKTILDFLKSDGFANRNFMQLIHDDSLTFKEDIQKAQVSGQGDSLHEHIANLAGSPAIKKGILQTVKVVDELVKVMGRHKPENIVIEMARENQTTQKGQKNSRERMKRIEEGIKELGSQILKEHPVENTQLQNEKLYLYYLQNGRDMYVDQELDINRLSDYDVDHIVPQSFLKDDSIDNKVLTRSDKARGKSDNVPSEEVVKKMKNYWRQLLNAKLITQRKFDNLTKAERGGLSELDKAGFIKRQLVETRQITKHVAQILDSRMNTKYDENDKLIREVKVITLKSKLVSDFRKDFQFYKVREINNYHHAHDAYLNAVVGTALIKKYPKLESEFVYGDYKVYDVRKMIAKSEQEIGKATAKYFFYSNIMNFFKTEITLANGEIRKRPLIETNGETGEIVWDKGRDFATVRKVLSMPQVNIVKKTEVQTGGFSKESILPKRNSDKLIARKKDWDPKKYGGFDSPTVAYSVLVVAKVEKGKSKKLKSVKELLGITIMERSSFEKNPIDFLEAKGYKEVKKDLIIKLPKYSLFELENGRKRMLASAGELQKGNELALPSKYVNFLYLASHYEKLKGSPEDNEQKQLFVEQHKHYLDEIIEQISEFSKRVILADANLDKVLSAYNKHRDKPIREQAENIIHLFTLTNLGAPAAFKYFDTTIDRKRYTSTKEVLDATLIHQSITGLYETRIDLSQLGGDGGPAPEAAAKGSSGGTLNIEDEYRLHETSKGPDVPLGSTWLSDFPQAWAETGGMGLAVRQAPLIIPLKATSTPVSIKQYPMSQEARLGIKPHIQRLLDQGILVPCQSPWNTPLLPVKKPGTNDYRPVQDLREVNKRVEDIHPTVPNPYNLLSGLPPSHQWYTVLDLKDAFFCLRLHPTSQSLFAFEWRDPEMGISGQLTWTRLPQGFKNSPTLFNEALHRDLADFRIQHPDLILLQYVDDLLLAATSELDCQQGTRALLQTLGDLGYRASAKKAQICQKQVKYLGYLLKEGQRWLTEARKETVMGQPTPKTPRQLREFLGKAGFCRLFIPGFAEMAAPLYPLTKPGTLFEWGPDQQKAYQEIKQALLTAPALGLPDLTKPFELFVDEKQGYAKGVLTQKLGPWRRPVAYLSKKLDPVAAGWPPCLRMVAAIAVLTKDAGKLTMGQPLVILAPHAVEALVKQPPDRWLSNARMTHYQALLLDTDRVQFGPIVALNPATLLPLPEEGLQHDCLDILAEAHGTRPDLTDQPLPDADHTWYTDGSSFLQEGQRKAGAAVTTETEVVWAKALPAGTSAQRAELIALTQALKMAEGKKLNVYTDSRYAFATAHIHGEIYRRRGWLTSEGKEIKNKDEILALLKALFLPKRLSIIHCPGHQKGNRAEARGNRMADQAAREVATRETPETSTLLAGKRTADGSEFEKRTADGSEFESPKKKAKVE

SEQ ID NO: 2515 - protein, 2096 aa, synthetic construct
MPAAKRVKLDGGDKKYSIGLDIGTNSVGWAVITDEYKVPSKKFKVLGNTDRHSIKKNLIGALLFDSGETAEATRLKRTARRRYTRRKNRICYLQEIFSNEMAKVDDSFFHRLEESFLVEEDKKHERHPIFGNIVDEVAYHEKYPTIYHLRKKLVDSTDKADLRLIYLALAHMIKFRGHFLIEGDLNPDNSDVDKLFIQLVQTYNQLFEENPINASGVDAKAILSARLSKSRRLENLIAQLPGEKKNGLFGNLIALSLGLTPNFKSNFDLAEDAKLQLSKDTYDDDLDNLLAQIGDQYADLFLAAKNLSDAILLSDILRVNTEITKAPLSASMIKRYDEHHQDLTLLKALVRQQLPEKYKEIFFDQSKNGYAGYIDGGASQEEFYKFIKPILEKMDGTEELLVKLNREDLLRKQRTFDNGSIPHQIHLGELHAILRRQEDFYPFLKDNREKIEKILTFRIPYYVGPLARGNSRFAWMTRKSEETITPWNFEEVVDKGASAQSFIERMTNFDKNLPNEKVLPKHSLLYEYFTVYNELTKVKYVTEGMRKPAFLSGEQKKAIVDLLFKTNRKVTVKQLKEDYFKKIECFDSVEISGVEDRFNASLGTYHDLLKIIKDKDFLDNEENEDILEDIVLTLTLFEDREMIEERLKTYAHLFDDKVMKQLKRRRYTGWGRLSRKLINGIRDKQSGKTILDFLKSDGFANRNFMQLIHDDSLTFKEDIQKAQVSGQGDSLHEHIANLAGSPAIKKGILQTVKVVDELVKVMGRHKPENIVIEMARENQTTQKGQKNSRERMKRIEEGIKELGSQILKEHPVENTQLQNEKLYLYYLQNGRDMYVDQELDINRLSDYDVDHIVPQSFLKDDSIDNKVLTRSDKARGKSDNVPSEEVVKKMKNYWRQLLNAKLITQRKFDNLTKAERGGLSELDKAGFIKRQLVETRQITKHVAQILDSRMNTKYDENDKLIREVKVITLKSKLVSDFRKDFQFYKVREINNYHHAHDAYLNAVVGTALIKKYPKLESEFVYGDYKVYDVRKMIAKSEQEIGKATAKYFFYSNIMNFFKTEITLANGEIRKRPLIETNGETGEIVWDKGRDFATVRKVLSMPQVNIVKKTEVQTGGFSKESILPKRNSDKLIARKKDWDPKKYGGFDSPTVAYSVLVVAKVEKGKSKKLKSVKELLGITIMERSSFEKNPIDFLEAKGYKEVKKDLIIKLPKYSLFELENGRKRMLASAGELQKGNELALPSKYVNFLYLASHYEKLKGSPEDNEQKQLFVEQHKHYLDEIIEQISEFSKRVILADANLDKVLSAYNKHRDKPIREQAENIIHLFTLTNLGAPAAFKYFDTTIDRKRYTSTKEVLDATLIHQSITGLYETRIDLSQLGGDGGGSSGGGEAAAKGGTLNIEDEYRLHETSKGPDVPLGSTWLSDFPQAWAETGGMGLAVRQAPLIIPLKATSTPVSIKQYPMSQEARLGIKPHIQRLLDQGILVPCQSPWNTPLLPVKKPGTNDYRPVQDLREVNKRVEDIHPTVPNPYNLLSGLPPSHQWYTVLDLKDAFFCLRLHPTSQSLFAFEWRDPEMGISGQLTWTRLPQGFKNSPTLFNEALHRDLADFRIQHPDLILLQYVDDLLLAATSELDCQQGTRALLQTLGDLGYRASAKKAQICQKQVKYLGYLLKEGQRWLTEARKETVMGQPTPKTPRQLREFLGKAGFCRLFIPGFAEMAAPLYPLTKPGTLFEWGPDQQKAYQEIKQALLTAPALGLPDLTKPFELFVDEKQGYAKGVLTQKLGPWRRPVAYLSKKLDPVAAGWPPCLRMVAAIAVLTKDAGKLTMGQPLVILAPHAVEALVKQPPDRWLSNARMTHYQALLLDTDRVQFGPIVALNPATLLPLPEEGLQHDCLDILAEAHGTRPDLTDQPLPDADHTWYTDGSSFLQEGQRKAGAAVTTETEVVWAKALPAGTSAQRAELIALTQALKMAEGKKLNVYTDSRYAFATAHIHGEIYRRRGWLTSEGKEIKNKDEILALLKALFLPKRLSIIHCPGHQKGNRAEARGNRMADQAAREVATRETPETSTLLAGKRTADGSEFEKRTADGSEFESPKKKAKVE

SEQ ID NO: 2516 - protein, 2100 aa, synthetic construct
MPAAKRVKLDGGDKKYSIGLDIGTNSVGWAVITDEYKVPSKKFKVLGNTDRHSIKKNLIGALLFDSGETAEATRLKRTARRRYTRRKNRICYLQEIFSNEMAKVDDSFFHRLEESFLVEEDKKHERHPIFGNIVDEVAYHEKYPTIYHLRKKLVDSTDKADLRLIYLALAHMIKFRGHFLIEGDLNPDNSDVDKLFIQLVQTYNQLFEENPINASGVDAKAILSARLSKSRRLENLIAQLPGEKKNGLFGNLIALSLGLTPNFKSNFDLAEDAKLQLSKDTYDDDLDNLLAQIGDQYADLFLAAKNLSDAILLSDILRVNTEITKAPLSASMIKRYDEHHQDLTLLKALVRQQLPEKYKEIFFDQSKNGYAGYIDGGASQEEFYKFIKPILEKMDGTEELLVKLNREDLLRKQRTFDNGSIPHQIHLGELHAILRRQEDFYPFLKDNREKIEKILTFRIPYYVGPLARGNSRFAWMTRKSEETITPWNFEEVVDKGASAQSFIERMTNFDKNLPNEKVLPKHSLLYEYFTVYNELTKVKYVTEGMRKPAFLSGEQKKAIVDLLFKTNRKVTVKQLKEDYFKKIECFDSVEISGVEDRFNASLGTYHDLLKIIKDKDFLDNEENEDILEDIVLTLTLFEDREMIEERLKTYAHLFDDKVMKQLKRRRYTGWGRLSRKLINGIRDKQSGKTILDFLKSDGFANRNFMQLIHDDSLTFKEDIQKAQVSGQGDSLHEHIANLAGSPAIKKGILQTVKVVDELVKVMGRHKPENIVIEMARENQTTQKGQKNSRERMKRIEEGIKELGSQILKEHPVENTQLQNEKLYLYYLQNGRDMYVDQELDINRLSDYDVDHIVPQSFLKDDSIDNKVLTRSDKARGKSDNVPSEEVVKKMKNYWRQLLNAKLITQRKFDNLTKAERGGLSELDKAGFIKRQLVETRQITKHVAQILDSRMNTKYDENDKLIREVKVITLKSKLVSDFRKDFQFYKVREINNYHHAHDAYLNAVVGTALIKKYPKLESEFVYGDYKVYDVRKMIAKSEQEIGKATAKYFFYSNIMNFFKTEITLANGEIRKRPLIETNGETGEIVWDKGRDFATVRKVLSMPQVNIVKKTEVQTGGFSKESILPKRNSDKLIARKKDWDPKKYGGFDSPTVAYSVLVVAKVEKGKSKKLKSVKELLGITIMERSSFEKNPIDFLEAKGYKEVKKDLIIKLPKYSLFELENGRKRMLASAGELQKGNELALPSKYVNFLYLASHYEKLKGSPEDNEQKQLFVEQHKHYLDEIIEQISEFSKRVILADANLDKVLSAYNKHRDKPIREQAENIIHLFTLTNLGAPAAFKYFDTTIDRKRYTSTKEVLDATLIHQSITGLYETRIDLSQLGGDGGGGGGSGGGGSGGGGSGGTLNIEDEYRLHETSKGPDVPLGSTWLSDFPQAWAETGGMGLAVRQAPLIIPLKATSTPVSIKQYPMSQEARLGIKPHIQRLLDQGILVPCQSPWNTPLLPVKKPGTNDYRPVQDLREVNKRVEDIHPTVPNPYNLLSGLPPSHQWYTVLDLKDAFFCLRLHPTSQSLFAFEWRDPEMGISGQLTWTRLPQGFKNSPTLFNEALHRDLADFRIQHPDLILLQYVDDLLLAATSELDCQQGTRALLQTLGDLGYRASAKKAQICQKQVKYLGYLLKEGQRWLTEARKETVMGQPTPKTPRQLREFLGKAGFCRLFIPGFAEMAAPLYPLTKPGTLFEWGPDQQKAYQEIKQALLTAPALGLPDLTKPFELFVDEKQGYAKGVLTQKLGPWRRPVAYLSKKLDPVAAGWPPCLRMVAAIAVLTKDAGKLTMGQPLVILAPHAVEALVKQPPDRWLSNARMTHYQALLLDTDRVQFGPIVALNPATLLPLPEEGLQHDCLDILAEAHGTRPDLTDQPLPDADHTWYTDGSSFLQEGQRKAGAAVTTETEVVWAKALPAGTSAQRAELIALTQALKMAEGKKLNVYTDSRYAFATAHIHGEIYRRRGWLTSEGKEIKNKDEILALLKALFLPKRLSIIHCPGHQKGNRAEARGNRMADQAAREVATRETPETSTLLAGKRTADGSEFEKRTADGSEFESPKKKAKVE

SEQ ID NO: 2517 - protein, 2093 aa, synthetic construct
MPAAKRVKLDGGDKKYSIGLDIGTNSVGWAVITDEYKVPSKKFKVLGNTDRHSIKKNLIGALLFDSGETAEATRLKRTARRRYTRRKNRICYLQEIFSNEMAKVDDSFFHRLEESFLVEEDKKHERHPIFGNIVDEVAYHEKYPTIYHLRKKLVDSTDKADLRLIYLALAHMIKFRGHFLIEGDLNPDNSDVDKLFIQLVQTYNQLFEENPINASGVDAKAILSARLSKSRRLENLIAQLPGEKKNGLFGNLIALSLGLTPNFKSNFDLAEDAKLQLSKDTYDDDLDNLLAQIGDQYADLFLAAKNLSDAILLSDILRVNTEITKAPLSASMIKRYDEHHQDLTLLKALVRQQLPEKYKEIFFDQSKNGYAGYIDGGASQEEFYKFIKPILEKMDGTEELLVKLNREDLLRKQRTFDNGSIPHQIHLGELHAILRRQEDFYPFLKDNREKIEKILTFRIPYYVGPLARGNSRFAWMTRKSEETITPWNFEEVVDKGASAQSFIERMTNFDKNLPNEKVLPKHSLLYEYFTVYNELTKVKYVTEGMRKPAFLSGEQKKAIVDLLFKTNRKVTVKQLKEDYFKKIECFDSVEISGVEDRFNASLGTYHDLLKIIKDKDFLDNEENEDILEDIVLTLTLFEDREMIEERLKTYAHLFDDKVMKQLKRRRYTGWGRLSRKLINGIRDKQSGKTILDFLKSDGFANRNFMQLIHDDSLTFKEDIQKAQVSGQGDSLHEHIANLAGSPAIKKGILQTVKVVDELVKVMGRHKPENIVIEMARENQTTQKGQKNSRERMKRIEEGIKELGSQILKEHPVENTQLQNEKLYLYYLQNGRDMYVDQELDINRLSDYDVDHIVPQSFLKDDSIDNKVLTRSDKARGKSDNVPSEEVVKKMKNYWRQLLNAKLITQRKFDNLTKAERGGLSELDKAGFIKRQLVETRQITKHVAQILDSRMNTKYDENDKLIREVKVITLKSKLVSDFRKDFQFYKVREINNYHHAHDAYLNAVVGTALIKKYPKLESEFVYGDYKVYDVRKMIAKSEQEIGKATAKYFFYSNIMNFFKTEITLANGEIRKRPLIETNGETGEIVWDKGRDFATVRKVLSMPQVNIVKKTEVQTGGFSKESILPKRNSDKLIARKKDWDPKKYGGFDSPTVAYSVLVVAKVEKGKSKKLKSVKELLGITIMERSSFEKNPIDFLEAKGYKEVKKDLIIKLPKYSLFELENGRKRMLASAGELQKGNELALPSKYVNFLYLASHYEKLKGSPEDNEQKQLFVEQHKHYLDEIIEQISEFSKRVILADANLDKVLSAYNKHRDKPIREQAENIIHLFTLTNLGAPAAFKYFDTTIDRKRYTSTKEVLDATLIHQSITGLYETRIDLSQLGGDGGEAAAKGGGGGTLNIEDEYRLHETSKGPDVPLGSTWLSDFPQAWAETGGMGLAVRQAPLIIPLKATSTPVSIKQYPMSQEARLGIKPHIQRLLDQGILVPCQSPWNTPLLPVKKPGTNDYRPVQDLREVNKRVEDIHPTVPNPYNLLSGLPPSHQWYTVLDLKDAFFCLRLHPTSQSLFAFEWRDPEMGISGQLTWTRLPQGFKNSPTLFNEALHRDLADFRIQHPDLILLQYVDDLLLAATSELDCQQGTRALLQTLGDLGYRASAKKAQICQKQVKYLGYLLKEGQRWLTEARKETVMGQPTPKTPRQLREFLGKAGFCRLFIPGFAEMAAPLYPLTKPGTLFEWGPDQQKAYQEIKQALLTAPALGLPDLTKPFELFVDEKQGYAKGVLTQKLGPWRRPVAYLSKKLDPVAAGWPPCLRMVAAIAVLTKDAGKLTMGQPLVILAPHAVEALVKQPPDRWLSNARMTHYQALLLDTDRVQFGPIVALNPATLLPLPEEGLQHDCLDILAEAHGTRPDLTDQPLPDADHTWYTDGSSFLQEGQRKAGAAVTTETEVVWAKALPAGTSAQRAELIALTQALKMAEGKKLNVYTDSRYAFATAHIHGEIYRRRGWLTSEGKEIKNKDEILALLKALFLPKRLSIIHCPGHQKGNRAEARGNRMADQAAREVATRETPETSTLLAGKRTADGSEFEKRTADGSEFESPKKKAKVE

SEQ ID NO: 2518 - protein, 2101 aa, synthetic construct
MPAAKRVKLDGGDKKYSIGLDIGTNSVGWAVITDEYKVPSKKFKVLGNTDRHSIKKNLIGALLFDSGETAEATRLKRTARRRYTRRKNRICYLQEIFSNEMAKVDDSFFHRLEESFLVEEDKKHERHPIFGNIVDEVAYHEKYPTIYHLRKKLVDSTDKADLRLIYLALAHMIKFRGHFLIEGDLNPDNSDVDKLFIQLVQTYNQLFEENPINASGVDAKAILSARLSKSRRLENLIAQLPGEKKNGLFGNLIALSLGLTPNFKSNFDLAEDAKLQLSKDTYDDDLDNLLAQIGDQYADLFLAAKNLSDAILLSDILRVNTEITKAPLSASMIKRYDEHHQDLTLLKALVRQQLPEKYKEIFFDQSKNGYAGYIDGGASQEEFYKFIKPILEKMDGTEELLVKLNREDLLRKQRTFDNGSIPHQIHLGELHAILRRQEDFYPFLKDNREKIEKILTFRIPYYVGPLARGNSRFAWMTRKSEETITPWNFEEVVDKGASAQSFIERMTNFDKNLPNEKVLPKHSLLYEYFTVYNELTKVKYVTEGMRKPAFLSGEQKKAIVDLLFKTNRKVTVKQLKEDYFKKIECFDSVEISGVEDRFNASLGTYHDLLKIIKDKDFLDNEENEDILEDIVLTLTLFEDREMIEERLKTYAHLFDDKVMKQLKRRRYTGWGRLSRKLINGIRDKQSGKTILDFLKSDGFANRNFMQLIHDDSLTFKEDIQKAQVSGQGDSLHEHIANLAGSPAIKKGILQTVKVVDELVKVMGRHKPENIVIEMARENQTTQKGQKNSRERMKRIEEGIKELGSQILKEHPVENTQLQNEKLYLYYLQNGRDMYVDQELDINRLSDYDVDHIVPQSFLKDDSIDNKVLTRSDKARGKSDNVPSEEVVKKMKNYWRQLLNAKLITQRKFDNLTKAERGGLSELDKAGFIKRQLVETRQITKHVAQILDSRMNTKYDENDKLIREVKVITLKSKLVSDFRKDFQFYKVREINNYHHAHDAYLNAVVGTALIKKYPKLESEFVYGDYKVYDVRKMIAKSEQEIGKATAKYFFYSNIMNFFKTEITLANGEIRKRPLIETNGETGEIVWDKGRDFATVRKVLSMPQVNIVKKTEVQTGGFSKESILPKRNSDKLIARKKDWDPKKYGGFDSPTVAYSVLVVAKVEKGKSKKLKSVKELLGITIMERSSFEKNPIDFLEAKGYKEVKKDLIIKLPKYSLFELENGRKRMLASAGELQKGNELALPSKYVNFLYLASHYEKLKGSPEDNEQKQLFVEQHKHYLDEIIEQISEFSKRVILADANLDKVLSAYNKHRDKPIREQAENIIHLFTLTNLGAPAAFKYFDTTIDRKRYTSTKEVLDATLIHQSITGLYETRIDLSQLGGDGGSGSETPGTSESATPESGGTLNIEDEYRLHETSKGPDVPLGSTWLSDFPQAWAETGGMGLAVRQAPLIIPLKATSTPVSIKQYPMSQEARLGIKPHIQRLLDQGILVPCQSPWNTPLLPVKKPGTNDYRPVQDLREVNKRVEDIHPTVPNPYNLLSGLPPSHQWYTVLDLKDAFFCLRLHPTSQSLFAFEWRDPEMGISGQLTWTRLPQGFKNSPTLFNEALHRDLADFRIQHPDLILLQYVDDLLLAATSELDCQQGTRALLQTLGDLGYRASAKKAQICQKQVKYLGYLLKEGQRWLTEARKETVMGQPTPKTPRQLREFLGKAGFCRLFIPGFAEMAAPLYPLTKPGTLFEWGPDQQKAYQEIKQALLTAPALGLPDLTKPFELFVDEKQGYAKGVLTQKLGPWRRPVAYLSKKLDPVAAGWPPCLRMVAAIAVLTKDAGKLTMGQPLVILAPHAVEALVKQPPDRWLSNARMTHYQALLLDTDRVQFGPIVALNPATLLPLPEEGLQHDCLDILAEAHGTRPDLTDQPLPDADHTWYTDGSSFLQEGQRKAGAAVTTETEVVWAKALPAGTSAQRAELIALTQALKMAEGKKLNVYTDSRYAFATAHIHGEIYRRRGWLTSEGKEIKNKDEILALLKALFLPKRLSIIHCPGHQKGNRAEARGNRMADQAAREVATRETPETSTLLAGKRTADGSEFEKRTADGSEFESPKKKAKVE

SEQ ID NO: 2519 - protein, 2096 aa, synthetic construct
MPAAKRVKLDGGDKKYSIGLDIGTNSVGWAVITDEYKVPSKKFKVLGNTDRHSIKKNLIGALLFDSGETAEATRLKRTARRRYTRRKNRICYLQEIFSNEMAKVDDSFFHRLEESFLVEEDKKHERHPIFGNIVDEVAYHEKYPTIYHLRKKLVDSTDKADLRLIYLALAHMIKFRGHFLIEGDLNPDNSDVDKLFIQLVQTYNQLFEENPINASGVDAKAILSARLSKSRRLENLIAQLPGEKKNGLFGNLIALSLGLTPNFKSNFDLAEDAKLQLSKDTYDDDLDNLLAQIGDQYADLFLAAKNLSDAILLSDILRVNTEITKAPLSASMIKRYDEHHQDLTLLKALVRQQLPEKYKEIFFDQSKNGYAGYIDGGASQEEFYKFIKPILEKMDGTEELLVKLNREDLLRKQRTFDNGSIPHQIHLGELHAILRRQEDFYPFLKDNREKIEKILTFRIPYYVGPLARGNSRFAWMTRKSEETITPWNFEEVVDKGASAQSFIERMTNFDKNLPNEKVLPKHSLLYEYFTVYNELTKVKYVTEGMRKPAFLSGEQKKAIVDLLFKTNRKVTVKQLKEDYFKKIECFDSVEISGVEDRFNASLGTYHDLLKIIKDKDFLDNEENEDILEDIVLTLTLFEDREMIEERLKTYAHLFDDKVMKQLKRRRYTGWGRLSRKLINGIRDKQSGKTILDFLKSDGFANRNFMQLIHDDSLTFKEDIQKAQVSGQGDSLHEHIANLAGSPAIKKGILQTVKVVDELVKVMGRHKPENIVIEMARENQTTQKGQKNSRERMKRIEEGIKELGSQILKEHPVENTQLQNEKLYLYYLQNGRDMYVDQELDINRLSDYDVDHIVPQSFLKDDSIDNKVLTRSDKARGKSDNVPSEEVVKKMKNYWRQLLNAKLITQRKFDNLTKAERGGLSELDKAGFIKRQLVETRQITKHVAQILDSRMNTKYDENDKLIREVKVITLKSKLVSDFRKDFQFYKVREINNYHHAHDAYLNAVVGTALIKKYPKLESEFVYGDYKVYDVRKMIAKSEQEIGKATAKYFFYSNIMNFFKTEITLANGEIRKRPLIETNGETGEIVWDKGRDFATVRKVLSMPQVNIVKKTEVQTGGFSKESILPKRNSDKLIARKKDWDPKKYGGFDSPTVAYSVLVVAKVEKGKSKKLKSVKELLGITIMERSSFEKNPIDFLEAKGYKEVKKDLIIKLPKYSLFELENGRKRMLASAGELQKGNELALPSKYVNFLYLASHYEKLKGSPEDNEQKQLFVEQHKHYLDEIIEQISEFSKRVILADANLDKVLSAYNKHRDKPIREQAENIIHLFTLTNLGAPAAFKYFDTTIDRKRYTSTKEVLDATLIHQSITGLYETRIDLSQLGGDGGEAAAKPAPGSSGGTLNIEDEYRLHETSKGPDVPLGSTWLSDFPQAWAETGGMGLAVRQAPLIIPLKATSTPVSIKQYPMSQEARLGIKPHIQRLLDQGILVPCQSPWNTPLLPVKKPGTNDYRPVQDLREVNKRVEDIHPTVPNPYNLLSGLPPSHQWYTVLDLKDAFFCLRLHPTSQSLFAFEWRDPEMGISGQLTWTRLPQGFKNSPTLFNEALHRDLADFRIQHPDLILLQYVDDLLLAATSELDCQQGTRALLQTLGDLGYRASAKKAQICQKQVKYLGYLLKEGQRWLTEARKETVMGQPTPKTPRQLREFLGKAGFCRLFIPGFAEMAAPLYPLTKPGTLFEWGPDQQKAYQEIKQALLTAPALGLPDLTKPFELFVDEKQGYAKGVLTQKLGPWRRPVAYLSKKLDPVAAGWPPCLRMVAAIAVLTKDAGKLTMGQPLVILAPHAVEALVKQPPDRWLSNARMTHYQALLLDTDRVQFGPIVALNPATLLPLPEEGLQHDCLDILAEAHGTRPDLTDQPLPDADHTWYTDGSSFLQEGQRKAGAAVTTETEVVWAKALPAGTSAQRAELIALTQALKMAEGKKLNVYTDSRYAFATAHIHGEIYRRRGWLTSEGKEIKNKDEILALLKALFLPKRLSIIHCPGHQKGNRAEARGNRMADQAAREVATRETPETSTLLAGKRTADGSEFEKRTADGSEFESPKKKAKVE

SEQ ID NO: 2520 - protein, 2091 aa, synthetic construct
MPAAKRVKLDGGDKKYSIGLDIGTNSVGWAVITDEYKVPSKKFKVLGNTDRHSIKKNLIGALLFDSGETAEATRLKRTARRRYTRRKNRICYLQEIFSNEMAKVDDSFFHRLEESFLVEEDKKHERHPIFGNIVDEVAYHEKYPTIYHLRKKLVDSTDKADLRLIYLALAHMIKFRGHFLIEGDLNPDNSDVDKLFIQLVQTYNQLFEENPINASGVDAKAILSARLSKSRRLENLIAQLPGEKKNGLFGNLIALSLGLTPNFKSNFDLAEDAKLQLSKDTYDDDLDNLLAQIGDQYADLFLAAKNLSDAILLSDILRVNTEITKAPLSASMIKRYDEHHQDLTLLKALVRQQLPEKYKEIFFDQSKNGYAGYIDGGASQEEFYKFIKPILEKMDGTEELLVKLNREDLLRKQRTFDNGSIPHQIHLGELHAILRRQEDFYPFLKDNREKIEKILTFRIPYYVGPLARGNSRFAWMTRKSEETITPWNFEEVVDKGASAQSFIERMTNFDKNLPNEKVLPKHSLLYEYFTVYNELTKVKYVTEGMRKPAFLSGEQKKAIVDLLFKTNRKVTVKQLKEDYFKKIECFDSVEISGVEDRFNASLGTYHDLLKIIKDKDFLDNEENEDILEDIVLTLTLFEDREMIEERLKTYAHLFDDKVMKQLKRRRYTGWGRLSRKLINGIRDKQSGKTILDFLKSDGFANRNFMQLIHDDSLTFKEDIQKAQVSGQGDSLHEHIANLAGSPAIKKGILQTVKVVDELVKVMGRHKPENIVIEMARENQTTQKGQKNSRERMKRIEEGIKELGSQILKEHPVENTQLQNEKLYLYYLQNGRDMYVDQELDINRLSDYDVDHIVPQSFLKDDSIDNKVLTRSDKARGKSDNVPSEEVVKKMKNYWRQLLNAKLITQRKFDNLTKAERGGLSELDKAGFIKRQLVETRQITKHVAQILDSRMNTKYDENDKLIREVKVITLKSKLVSDFRKDFQFYKVREINNYHHAHDAYLNAVVGTALIKKYPKLESEFVYGDYKVYDVRKMIAKSEQEIGKATAKYFFYSNIMNFFKTEITLANGEIRKRPLIETNGETGEIVWDKGRDFATVRKVLSMPQVNIVKKTEVQTGGFSKESILPKRNSDKLIARKKDWDPKKYGGFDSPTVAYSVLVVAKVEKGKSKKLKSVKELLGITIMERSSFEKNPIDFLEAKGYKEVKKDLIIKLPKYSLFELENGRKRMLASAGELQKGNELALPSKYVNFLYLASHYEKLKGSPEDNEQKQLFVEQHKHYLDEIIEQISEFSKRVILADANLDKVLSAYNKHRDKPIREQAENIIHLFTLTNLGAPAAFKYFDTTIDRKRYTSTKEVLDATLIHQSITGLYETRIDLSQLGGDGGGSSGSSGGTLNIEDEYRLHETSKGPDVPLGSTWLSDFPQAWAETGGMGLAVRQAPLIIPLKATSTPVSIKQYPMSQEARLGIKPHIQRLLDQGILVPCQSPWNTPLLPVKKPGTNDYRPVQDLREVNKRVEDIHPTVPNPYNLLSGLPPSHQWYTVLDLKDAFFCLRLHPTSQSLFAFEWRDPEMGISGQLTWTRLPQGFKNSPTLFNEALHRDLADFRIQHPDLILLQYVDDLLLAATSELDCQQGTRALLQTLGDLGYRASAKKAQICQKQVKYLGYLLKEGQRWLTEARKETVMGQPTPKTPRQLREFLGKAGFCRLFIPGFAEMAAPLYPLTKPGTLFEWGPDQQKAYQEIKQALLTAPALGLPDLTKPFELFVDEKQGYAKGVLTQKLGPWRRPVAYLSKKLDPVAAGWPPCLRMVAAIAVLTKDAGKLTMGQPLVILAPHAVEALVKQPPDRWLSNARMTHYQALLLDTDRVQFGPIVALNPATLLPLPEEGLQHDCLDILAEAHGTRPDLTDQPLPDADHTWYTDGSSFLQEGQRKAGAAVTTETEVVWAKALPAGTSAQRAELIALTQALKMAEGKKLNVYTDSRYAFATAHIHGEIYRRRGWLTSEGKEIKNKDEILALLKALFLPKRLSIIHCPGHQKGNRAEARGNRMADQAAREVATRETPETSTLLAGKRTADGSEFEKRTADGSEFESPKKKAKVE

SEQ ID NO: 2521 - protein, 2096 aa, synthetic construct
MPAAKRVKLDGGDKKYSIGLDIGTNSVGWAVITDEYKVPSKKFKVLGNTDRHSIKKNLIGALLFDSGETAEATRLKRTARRRYTRRKNRICYLQEIFSNEMAKVDDSFFHRLEESFLVEEDKKHERHPIFGNIVDEVAYHEKYPTIYHLRKKLVDSTDKADLRLIYLALAHMIKFRGHFLIEGDLNPDNSDVDKLFIQLVQTYNQLFEENPINASGVDAKAILSARLSKSRRLENLIAQLPGEKKNGLFGNLIALSLGLTPNFKSNFDLAEDAKLQLSKDTYDDDLDNLLAQIGDQYADLFLAAKNLSDAILLSDILRVNTEITKAPLSASMIKRYDEHHQDLTLLKALVRQQLPEKYKEIFFDQSKNGYAGYIDGGASQEEFYKFIKPILEKMDGTEELLVKLNREDLLRKQRTFDNGSIPHQIHLGELHAILRRQEDFYPFLKDNREKIEKILTFRIPYYVGPLARGNSRFAWMTRKSEETITPWNFEEVVDKGASAQSFIERMTNFDKNLPNEKVLPKHSLLYEYFTVYNELTKVKYVTEGMRKPAFLSGEQKKAIVDLLFKTNRKVTVKQLKEDYFKKIECFDSVEISGVEDRFNASLGTYHDLLKIIKDKDFLDNEENEDILEDIVLTLTLFEDREMIEERLKTYAHLFDDKVMKQLKRRRYTGWGRLSRKLINGIRDKQSGKTILDFLKSDGFANRNFMQLIHDDSLTFKEDIQKAQVSGQGDSLHEHIANLAGSPAIKKGILQTVKVVDELVKVMGRHKPENIVIEMARENQTTQKGQKNSRERMKRIEEGIKELGSQILKEHPVENTQLQNEKLYLYYLQNGRDMYVDQELDINRLSDYDVDHIVPQSFLKDDSIDNKVLTRSDKARGKSDNVPSEEVVKKMKNYWRQLLNAKLITQRKFDNLTKAERGGLSELDKAGFIKRQLVETRQITKHVAQILDSRMNTKYDENDKLIREVKVITLKSKLVSDFRKDFQFYKVREINNYHHAHDAYLNAVVGTALIKKYPKLESEFVYGDYKVYDVRKMIAKSEQEIGKATAKYFFYSNIMNFFKTEITLANGEIRKRPLIETNGETGEIVWDKGRDFATVRKVLSMPQVNIVKKTEVQTGGFSKESILPKRNSDKLIARKKDWDPKKYGGFDSPTVAYSVLVVAKVEKGKSKKLKSVKELLGITIMERSSFEKNPIDFLEAKGYKEVKKDLIIKLPKYSLFELENGRKRMLASAGELQKGNELALPSKYVNFLYLASHYEKLKGSPEDNEQKQLFVEQHKHYLDEIIEQISEFSKRVILADANLDKVLSAYNKHRDKPIREQAENIIHLFTLTNLGAPAAFKYFDTTIDRKRYTSTKEVLDATLIHQSITGLYETRIDLSQLGGDGGGGGEAAAKGGSGGTLNIEDEYRLHETSKGPDVPLGSTWLSDFPQAWAETGGMGLAVRQAPLIIPLKATSTPVSIKQYPMSQEARLGIKPHIQRLLDQGILVPCQSPWNTPLLPVKKPGTNDYRPVQDLREVNKRVEDIHPTVPNPYNLLSGLPPSHQWYTVLDLKDAFFCLRLHPTSQSLFAFEWRDPEMGISGQLTWTRLPQGFKNSPTLFNEALHRDLADFRIQHPDLILLQYVDDLLLAATSELDCQQGTRALLQTLGDLGYRASAKKAQICQKQVKYLGYLLKEGQRWLTEARKETVMGQPTPKTPRQLREFLGKAGFCRLFIPGFAEMAAPLYPLTKPGTLFEWGPDQQKAYQEIKQALLTAPALGLPDLTKPFELFVDEKQGYAKGVLTQKLGPWRRPVAYLSKKLDPVAAGWPPCLRMVAAIAVLTKDAGKLTMGQPLVILAPHAVEALVKQPPDRWLSNARMTHYQALLLDTDRVQFGPIVALNPATLLPLPEEGLQHDCLDILAEAHGTRPDLTDQPLPDADHTWYTDGSSFLQEGQRKAGAAVTTETEVVWAKALPAGTSAQRAELIALTQALKMAEGKKLNVYTDSRYAFATAHIHGEIYRRRGWLTSEGKEIKNKDEILALLKALFLPKRLSIIHCPGHQKGNRAEARGNRMADQAAREVATRETPETSTLLAGKRTADGSEFEKRTADGSEFESPKKKAKVE

SEQ ID NO: 2522 - protein, 2105 aa, synthetic construct
MPAAKRVKLDGGDKKYSIGLDIGTNSVGWAVITDEYKVPSKKFKVLGNTDRHSIKKNLIGALLFDSGETAEATRLKRTARRRYTRRKNRICYLQEIFSNEMAKVDDSFFHRLEESFLVEEDKKHERHPIFGNIVDEVAYHEKYPTIYHLRKKLVDSTDKADLRLIYLALAHMIKFRGHFLIEGDLNPDNSDVDKLFIQLVQTYNQLFEENPINASGVDAKAILSARLSKSRRLENLIAQLPGEKKNGLFGNLIALSLGLTPNFKSNFDLAEDAKLQLSKDTYDDDLDNLLAQIGDQYADLFLAAKNLSDAILLSDILRVNTEITKAPLSASMIKRYDEHHQDLTLLKALVRQQLPEKYKEIFFDQSKNGYAGYIDGGASQEEFYKFIKPILEKMDGTEELLVKLNREDLLRKQRTFDNGSIPHQIHLGELHAILRRQEDFYPFLKDNREKIEKILTFRIPYYVGPLARGNSRFAWMTRKSEETITPWNFEEVVDKGASAQSFIERMTNFDKNLPNEKVLPKHSLLYEYFTVYNELTKVKYVTEGMRKPAFLSGEQKKAIVDLLFKTNRKVTVKQLKEDYFKKIECFDSVEISGVEDRFNASLGTYHDLLKIIKDKDFLDNEENEDILEDIVLTLTLFEDREMIEERLKTYAHLFDDKVMKQLKRRRYTGWGRLSRKLINGIRDKQSGKTILDFLKSDGFANRNFMQLIHDDSLTFKEDIQKAQVSGQGDSLHEHIANLAGSPAIKKGILQTVKVVDELVKVMGRHKPENIVIEMARENQTTQKGQKNSRERMKRIEEGIKELGSQILKEHPVENTQLQNEKLYLYYLQNGRDMYVDQELDINRLSDYDVDHIVPQSFLKDDSIDNKVLTRSDKARGKSDNVPSEEVVKKMKNYWRQLLNAKLITQRKFDNLTKAERGGLSELDKAGFIKRQLVETRQITKHVAQILDSRMNTKYDENDKLIREVKVITLKSKLVSDFRKDFQFYKVREINNYHHAHDAYLNAVVGTALIKKYPKLESEFVYGDYKVYDVRKMIAKSEQEIGKATAKYFFYSNIMNFFKTEITLANGEIRKRPLIETNGETGEIVWDKGRDFATVRKVLSMPQVNIVKKTEVQTGGFSKESILPKRNSDKLIARKKDWDPKKYGGFDSPTVAYSVLVVAKVEKGKSKKLKSVKELLGITIMERSSFEKNPIDFLEAKGYKEVKKDLIIKLPKYSLFELENGRKRMLASAGELQKGNELALPSKYVNFLYLASHYEKLKGSPEDNEQKQLFVEQHKHYLDEIIEQISEFSKRVILADANLDKVLSAYNKHRDKPIREQAENIIHLFTLTNLGAPAAFKYFDTTIDRKRYTSTKEVLDATLIHQSITGLYETRIDLSQLGGDGGEAAAKEAAAKEAAAKEAAAKGGTLNIEDEYRLHETSKGPDVPLGSTWLSDFPQAWAETGGMGLAVRQAPLIIPLKATSTPVSIKQYPMSQEARLGIKPHIQRLLDQGILVPCQSPWNTPLLPVKKPGTNDYRPVQDLREVNKRVEDIHPTVPNPYNLLSGLPPSHQWYTVLDLKDAFFCLRLHPTSQSLFAFEWRDPEMGISGQLTWTRLPQGFKNSPTLFNEALHRDLADFRIQHPDLILLQYVDDLLLAATSELDCQQGTRALLQTLGDLGYRASAKKAQICQKQVKYLGYLLKEGQRWLTEARKETVMGQPTPKTPRQLREFLGKAGFCRLFIPGFAEMAAPLYPLTKPGTLFEWGPDQQKAYQEIKQALLTAPALGLPDLTKPFELFVDEKQGYAKGVLTQKLGPWRRPVAYLSKKLDPVAAGWPPCLRMVAAIAVLTKDAGKLTMGQPLVILAPHAVEALVKQPPDRWLSNARMTHYQALLLDTDRVQFGPIVALNPATLLPLPEEGLQHDCLDILAEAHGTRPDLTDQPLPDADHTWYTDGSSFLQEGQRKAGAAVTTETEVVWAKALPAGTSAQRAELIALTQALKMAEGKKLNVYTDSRYAFATAHIHGEIYRRRGWLTSEGKEIKNKDEILALLKALFLPKRLSIIHCPGHQKGNRAEARGNRMADQAAREVATRETPETSTLLAGKRTADGSEFEKRTADGSEFESPKKKAKVE

SEQ ID NO: 2523 - protein, 2094 aa, synthetic construct
MPAAKRVKLDGGDKKYSIGLDIGTNSVGWAVITDEYKVPSKKFKVLGNTDRHSIKKNLIGALLFDSGETAEATRLKRTARRRYTRRKNRICYLQEIFSNEMAKVDDSFFHRLEESFLVEEDKKHERHPIFGNIVDEVAYHEKYPTIYHLRKKLVDSTDKADLRLIYLALAHMIKFRGHFLIEGDLNPDNSDVDKLFIQLVQTYNQLFEENPINASGVDAKAILSARLSKSRRLENLIAQLPGEKKNGLFGNLIALSLGLTPNFKSNFDLAEDAKLQLSKDTYDDDLDNLLAQIGDQYADLFLAAKNLSDAILLSDILRVNTEITKAPLSASMIKRYDEHHQDLTLLKALVRQQLPEKYKEIFFDQSKNGYAGYIDGGASQEEFYKFIKPILEKMDGTEELLVKLNREDLLRKQRTFDNGSIPHQIHLGELHAILRRQEDFYPFLKDNREKIEKILTFRIPYYVGPLARGNSRFAWMTRKSEETITPWNFEEVVDKGASAQSFIERMTNFDKNLPNEKVLPKHSLLYEYFTVYNELTKVKYVTEGMRKPAFLSGEQKKAIVDLLFKTNRKVTVKQLKEDYFKKIECFDSVEISGVEDRFNASLGTYHDLLKIIKDKDFLDNEENEDILEDIVLTLTLFEDREMIEERLKTYAHLFDDKVMKQLKRRRYTGWGRLSRKLINGIRDKQSGKTILDFLKSDGFANRNFMQLIHDDSLTFKEDIQKAQVSGQGDSLHEHIANLAGSPAIKKGILQTVKVVDELVKVMGRHKPENIVIEMARENQTTQKGQKNSRERMKRIEEGIKELGSQILKEHPVENTQLQNEKLYLYYLQNGRDMYVDQELDINRLSDYDVDHIVPQSFLKDDSIDNKVLTRSDKARGKSDNVPSEEVVKKMKNYWRQLLNAKLITQRKFDNLTKAERGGLSELDKAGFIKRQLVETRQITKHVAQILDSRMNTKYDENDKLIREVKVITLKSKLVSDFRKDFQFYKVREINNYHHAHDAYLNAVVGTALIKKYPKLESEFVYGDYKVYDVRKMIAKSEQEIGKATAKYFFYSNIMNFFKTEITLANGEIRKRPLIETNGETGEIVWDKGRDFATVRKVLSMPQVNIVKKTEVQTGGFSKESILPKRNSDKLIARKKDWDPKKYGGFDSPTVAYSVLVVAKVEKGKSKKLKSVKELLGITIMERSSFEKNPIDFLEAKGYKEVKKDLIIKLPKYSLFELENGRKRMLASAGELQKGNELALPSKYVNFLYLASHYEKLKGSPEDNEQKQLFVEQHKHYLDEIIEQISEFSKRVILADANLDKVLSAYNKHRDKPIREQAENIIHLFTLTNLGAPAAFKYFDTTIDRKRYTSTKEVLDATLIHQSITGLYETRIDLSQLGGDGGGGSGGSGGSGGTLNIEDEYRLHETSKGPDVPLGSTWLSDFPQAWAETGGMGLAVRQAPLIIPLKATSTPVSIKQYPMSQEARLGIKPHIQRLLDQGILVPCQSPWNTPLLPVKKPGTNDYRPVQDLREVNKRVEDIHPTVPNPYNLLSGLPPSHQWYTVLDLKDAFFCLRLHPTSQSLFAFEWRDPEMGISGQLTWTRLPQGFKNSPTLFNEALHRDLADFRIQHPDLILLQYVDDLLLAATSELDCQQGTRALLQTLGDLGYRASAKKAQICQKQVKYLGYLLKEGQRWLTEARKETVMGQPTPKTPRQLREFLGKAGFCRLFIPGFAEMAAPLYPLTKPGTLFEWGPDQQKAYQEIKQALLTAPALGLPDLTKPFELFVDEKQGYAKGVLTQKLGPWRRPVAYLSKKLDPVAAGWPPCLRMVAAIAVLTKDAGKLTMGQPLVILAPHAVEALVKQPPDRWLSNARMTHYQALLLDTDRVQFGPIVALNPATLLPLPEEGLQHDCLDILAEAHGTRPDLTDQPLPDADHTWYTDGSSFLQEGQRKAGAAVTTETEVVWAKALPAGTSAQRAELIALTQALKMAEGKKLNVYTDSRYAFATAHIHGEIYRRRGWLTSEGKEIKNKDEILALLKALFLPKRLSIIHCPGHQKGNRAEARGNRMADQAAREVATRETPETSTLLAGKRTADGSEFEKRTADGSEFESPKKKAKVE

SEQ ID NO: 2524 - protein, 2088 aa, synthetic construct
MPAAKRVKLDGGDKKYSIGLDIGTNSVGWAVITDEYKVPSKKFKVLGNTDRHSIKKNLIGALLFDSGETAEATRLKRTARRRYTRRKNRICYLQEIFSNEMAKVDDSFFHRLEESFLVEEDKKHERHPIFGNIVDEVAYHEKYPTIYHLRKKLVDSTDKADLRLIYLALAHMIKFRGHFLIEGDLNPDNSDVDKLFIQLVQTYNQLFEENPINASGVDAKAILSARLSKSRRLENLIAQLPGEKKNGLFGNLIALSLGLTPNFKSNFDLAEDAKLQLSKDTYDDDLDNLLAQIGDQYADLFLAAKNLSDAILLSDILRVNTEITKAPLSASMIKRYDEHHQDLTLLKALVRQQLPEKYKEIFFDQSKNGYAGYIDGGASQEEFYKFIKPILEKMDGTEELLVKLNREDLLRKQRTFDNGSIPHQIHLGELHAILRRQEDFYPFLKDNREKIEKILTFRIPYYVGPLARGNSRFAWMTRKSEETITPWNFEEVVDKGASAQSFIERMTNFDKNLPNEKVLPKHSLLYEYFTVYNELTKVKYVTEGMRKPAFLSGEQKKAIVDLLFKTNRKVTVKQLKEDYFKKIECFDSVEISGVEDRFNASLGTYHDLLKIIKDKDFLDNEENEDILEDIVLTLTLFEDREMIEERLKTYAHLFDDKVMKQLKRRRYTGWGRLSRKLINGIRDKQSGKTILDFLKSDGFANRNFMQLIHDDSLTFKEDIQKAQVSGQGDSLHEHIANLAGSPAIKKGILQTVKVVDELVKVMGRHKPENIVIEMARENQTTQKGQKNSRERMKRIEEGIKELGSQILKEHPVENTQLQNEKLYLYYLQNGRDMYVDQELDINRLSDYDVDHIVPQSFLKDDSIDNKVLTRSDKARGKSDNVPSEEVVKKMKNYWRQLLNAKLITQRKFDNLTKAERGGLSELDKAGFIKRQLVETRQITKHVAQILDSRMNTKYDENDKLIREVKVITLKSKLVSDFRKDFQFYKVREINNYHHAHDAYLNAVVGTALIKKYPKLESEFVYGDYKVYDVRKMIAKSEQEIGKATAKYFFYSNIMNFFKTEITLANGEIRKRPLIETNGETGEIVWDKGRDFATVRKVLSMPQVNIVKKTEVQTGGFSKESILPKRNSDKLIARKKDWDPKKYGGFDSPTVAYSVLVVAKVEKGKSKKLKSVKELLGITIMERSSFEKNPIDFLEAKGYKEVKKDLIIKLPKYSLFELENGRKRMLASAGELQKGNELALPSKYVNFLYLASHYEKLKGSPEDNEQKQLFVEQHKHYLDEIIEQISEFSKRVILADANLDKVLSAYNKHRDKPIREQAENIIHLFTLTNLGAPAAFKYFDTTIDRKRYTSTKEVLDATLIHQSITGLYETRIDLSQLGGDGGPAPGGTLNIEDEYRLHETSKGPDVPLGSTWLSDFPQAWAETGGMGLAVRQAPLIIPLKATSTPVSIKQYPMSQEARLGIKPHIQRLLDQGILVPCQSPWNTPLLPVKKPGTNDYRPVQDLREVNKRVEDIHPTVPNPYNLLSGLPPSHQWYTVLDLKDAFFCLRLHPTSQSLFAFEWRDPEMGISGQLTWTRLPQGFKNSPTLFNEALHRDLADFRIQHPDLILLQYVDDLLLAATSELDCQQGTRALLQTLGDLGYRASAKKAQICQKQVKYLGYLLKEGQRWLTEARKETVMGQPTPKTPRQLREFLGKAGFCRLFIPGFAEMAAPLYPLTKPGTLFEWGPDQQKAYQEIKQALLTAPALGLPDLTKPFELFVDEKQGYAKGVLTQKLGPWRRPVAYLSKKLDPVAAGWPPCLRMVAAIAVLTKDAGKLTMGQPLVILAPHAVEALVKQPPDRWLSNARMTHYQALLLDTDRVQFGPIVALNPATLLPLPEEGLQHDCLDILAEAHGTRPDLTDQPLPDADHTWYTDGSSFLQEGQRKAGAAVTTETEVVWAKALPAGTSAQRAELIALTQALKMAEGKKLNVYTDSRYAFATAHIHGEIYRRRGWLTSEGKEIKNKDEILALLKALFLPKRLSIIHCPGHQKGNRAEARGNRMADQAAREVATRETPETSTLLAGKRTADGSEFEKRTADGSEFESPKKKAKVE

SEQ ID NO: 2525 - protein, 2094 aa, synthetic construct
MPAAKRVKLDGGDKKYSIGLDIGTNSVGWAVITDEYKVPSKKFKVLGNTDRHSIKKNLIGALLFDSGETAEATRLKRTARRRYTRRKNRICYLQEIFSNEMAKVDDSFFHRLEESFLVEEDKKHERHPIFGNIVDEVAYHEKYPTIYHLRKKLVDSTDKADLRLIYLALAHMIKFRGHFLIEGDLNPDNSDVDKLFIQLVQTYNQLFEENPINASGVDAKAILSARLSKSRRLENLIAQLPGEKKNGLFGNLIALSLGLTPNFKSNFDLAEDAKLQLSKDTYDDDLDNLLAQIGDQYADLFLAAKNLSDAILLSDILRVNTEITKAPLSASMIKRYDEHHQDLTLLKALVRQQLPEKYKEIFFDQSKNGYAGYIDGGASQEEFYKFIKPILEKMDGTEELLVKLNREDLLRKQRTFDNGSIPHQIHLGELHAILRRQEDFYPFLKDNREKIEKILTFRIPYYVGPLARGNSRFAWMTRKSEETITPWNFEEVVDKGASAQSFIERMTNFDKNLPNEKVLPKHSLLYEYFTVYNELTKVKYVTEGMRKPAFLSGEQKKAIVDLLFKTNRKVTVKQLKEDYFKKIECFDSVEISGVEDRFNASLGTYHDLLKIIKDKDFLDNEENEDILEDIVLTLTLFEDREMIEERLKTYAHLFDDKVMKQLKRRRYTGWGRLSRKLINGIRDKQSGKTILDFLKSDGFANRNFMQLIHDDSLTFKEDIQKAQVSGQGDSLHEHIANLAGSPAIKKGILQTVKVVDELVKVMGRHKPENIVIEMARENQTTQKGQKNSRERMKRIEEGIKELGSQILKEHPVENTQLQNEKLYLYYLQNGRDMYVDQELDINRLSDYDVDHIVPQSFLKDDSIDNKVLTRSDKARGKSDNVPSEEVVKKMKNYWRQLLNAKLITQRKFDNLTKAERGGLSELDKAGFIKRQLVETRQITKHVAQILDSRMNTKYDENDKLIREVKVITLKSKLVSDFRKDFQFYKVREINNYHHAHDAYLNAVVGTALIKKYPKLESEFVYGDYKVYDVRKMIAKSEQEIGKATAKYFFYSNIMNFFKTEITLANGEIRKRPLIETNGETGEIVWDKGRDFATVRKVLSMPQVNIVKKTEVQTGGFSKESILPKRNSDKLIARKKDWDPKKYGGFDSPTVAYSVLVVAKVEKGKSKKLKSVKELLGITIMERSSFEKNPIDFLEAKGYKEVKKDLIIKLPKYSLFELENGRKRMLASAGELQKGNELALPSKYVNFLYLASHYEKLKGSPEDNEQKQLFVEQHKHYLDEIIEQISEFSKRVILADANLDKVLSAYNKHRDKPIREQAENIIHLFTLTNLGAPAAFKYFDTTIDRKRYTSTKEVLDATLIHQSITGLYETRIDLSQLGGDGGPAPAPAPAPGGTLNIEDEYRLHETSKGPDVPLGSTWLSDFPQAWAETGGMGLAVRQAPLIIPLKATSTPVSIKQYPMSQEARLGIKPHIQRLLDQGILVPCQSPWNTPLLPVKKPGTNDYRPVQDLREVNKRVEDIHPTVPNPYNLLSGLPPSHQWYTVLDLKDAFFCLRLHPTSQSLFAFEWRDPEMGISGQLTWTRLPQGFKNSPTLFNEALHRDLADFRIQHPDLILLQYVDDLLLAATSELDCQQGTRALLQTLGDLGYRASAKKAQICQKQVKYLGYLLKEGQRWLTEARKETVMGQPTPKTPRQLREFLGKAGFCRLFIPGFAEMAAPLYPLTKPGTLFEWGPDQQKAYQEIKQALLTAPALGLPDLTKPFELFVDEKQGYAKGVLTQKLGPWRRPVAYLSKKLDPVAAGWPPCLRMVAAIAVLTKDAGKLTMGQPLVILAPHAVEALVKQPPDRWLSNARMTHYQALLLDTDRVQFGPIVALNPATLLPLPEEGLQHDCLDILAEAHGTRPDLTDQPLPDADHTWYTDGSSFLQEGQRKAGAAVTTETEVVWAKALPAGTSAQRAELIALTQALKMAEGKKLNVYTDSRYAFATAHIHGEIYRRRGWLTSEGKEIKNKDEILALLKALFLPKRLSIIHCPGHQKGNRAEARGNRMADQAAREVATRETPETSTLLAGKRTADGSEFEKRTADGSEFESPKKKAKVE

SEQ ID NO: 2526 - protein, 2096 aa, synthetic construct
MPAAKRVKLDGGDKKYSIGLDIGTNSVGWAVITDEYKVPSKKFKVLGNTDRHSIKKNLIGALLFDSGETAEATRLKRTARRRYTRRKNRICYLQEIFSNEMAKVDDSFFHRLEESFLVEEDKKHERHPIFGNIVDEVAYHEKYPTIYHLRKKLVDSTDKADLRLIYLALAHMIKFRGHFLIEGDLNPDNSDVDKLFIQLVQTYNQLFEENPINASGVDAKAILSARLSKSRRLENLIAQLPGEKKNGLFGNLIALSLGLTPNFKSNFDLAEDAKLQLSKDTYDDDLDNLLAQIGDQYADLFLAAKNLSDAILLSDILRVNTEITKAPLSASMIKRYDEHHQDLTLLKALVRQQLPEKYKEIFFDQSKNGYAGYIDGGASQEEFYKFIKPILEKMDGTEELLVKLNREDLLRKQRTFDNGSIPHQIHLGELHAILRRQEDFYPFLKDNREKIEKILTFRIPYYVGPLARGNSRFAWMTRKSEETITPWNFEEVVDKGASAQSFIERMTNFDKNLPNEKVLPKHSLLYEYFTVYNELTKVKYVTEGMRKPAFLSGEQKKAIVDLLFKTNRKVTVKQLKEDYFKKIECFDSVEISGVEDRFNASLGTYHDLLKIIKDKDFLDNEENEDILEDIVLTLTLFEDREMIEERLKTYAHLFDDKVMKQLKRRRYTGWGRLSRKLINGIRDKQSGKTILDFLKSDGFANRNFMQLIHDDSLTFKEDIQKAQVSGQGDSLHEHIANLAGSPAIKKGILQTVKVVDELVKVMGRHKPENIVIEMARENQTTQKGQKNSRERMKRIEEGIKELGSQILKEHPVENTQLQNEKLYLYYLQNGRDMYVDQELDINRLSDYDVDHIVPQSFLKDDSIDNKVLTRSDKARGKSDNVPSEEVVKKMKNYWRQLLNAKLITQRKFDNLTKAERGGLSELDKAGFIKRQLVETRQITKHVAQILDSRMNTKYDENDKLIREVKVITLKSKLVSDFRKDFQFYKVREINNYHHAHDAYLNAVVGTALIKKYPKLESEFVYGDYKVYDVRKMIAKSEQEIGKATAKYFFYSNIMNFFKTEITLANGEIRKRPLIETNGETGEIVWDKGRDFATVRKVLSMPQVNIVKKTEVQTGGFSKESILPKRNSDKLIARKKDWDPKKYGGFDSPTVAYSVLVVAKVEKGKSKKLKSVKELLGITIMERSSFEKNPIDFLEAKGYKEVKKDLIIKLPKYSLFELENGRKRMLASAGELQKGNELALPSKYVNFLYLASHYEKLKGSPEDNEQKQLFVEQHKHYLDEIIEQISEFSKRVILADANLDKVLSAYNKHRDKPIREQAENIIHLFTLTNLGAPAAFKYFDTTIDRKRYTSTKEVLDATLIHQSITGLYETRIDLSQLGGDGGGGGEAAAKPAPGGTLNIEDEYRLHETSKGPDVPLGSTWLSDFPQAWAETGGMGLAVRQAPLIIPLKATSTPVSIKQYPMSQEARLGIKPHIQRLLDQGILVPCQSPWNTPLLPVKKPGTNDYRPVQDLREVNKRVEDIHPTVPNPYNLLSGLPPSHQWYTVLDLKDAFFCLRLHPTSQSLFAFEWRDPEMGISGQLTWTRLPQGFKNSPTLFNEALHRDLADFRIQHPDLILLQYVDDLLLAATSELDCQQGTRALLQTLGDLGYRASAKKAQICQKQVKYLGYLLKEGQRWLTEARKETVMGQPTPKTPRQLREFLGKAGFCRLFIPGFAEMAAPLYPLTKPGTLFEWGPDQQKAYQEIKQALLTAPALGLPDLTKPFELFVDEKQGYAKGVLTQKLGPWRRPVAYLSKKLDPVAAGWPPCLRMVAAIAVLTKDAGKLTMGQPLVILAPHAVEALVKQPPDRWLSNARMTHYQALLLDTDRVQFGPIVALNPATLLPLPEEGLQHDCLDILAEAHGTRPDLTDQPLPDADHTWYTDGSSFLQEGQRKAGAAVTTETEVVWAKALPAGTSAQRAELIALTQALKMAEGKKLNVYTDSRYAFATAHIHGEIYRRRGWLTSEGKEIKNKDEILALLKALFLPKRLSIIHCPGHQKGNRAEARGNRMADQAAREVATRETPETSTLLAGKRTADGSEFEKRTADGSEFESPKKKAKVE

SEQ ID NO: 2527 - protein, 2096 aa, synthetic construct
MPAAKRVKLDGGDKKYSIGLDIGTNSVGWAVITDEYKVPSKKFKVLGNTDRHSIKKNLIGALLFDSGETAEATRLKRTARRRYTRRKNRICYLQEIFSNEMAKVDDSFFHRLEESFLVEEDKKHERHPIFGNIVDEVAYHEKYPTIYHLRKKLVDSTDKADLRLIYLALAHMIKFRGHFLIEGDLNPDNSDVDKLFIQLVQTYNQLFEENPINASGVDAKAILSARLSKSRRLENLIAQLPGEKKNGLFGNLIALSLGLTPNFKSNFDLAEDAKLQLSKDTYDDDLDNLLAQIGDQYADLFLAAKNLSDAILLSDILRVNTEITKAPLSASMIKRYDEHHQDLTLLKALVRQQLPEKYKEIFFDQSKNGYAGYIDGGASQEEFYKFIKPILEKMDGTEELLVKLNREDLLRKQRTFDNGSIPHQIHLGELHAILRRQEDFYPFLKDNREKIEKILTFRIPYYVGPLARGNSRFAWMTRKSEETITPWNFEEVVDKGASAQSFIERMTNFDKNLPNEKVLPKHSLLYEYFTVYNELTKVKYVTEGMRKPAFLSGEQKKAIVDLLFKTNRKVTVKQLKEDYFKKIECFDSVEISGVEDRFNASLGTYHDLLKIIKDKDFLDNEENEDILEDIVLTLTLFEDREMIEERLKTYAHLFDDKVMKQLKRRRYTGWGRLSRKLINGIRDKQSGKTILDFLKSDGFANRNFMQLIHDDSLTFKEDIQKAQVSGQGDSLHEHIANLAGSPAIKKGILQTVKVVDELVKVMGRHKPENIVIEMARENQTTQKGQKNSRERMKRIEEGIKELGSQILKEHPVENTQLQNEKLYLYYLQNGRDMYVDQELDINRLSDYDVDHIVPQSFLKDDSIDNKVLTRSDKARGKSDNVPSEEVVKKMKNYWRQLLNAKLITQRKFDNLTKAERGGLSELDKAGFIKRQLVETRQITKHVAQILDSRMNTKYDENDKLIREVKVITLKSKLVSDFRKDFQFYKVREINNYHHAHDAYLNAVVGTALIKKYPKLESEFVYGDYKVYDVRKMIAKSEQEIGKATAKYFFYSNIMNFFKTEITLANGEIRKRPLIETNGETGEIVWDKGRDFATVRKVLSMPQVNIVKKTEVQTGGFSKESILPKRNSDKLIARKKDWDPKKYGGFDSPTVAYSVLVVAKVEKGKSKKLKSVKELLGITIMERSSFEKNPIDFLEAKGYKEVKKDLIIKLPKYSLFELENGRKRMLASAGELQKGNELALPSKYVNFLYLASHYEKLKGSPEDNEQKQLFVEQHKHYLDEIIEQISEFSKRVILADANLDKVLSAYNKHRDKPIREQAENIIHLFTLTNLGAPAAFKYFDTTIDRKRYTSTKEVLDATLIHQSITGLYETRIDLSQLGGDGGGGSPAPEAAAKGGTLNIEDEYRLHETSKGPDVPLGSTWLSDFPQAWAETGGMGLAVRQAPLIIPLKATSTPVSIKQYPMSQEARLGIKPHIQRLLDQGILVPCQSPWNTPLLPVKKPGTNDYRPVQDLREVNKRVEDIHPTVPNPYNLLSGLPPSHQWYTVLDLKDAFFCLRLHPTSQSLFAFEWRDPEMGISGQLTWTRLPQGFKNSPTLFNEALHRDLADFRIQHPDLILLQYVDDLLLAATSELDCQQGTRALLQTLGDLGYRASAKKAQICQKQVKYLGYLLKEGQRWLTEARKETVMGQPTPKTPRQLREFLGKAGFCRLFIPGFAEMAAPLYPLTKPGTLFEWGPDQQKAYQEIKQALLTAPALGLPDLTKPFELFVDEKQGYAKGVLTQKLGPWRRPVAYLSKKLDPVAAGWPPCLRMVAAIAVLTKDAGKLTMGQPLVILAPHAVEALVKQPPDRWLSNARMTHYQALLLDTDRVQFGPIVALNPATLLPLPEEGLQHDCLDILAEAHGTRPDLTDQPLPDADHTWYTDGSSFLQEGQRKAGAAVTTETEVVWAKALPAGTSAQRAELIALTQALKMAEGKKLNVYTDSRYAFATAHIHGEIYRRRGWLTSEGKEIKNKDEILALLKALFLPKRLSIIHCPGHQKGNRAEARGNRMADQAAREVATRETPETSTLLAGKRTADGSEFEKRTADGSEFESPKKKAKVE

SEQ ID NO: 2528 - protein, 2100 aa, synthetic construct
MPAAKRVKLDGGDKKYSIGLDIGTNSVGWAVITDEYKVPSKKFKVLGNTDRHSIKKNLIGALLFDSGETAEATRLKRTARRRYTRRKNRICYLQEIFSNEMAKVDDSFFHRLEESFLVEEDKKHERHPIFGNIVDEVAYHEKYPTIYHLRKKLVDSTDKADLRLIYLALAHMIKFRGHFLIEGDLNPDNSDVDKLFIQLVQTYNQLFEENPINASGVDAKAILSARLSKSRRLENLIAQLPGEKKNGLFGNLIALSLGLTPNFKSNFDLAEDAKLQLSKDTYDDDLDNLLAQIGDQYADLFLAAKNLSDAILLSDILRVNTEITKAPLSASMIKRYDEHHQDLTLLKALVRQQLPEKYKEIFFDQSKNGYAGYIDGGASQEEFYKFIKPILEKMDGTEELLVKLNREDLLRKQRTFDNGSIPHQIHLGELHAILRRQEDFYPFLKDNREKIEKILTFRIPYYVGPLARGNSRFAWMTRKSEETITPWNFEEVVDKGASAQSFIERMTNFDKNLPNEKVLPKHSLLYEYFTVYNELTKVKYVTEGMRKPAFLSGEQKKAIVDLLFKTNRKVTVKQLKEDYFKKIECFDSVEISGVEDRFNASLGTYHDLLKIIKDKDFLDNEENEDILEDIVLTLTLFEDREMIEERLKTYAHLFDDKVMKQLKRRRYTGWGRLSRKLINGIRDKQSGKTILDFLKSDGFANRNFMQLIHDDSLTFKEDIQKAQVSGQGDSLHEHIANLAGSPAIKKGILQTVKVVDELVKVMGRHKPENIVIEMARENQTTQKGQKNSRERMKRIEEGIKELGSQILKEHPVENTQLQNEKLYLYYLQNGRDMYVDQELDINRLSDYDVDHIVPQSFLKDDSIDNKVLTRSDKARGKSDNVPSEEVVKKMKNYWRQLLNAKLITQRKFDNLTKAERGGLSELDKAGFIKRQLVETRQITKHVAQILDSRMNTKYDENDKLIREVKVITLKSKLVSDFRKDFQFYKVREINNYHHAHDAYLNAVVGTALIKKYPKLESEFVYGDYKVYDVRKMIAKSEQEIGKATAKYFFYSNIMNFFKTEITLANGEIRKRPLIETNGETGEIVWDKGRDFATVRKVLSMPQVNIVKKTEVQTGGFSKESILPKRNSDKLIARKKDWDPKKYGGFDSPTVAYSVLVVAKVEKGKSKKLKSVKELLGITIMERSSFEKNPIDFLEAKGYKEVKKDLIIKLPKYSLFELENGRKRMLASAGELQKGNELALPSKYVNFLYLASHYEKLKGSPEDNEQKQLFVEQHKHYLDEIIEQISEFSKRVILADANLDKVLSAYNKHRDKPIREQAENIIHLFTLTNLGAPAAFKYFDTTIDRKRYTSTKEVLDATLIHQSITGLYETRIDLSQLGGDGGGGGGSEAAAKGGGGSGGTLNIEDEYRLHETSKGPDVPLGSTWLSDFPQAWAETGGMGLAVRQAPLIIPLKATSTPVSIKQYPMSQEARLGIKPHIQRLLDQGILVPCQSPWNTPLLPVKKPGTNDYRPVQDLREVNKRVEDIHPTVPNPYNLLSGLPPSHQWYTVLDLKDAFFCLRLHPTSQSLFAFEWRDPEMGISGQLTWTRLPQGFKNSPTLFNEALHRDLADFRIQHPDLILLQYVDDLLLAATSELDCQQGTRALLQTLGDLGYRASAKKAQICQKQVKYLGYLLKEGQRWLTEARKETVMGQPTPKTPRQLREFLGKAGFCRLFIPGFAEMAAPLYPLTKPGTLFEWGPDQQKAYQEIKQALLTAPALGLPDLTKPFELFVDEKQGYAKGVLTQKLGPWRRPVAYLSKKLDPVAAGWPPCLRMVAAIAVLTKDAGKLTMGQPLVILAPHAVEALVKQPPDRWLSNARMTHYQALLLDTDRVQFGPIVALNPATLLPLPEEGLQHDCLDILAEAHGTRPDLTDQPLPDADHTWYTDGSSFLQEGQRKAGAAVTTETEVVWAKALPAGTSAQRAELIALTQALKMAEGKKLNVYTDSRYAFATAHIHGEIYRRRGWLTSEGKEIKNKDEILALLKALFLPKRLSIIHCPGHQKGNRAEARGNRMADQAAREVATRETPETSTLLAGKRTADGSEFEKRTADGSEFESPKKKAKVE

SEQ ID NO: 2529 - protein, 2131 aa, synthetic construct
MPAAKRVKLDGGDKKYSIGLDIGTNSVGWAVITDEYKVPSKKFKVLGNTDRHSIKKNLIGALLFDSGETAEATRLKRTARRRYTRRKNRICYLQEIFSNEMAKVDDSFFHRLEESFLVEEDKKHERHPIFGNIVDEVAYHEKYPTIYHLRKKLVDSTDKADLRLIYLALAHMIKFRGHFLIEGDLNPDNSDVDKLFIQLVQTYNQLFEENPINASGVDAKAILSARLSKSRRLENLIAQLPGEKKNGLFGNLIALSLGLTPNFKSNFDLAEDAKLQLSKDTYDDDLDNLLAQIGDQYADLFLAAKNLSDAILLSDILRVNTEITKAPLSASMIKRYDEHHQDLTLLKALVRQQLPEKYKEIFFDQSKNGYAGYIDGGASQEEFYKFIKPILEKMDGTEELLVKLNREDLLRKQRTFDNGSIPHQIHLGELHAILRRQEDFYPFLKDNREKIEKILTFRIPYYVGPLARGNSRFAWMTRKSEETITPWNFEEVVDKGASAQSFIERMTNFDKNLPNEKVLPKHSLLYEYFTVYNELTKVKYVTEGMRKPAFLSGEQKKAIVDLLFKTNRKVTVKQLKEDYFKKIECFDSVEISGVEDRFNASLGTYHDLLKIIKDKDFLDNEENEDILEDIVLTLTLFEDREMIEERLKTYAHLFDDKVMKQLKRRRYTGWGRLSRKLINGIRDKQSGKTILDFLKSDGFANRNFMQLIHDDSLTFKEDIQKAQVSGQGDSLHEHIANLAGSPAIKKGILQTVKVVDELVKVMGRHKPENIVIEMARENQTTQKGQKNSRERMKRIEEGIKELGSQILKEHPVENTQLQNEKLYLYYLQNGRDMYVDQELDINRLSDYDVDHIVPQSFLKDDSIDNKVLTRSDKARGKSDNVPSEEVVKKMKNYWRQLLNAKLITQRKFDNLTKAERGGLSELDKAGFIKRQLVETRQITKHVAQILDSRMNTKYDENDKLIREVKVITLKSKLVSDFRKDFQFYKVREINNYHHAHDAYLNAVVGTALIKKYPKLESEFVYGDYKVYDVRKMIAKSEQEIGKATAKYFFYSNIMNFFKTEITLANGEIRKRPLIETNGETGEIVWDKGRDFATVRKVLSMPQVNIVKKTEVQTGGFSKESILPKRNSDKLIARKKDWDPKKYGGFDSPTVAYSVLVVAKVEKGKSKKLKSVKELLGITIMERSSFEKNPIDFLEAKGYKEVKKDLIIKLPKYSLFELENGRKRMLASAGELQKGNELALPSKYVNFLYLASHYEKLKGSPEDNEQKQLFVEQHKHYLDEIIEQISEFSKRVILADANLDKVLSAYNKHRDKPIREQAENIIHLFTLTNLGAPAAFKYFDTTIDRKRYTSTKEVLDATLIHQSITGLYETRIDLSQLGGDGGAEAAAKEAAAKEAAAKEAAAKALEAEAAAKEAAAKEAAAKEAAAKAGGTLNIEDEYRLHETSKGPDVPLGSTWLSDFPQAWAETGGMGLAVRQAPLIIPLKATSTPVSIKQYPMSQEARLGIKPHIQRLLDQGILVPCQSPWNTPLLPVKKPGTNDYRPVQDLREVNKRVEDIHPTVPNPYNLLSGLPPSHQWYTVLDLKDAFFCLRLHPTSQSLFAFEWRDPEMGISGQLTWTRLPQGFKNSPTLFNEALHRDLADFRIQHPDLILLQYVDDLLLAATSELDCQQGTRALLQTLGDLGYRASAKKAQICQKQVKYLGYLLKEGQRWLTEARKETVMGQPTPKTPRQLREFLGKAGFCRLFIPGFAEMAAPLYPLTKPGTLFEWGPDQQKAYQEIKQALLTAPALGLPDLTKPFELFVDEKQGYAKGVLTQKLGPWRRPVAYLSKKLDPVAAGWPPCLRMVAAIAVLTKDAGKLTMGQPLVILAPHAVEALVKQPPDRWLSNARMTHYQALLLDTDRVQFGPIVALNPATLLPLPEEGLQHDCLDILAEAHGTRPDLTDQPLPDADHTWYTDGSSFLQEGQRKAGAAVTTETEVVWAKALPAGTSAQRAELIALTQALKMAEGKKLNVYTDSRYAFATAHIHGEIYRRRGWLTSEGKEIKNKDEILALLKALFLPKRLSIIHCPGHQKGNRAEARGNRMADQAAREVATRETPETSTLLAGKRTADGSEFEKRTADGSEFESPKKKAKVE

SEQ ID NO: 2530 - protein, 2096 aa, synthetic construct
MPAAKRVKLDGGDKKYSIGLDIGTNSVGWAVITDEYKVPSKKFKVLGNTDRHSIKKNLIGALLFDSGETAEATRLKRTARRRYTRRKNRICYLQEIFSNEMAKVDDSFFHRLEESFLVEEDKKHERHPIFGNIVDEVAYHEKYPTIYHLRKKLVDSTDKADLRLIYLALAHMIKFRGHFLIEGDLNPDNSDVDKLFIQLVQTYNQLFEENPINASGVDAKAILSARLSKSRRLENLIAQLPGEKKNGLFGNLIALSLGLTPNFKSNFDLAEDAKLQLSKDTYDDDLDNLLAQIGDQYADLFLAAKNLSDAILLSDILRVNTEITKAPLSASMIKRYDEHHQDLTLLKALVRQQLPEKYKEIFFDQSKNGYAGYIDGGASQEEFYKFIKPILEKMDGTEELLVKLNREDLLRKQRTFDNGSIPHQIHLGELHAILRRQEDFYPFLKDNREKIEKILTFRIPYYVGPLARGNSRFAWMTRKSEETITPWNFEEVVDKGASAQSFIERMTNFDKNLPNEKVLPKHSLLYEYFTVYNELTKVKYVTEGMRKPAFLSGEQKKAIVDLLFKTNRKVTVKQLKEDYFKKIECFDSVEISGVEDRFNASLGTYHDLLKIIKDKDFLDNEENEDILEDIVLTLTLFEDREMIEERLKTYAHLFDDKVMKQLKRRRYTGWGRLSRKLINGIRDKQSGKTILDFLKSDGFANRNFMQLIHDDSLTFKEDIQKAQVSGQGDSLHEHIANLAGSPAIKKGILQTVKVVDELVKVMGRHKPENIVIEMARENQTTQKGQKNSRERMKRIEEGIKELGSQILKEHPVENTQLQNEKLYLYYLQNGRDMYVDQELDINRLSDYDVDHIVPQSFLKDDSIDNKVLTRSDKARGKSDNVPSEEVVKKMKNYWRQLLNAKLITQRKFDNLTKAERGGLSELDKAGFIKRQLVETRQITKHVAQILDSRMNTKYDENDKLIREVKVITLKSKLVSDFRKDFQFYKVREINNYHHAHDAYLNAVVGTALIKKYPKLESEFVYGDYKVYDVRKMIAKSEQEIGKATAKYFFYSNIMNFFKTEITLANGEIRKRPLIETNGETGEIVWDKGRDFATVRKVLSMPQVNIVKKTEVQTGGFSKESILPKRNSDKLIARKKDWDPKKYGGFDSPTVAYSVLVVAKVEKGKSKKLKSVKELLGITIMERSSFEKNPIDFLEAKGYKEVKKDLIIKLPKYSLFELENGRKRMLASAGELQKGNELALPSKYVNFLYLASHYEKLKGSPEDNEQKQLFVEQHKHYLDEIIEQISEFSKRVILADANLDKVLSAYNKHRDKPIREQAENIIHLFTLTNLGAPAAFKYFDTTIDRKRYTSTKEVLDATLIHQSITGLYETRIDLSQLGGDGGGGSEAAAKPAPGGTLNIEDEYRLHETSKGPDVPLGSTWLSDFPQAWAETGGMGLAVRQAPLIIPLKATSTPVSIKQYPMSQEARLGIKPHIQRLLDQGILVPCQSPWNTPLLPVKKPGTNDYRPVQDLREVNKRVEDIHPTVPNPYNLLSGLPPSHQWYTVLDLKDAFFCLRLHPTSQSLFAFEWRDPEMGISGQLTWTRLPQGFKNSPTLFNEALHRDLADFRIQHPDLILLQYVDDLLLAATSELDCQQGTRALLQTLGDLGYRASAKKAQICQKQVKYLGYLLKEGQRWLTEARKETVMGQPTPKTPRQLREFLGKAGFCRLFIPGFAEMAAPLYPLTKPGTLFEWGPDQQKAYQEIKQALLTAPALGLPDLTKPFELFVDEKQGYAKGVLTQKLGPWRRPVAYLSKKLDPVAAGWPPCLRMVAAIAVLTKDAGKLTMGQPLVILAPHAVEALVKQPPDRWLSNARMTHYQALLLDTDRVQFGPIVALNPATLLPLPEEGLQHDCLDILAEAHGTRPDLTDQPLPDADHTWYTDGSSFLQEGQRKAGAAVTTETEVVWAKALPAGTSAQRAELIALTQALKMAEGKKLNVYTDSRYAFATAHIHGEIYRRRGWLTSEGKEIKNKDEILALLKALFLPKRLSIIHCPGHQKGNRAEARGNRMADQAAREVATRETPETSTLLAGKRTADGSEFEKRTADGSEFESPKKKAKVE

SEQ ID NO: 2531 - protein, 2094 aa, synthetic construct
MPAAKRVKLDGGDKKYSIGLDIGTNSVGWAVITDEYKVPSKKFKVLGNTDRHSIKKNLIGALLFDSGETAEATRLKRTARRRYTRRKNRICYLQEIFSNEMAKVDDSFFHRLEESFLVEEDKKHERHPIFGNIVDEVAYHEKYPTIYHLRKKLVDSTDKADLRLIYLALAHMIKFRGHFLIEGDLNPDNSDVDKLFIQLVQTYNQLFEENPINASGVDAKAILSARLSKSRRLENLIAQLPGEKKNGLFGNLIALSLGLTPNFKSNFDLAEDAKLQLSKDTYDDDLDNLLAQIGDQYADLFLAAKNLSDAILLSDILRVNTEITKAPLSASMIKRYDEHHQDLTLLKALVRQQLPEKYKEIFFDQSKNGYAGYIDGGASQEEFYKFIKPILEKMDGTEELLVKLNREDLLRKQRTFDNGSIPHQIHLGELHAILRRQEDFYPFLKDNREKIEKILTFRIPYYVGPLARGNSRFAWMTRKSEETITPWNFEEVVDKGASAQSFIERMTNFDKNLPNEKVLPKHSLLYEYFTVYNELTKVKYVTEGMRKPAFLSGEQKKAIVDLLFKTNRKVTVKQLKEDYFKKIECFDSVEISGVEDRFNASLGTYHDLLKIIKDKDFLDNEENEDILEDIVLTLTLFEDREMIEERLKTYAHLFDDKVMKQLKRRRYTGWGRLSRKLINGIRDKQSGKTILDFLKSDGFANRNFMQLIHDDSLTFKEDIQKAQVSGQGDSLHEHIANLAGSPAIKKGILQTVKVVDELVKVMGRHKPENIVIEMARENQTTQKGQKNSRERMKRIEEGIKELGSQILKEHPVENTQLQNEKLYLYYLQNGRDMYVDQELDINRLSDYDVDHIVPQSFLKDDSIDNKVLTRSDKARGKSDNVPSEEVVKKMKNYWRQLLNAKLITQRKFDNLTKAERGGLSELDKAGFIKRQLVETRQITKHVAQILDSRMNTKYDENDKLIREVKVITLKSKLVSDFRKDFQFYKVREINNYHHAHDAYLNAVVGTALIKKYPKLESEFVYGDYKVYDVRKMIAKSEQEIGKATAKYFFYSNIMNFFKTEITLANGEIRKRPLIETNGETGEIVWDKGRDFATVRKVLSMPQVNIVKKTEVQTGGFSKESILPKRNSDKLIARKKDWDPKKYGGFDSPTVAYSVLVVAKVEKGKSKKLKSVKELLGITIMERSSFEKNPIDFLEAKGYKEVKKDLIIKLPKYSLFELENGRKRMLASAGELQKGNELALPSKYVNFLYLASHYEKLKGSPEDNEQKQLFVEQHKHYLDEIIEQISEFSKRVILADANLDKVLSAYNKHRDKPIREQAENIIHLFTLTNLGAPAAFKYFDTTIDRKRYTSTKEVLDATLIHQSITGLYETRIDLSQLGGDGGPAPGSSGGGGGTLNIEDEYRLHETSKGPDVPLGSTWLSDFPQAWAETGGMGLAVRQAPLIIPLKATSTPVSIKQYPMSQEARLGIKPHIQRLLDQGILVPCQSPWNTPLLPVKKPGTNDYRPVQDLREVNKRVEDIHPTVPNPYNLLSGLPPSHQWYTVLDLKDAFFCLRLHPTSQSLFAFEWRDPEMGISGQLTWTRLPQGFKNSPTLFNEALHRDLADFRIQHPDLILLQYVDDLLLAATSELDCQQGTRALLQTLGDLGYRASAKKAQICQKQVKYLGYLLKEGQRWLTEARKETVMGQPTPKTPRQLREFLGKAGFCRLFIPGFAEMAAPLYPLTKPGTLFEWGPDQQKAYQEIKQALLTAPALGLPDLTKPFELFVDEKQGYAKGVLTQKLGPWRRPVAYLSKKLDPVAAGWPPCLRMVAAIAVLTKDAGKLTMGQPLVILAPHAVEALVKQPPDRWLSNARMTHYQALLLDTDRVQFGPIVALNPATLLPLPEEGLQHDCLDILAEAHGTRPDLTDQPLPDADHTWYTDGSSFLQEGQRKAGAAVTTETEVVWAKALPAGTSAQRAELIALTQALKMAEGKKLNVYTDSRYAFATAHIHGEIYRRRGWLTSEGKEIKNKDEILALLKALFLPKRLSIIHCPGHQKGNRAEARGNRMADQAAREVATRETPETSTLLAGKRTADGSEFEKRTADGSEFESPKKKAKVE

SEQ ID NO: 2532 - protein, 2100 aa, synthetic construct
MPAAKRVKLDGGDKKYSIGLDIGTNSVGWAVITDEYKVPSKKFKVLGNTDRHSIKKNLIGALLFDSGETAEATRLKRTARRRYTRRKNRICYLQEIFSNEMAKVDDSFFHRLEESFLVEEDKKHERHPIFGNIVDEVAYHEKYPTIYHLRKKLVDSTDKADLRLIYLALAHMIKFRGHFLIEGDLNPDNSDVDKLFIQLVQTYNQLFEENPINASGVDAKAILSARLSKSRRLENLIAQLPGEKKNGLFGNLIALSLGLTPNFKSNFDLAEDAKLQLSKDTYDDDLDNLLAQIGDQYADLFLAAKNLSDAILLSDILRVNTEITKAPLSASMIKRYDEHHQDLTLLKALVRQQLPEKYKEIFFDQSKNGYAGYIDGGASQEEFYKFIKPILEKMDGTEELLVKLNREDLLRKQRTFDNGSIPHQIHLGELHAILRRQEDFYPFLKDNREKIEKILTFRIPYYVGPLARGNSRFAWMTRKSEETITPWNFEEVVDKGASAQSFIERMTNFDKNLPNEKVLPKHSLLYEYFTVYNELTKVKYVTEGMRKPAFLSGEQKKAIVDLLFKTNRKVTVKQLKEDYFKKIECFDSVEISGVEDRFNASLGTYHDLLKIIKDKDFLDNEENEDILEDIVLTLTLFEDREMIEERLKTYAHLFDDKVMKQLKRRRYTGWGRLSRKLINGIRDKQSGKTILDFLKSDGFANRNFMQLIHDDSLTFKEDIQKAQVSGQGDSLHEHIANLAGSPAIKKGILQTVKVVDELVKVMGRHKPENIVIEMARENQTTQKGQKNSRERMKRIEEGIKELGSQILKEHPVENTQLQNEKLYLYYLQNGRDMYVDQELDINRLSDYDVDHIVPQSFLKDDSIDNKVLTRSDKARGKSDNVPSEEVVKKMKNYWRQLLNAKLITQRKFDNLTKAERGGLSELDKAGFIKRQLVETRQITKHVAQILDSRMNTKYDENDKLIREVKVITLKSKLVSDFRKDFQFYKVREINNYHHAHDAYLNAVVGTALIKKYPKLESEFVYGDYKVYDVRKMIAKSEQEIGKATAKYFFYSNIMNFFKTEITLANGEIRKRPLIETNGETGEIVWDKGRDFATVRKVLSMPQVNIVKKTEVQTGGFSKESILPKRNSDKLIARKKDWDPKKYGGFDSPTVAYSVLVVAKVEKGKSKKLKSVKELLGITIMERSSFEKNPIDFLEAKGYKEVKKDLIIKLPKYSLFELENGRKRMLASAGELQKGNELALPSKYVNFLYLASHYEKLKGSPEDNEQKQLFVEQHKHYLDEIIEQISEFSKRVILADANLDKVLSAYNKHRDKPIREQAENIIHLFTLTNLGAPAAFKYFDTTIDRKRYTSTKEVLDATLIHQSITGLYETRIDLSQLGGDGGGSSGSSGSSGSSGSSGGTLNIEDEYRLHETSKGPDVPLGSTWLSDFPQAWAETGGMGLAVRQAPLIIPLKATSTPVSIKQYPMSQEARLGIKPHIQRLLDQGILVPCQSPWNTPLLPVKKPGTNDYRPVQDLREVNKRVEDIHPTVPNPYNLLSGLPPSHQWYTVLDLKDAFFCLRLHPTSQSLFAFEWRDPEMGISGQLTWTRLPQGFKNSPTLFNEALHRDLADFRIQHPDLILLQYVDDLLLAATSELDCQQGTRALLQTLGDLGYRASAKKAQICQKQVKYLGYLLKEGQRWLTEARKETVMGQPTPKTPRQLREFLGKAGFCRLFIPGFAEMAAPLYPLTKPGTLFEWGPDQQKAYQEIKQALLTAPALGLPDLTKPFELFVDEKQGYAKGVLTQKLGPWRRPVAYLSKKLDPVAAGWPPCLRMVAAIAVLTKDAGKLTMGQPLVILAPHAVEALVKQPPDRWLSNARMTHYQALLLDTDRVQFGPIVALNPATLLPLPEEGLQHDCLDILAEAHGTRPDLTDQPLPDADHTWYTDGSSFLQEGQRKAGAAVTTETEVVWAKALPAGTSAQRAELIALTQALKMAEGKKLNVYTDSRYAFATAHIHGEIYRRRGWLTSEGKEIKNKDEILALLKALFLPKRLSIIHCPGHQKGNRAEARGNRMADQAAREVATRETPETSTLLAGKRTADGSEFEKRTADGSEFESPKKKAKVE

SEQ ID NO: 2533 - protein, 2094 aa, synthetic construct
MPAAKRVKLDGGDKKYSIGLDIGTNSVGWAVITDEYKVPSKKFKVLGNTDRHSIKKNLIGALLFDSGETAEATRLKRTARRRYTRRKNRICYLQEIFSNEMAKVDDSFFHRLEESFLVEEDKKHERHPIFGNIVDEVAYHEKYPTIYHLRKKLVDSTDKADLRLIYLALAHMIKFRGHFLIEGDLNPDNSDVDKLFIQLVQTYNQLFEENPINASGVDAKAILSARLSKSRRLENLIAQLPGEKKNGLFGNLIALSLGLTPNFKSNFDLAEDAKLQLSKDTYDDDLDNLLAQIGDQYADLFLAAKNLSDAILLSDILRVNTEITKAPLSASMIKRYDEHHQDLTLLKALVRQQLPEKYKEIFFDQSKNGYAGYIDGGASQEEFYKFIKPILEKMDGTEELLVKLNREDLLRKQRTFDNGSIPHQIHLGELHAILRRQEDFYPFLKDNREKIEKILTFRIPYYVGPLARGNSRFAWMTRKSEETITPWNFEEVVDKGASAQSFIERMTNFDKNLPNEKVLPKHSLLYEYFTVYNELTKVKYVTEGMRKPAFLSGEQKKAIVDLLFKTNRKVTVKQLKEDYFKKIECFDSVEISGVEDRFNASLGTYHDLLKIIKDKDFLDNEENEDILEDIVLTLTLFEDREMIEERLKTYAHLFDDKVMKQLKRRRYTGWGRLSRKLINGIRDKQSGKTILDFLKSDGFANRNFMQLIHDDSLTFKEDIQKAQVSGQGDSLHEHIANLAGSPAIKKGILQTVKVVDELVKVMGRHKPENIVIEMARENQTTQKGQKNSRERMKRIEEGIKELGSQILKEHPVENTQLQNEKLYLYYLQNGRDMYVDQELDINRLSDYDVDHIVPQSFLKDDSIDNKVLTRSDKARGKSDNVPSEEVVKKMKNYWRQLLNAKLITQRKFDNLTKAERGGLSELDKAGFIKRQLVETRQITKHVAQILDSRMNTKYDENDKLIREVKVITLKSKLVSDFRKDFQFYKVREINNYHHAHDAYLNAVVGTALIKKYPKLESEFVYGDYKVYDVRKMIAKSEQEIGKATAKYFFYSNIMNFFKTEITLANGEIRKRPLIETNGETGEIVWDKGRDFATVRKVLSMPQVNIVKKTEVQTGGFSKESILPKRNSDKLIARKKDWDPKKYGGFDSPTVAYSVLVVAKVEKGKSKKLKSVKELLGITIMERSSFEKNPIDFLEAKGYKEVKKDLIIKLPKYSLFELENGRKRMLASAGELQKGNELALPSKYVNFLYLASHYEKLKGSPEDNEQKQLFVEQHKHYLDEIIEQISEFSKRVILADANLDKVLSAYNKHRDKPIREQAENIIHLFTLTNLGAPAAFKYFDTTIDRKRYTSTKEVLDATLIHQSITGLYETRIDLSQLGGDGGPAPGGSGSSGGTLNIEDEYRLHETSKGPDVPLGSTWLSDFPQAWAETGGMGLAVRQAPLIIPLKATSTPVSIKQYPMSQEARLGIKPHIQRLLDQGILVPCQSPWNTPLLPVKKPGTNDYRPVQDLREVNKRVEDIHPTVPNPYNLLSGLPPSHQWYTVLDLKDAFFCLRLHPTSQSLFAFEWRDPEMGISGQLTWTRLPQGFKNSPTLFNEALHRDLADFRIQHPDLILLQYVDDLLLAATSELDCQQGTRALLQTLGDLGYRASAKKAQICQKQVKYLGYLLKEGQRWLTEARKETVMGQPTPKTPRQLREFLGKAGFCRLFIPGFAEMAAPLYPLTKPGTLFEWGPDQQKAYQEIKQALLTAPALGLPDLTKPFELFVDEKQGYAKGVLTQKLGPWRRPVAYLSKKLDPVAAGWPPCLRMVAAIAVLTKDAGKLTMGQPLVILAPHAVEALVKQPPDRWLSNARMTHYQALLLDTDRVQFGPIVALNPATLLPLPEEGLQHDCLDILAEAHGTRPDLTDQPLPDADHTWYTDGSSFLQEGQRKAGAAVTTETEVVWAKALPAGTSAQRAELIALTQALKMAEGKKLNVYTDSRYAFATAHIHGEIYRRRGWLTSEGKEIKNKDEILALLKALFLPKRLSIIHCPGHQKGNRAEARGNRMADQAAREVATRETPETSTLLAGKRTADGSEFEKRTADGSEFESPKKKAKVE

SEQ ID NO: 2534 - protein, 2098 aa, synthetic construct
MPAAKRVKLDGGDKKYSIGLDIGTNSVGWAVITDEYKVPSKKFKVLGNTDRHSIKKNLIGALLFDSGETAEATRLKRTARRRYTRRKNRICYLQEIFSNEMAKVDDSFFHRLEESFLVEEDKKHERHPIFGNIVDEVAYHEKYPTIYHLRKKLVDSTDKADLRLIYLALAHMIKFRGHFLIEGDLNPDNSDVDKLFIQLVQTYNQLFEENPINASGVDAKAILSARLSKSRRLENLIAQLPGEKKNGLFGNLIALSLGLTPNFKSNFDLAEDAKLQLSKDTYDDDLDNLLAQIGDQYADLFLAAKNLSDAILLSDILRVNTEITKAPLSASMIKRYDEHHQDLTLLKALVRQQLPEKYKEIFFDQSKNGYAGYIDGGASQEEFYKFIKPILEKMDGTEELLVKLNREDLLRKQRTFDNGSIPHQIHLGELHAILRRQEDFYPFLKDNREKIEKILTFRIPYYVGPLARGNSRFAWMTRKSEETITPWNFEEVVDKGASAQSFIERMTNFDKNLPNEKVLPKHSLLYEYFTVYNELTKVKYVTEGMRKPAFLSGEQKKAIVDLLFKTNRKVTVKQLKEDYFKKIECFDSVEISGVEDRFNASLGTYHDLLKIIKDKDFLDNEENEDILEDIVLTLTLFEDREMIEERLKTYAHLFDDKVMKQLKRRRYTGWGRLSRKLINGIRDKQSGKTILDFLKSDGFANRNFMQLIHDDSLTFKEDIQKAQVSGQGDSLHEHIANLAGSPAIKKGILQTVKVVDELVKVMGRHKPENIVIEMARENQTTQKGQKNSRERMKRIEEGIKELGSQILKEHPVENTQLQNEKLYLYYLQNGRDMYVDQELDINRLSDYDVDHIVPQSFLKDDSIDNKVLTRSDKARGKSDNVPSEEVVKKMKNYWRQLLNAKLITQRKFDNLTKAERGGLSELDKAGFIKRQLVETRQITKHVAQILDSRMNTKYDENDKLIREVKVITLKSKLVSDFRKDFQFYKVREINNYHHAHDAYLNAVVGTALIKKYPKLESEFVYGDYKVYDVRKMIAKSEQEIGKATAKYFFYSNIMNFFKTEITLANGEIRKRPLIETNGETGEIVWDKGRDFATVRKVLSMPQVNIVKKTEVQTGGFSKESILPKRNSDKLIARKKDWDPKKYGGFDSPTVAYSVLVVAKVEKGKSKKLKSVKELLGITIMERSSFEKNPIDFLEAKGYKEVKKDLIIKLPKYSLFELENGRKRMLASAGELQKGNELALPSKYVNFLYLASHYEKLKGSPEDNEQKQLFVEQHKHYLDEIIEQISEFSKRVILADANLDKVLSAYNKHRDKPIREQAENIIHLFTLTNLGAPAAFKYFDTTIDRKRYTSTKEVLDATLIHQSITGLYETRIDLSQLGGDGGPAPAPAPAPAPAPGGTLNIEDEYRLHETSKGPDVPLGSTWLSDFPQAWAETGGMGLAVRQAPLIIPLKATSTPVSIKQYPMSQEARLGIKPHIQRLLDQGILVPCQSPWNTPLLPVKKPGTNDYRPVQDLREVNKRVEDIHPTVPNPYNLLSGLPPSHQWYTVLDLKDAFFCLRLHPTSQSLFAFEWRDPEMGISGQLTWTRLPQGFKNSPTLFNEALHRDLADFRIQHPDLILLQYVDDLLLAATSELDCQQGTRALLQTLGDLGYRASAKKAQICQKQVKYLGYLLKEGQRWLTEARKETVMGQPTPKTPRQLREFLGKAGFCRLFIPGFAEMAAPLYPLTKPGTLFEWGPDQQKAYQEIKQALLTAPALGLPDLTKPFELFVDEKQGYAKGVLTQKLGPWRRPVAYLSKKLDPVAAGWPPCLRMVAAIAVLTKDAGKLTMGQPLVILAPHAVEALVKQPPDRWLSNARMTHYQALLLDTDRVQFGPIVALNPATLLPLPEEGLQHDCLDILAEAHGTRPDLTDQPLPDADHTWYTDGSSFLQEGQRKAGAAVTTETEVVWAKALPAGTSAQRAELIALTQALKMAEGKKLNVYTDSRYAFATAHIHGEIYRRRGWLTSEGKEIKNKDEILALLKALFLPKRLSIIHCPGHQKGNRAEARGNRMADQAAREVATRETPETSTLLAGKRTADGSEFEKRTADGSEFESPKKKAKVE

SEQ ID NO: 2535 - protein, 2096 aa, synthetic construct
MPAAKRVKLDGGDKKYSIGLDIGTNSVGWAVITDEYKVPSKKFKVLGNTDRHSIKKNLIGALLFDSGETAEATRLKRTARRRYTRRKNRICYLQEIFSNEMAKVDDSFFHRLEESFLVEEDKKHERHPIFGNIVDEVAYHEKYPTIYHLRKKLVDSTDKADLRLIYLALAHMIKFRGHFLIEGDLNPDNSDVDKLFIQLVQTYNQLFEENPINASGVDAKAILSARLSKSRRLENLIAQLPGEKKNGLFGNLIALSLGLTPNFKSNFDLAEDAKLQLSKDTYDDDLDNLLAQIGDQYADLFLAAKNLSDAILLSDILRVNTEITKAPLSASMIKRYDEHHQDLTLLKALVRQQLPEKYKEIFFDQSKNGYAGYIDGGASQEEFYKFIKPILEKMDGTEELLVKLNREDLLRKQRTFDNGSIPHQIHLGELHAILRRQEDFYPFLKDNREKIEKILTFRIPYYVGPLARGNSRFAWMTRKSEETITPWNFEEVVDKGASAQSFIERMTNFDKNLPNEKVLPKHSLLYEYFTVYNELTKVKYVTEGMRKPAFLSGEQKKAIVDLLFKTNRKVTVKQLKEDYFKKIECFDSVEISGVEDRFNASLGTYHDLLKIIKDKDFLDNEENEDILEDIVLTLTLFEDREMIEERLKTYAHLFDDKVMKQLKRRRYTGWGRLSRKLINGIRDKQSGKTILDFLKSDGFANRNFMQLIHDDSLTFKEDIQKAQVSGQGDSLHEHIANLAGSPAIKKGILQTVKVVDELVKVMGRHKPENIVIEMARENQTTQKGQKNSRERMKRIEEGIKELGSQILKEHPVENTQLQNEKLYLYYLQNGRDMYVDQELDINRLSDYDVDHIVPQSFLKDDSIDNKVLTRSDKARGKSDNVPSEEVVKKMKNYWRQLLNAKLITQRKFDNLTKAERGGLSELDKAGFIKRQLVETRQITKHVAQILDSRMNTKYDENDKLIREVKVITLKSKLVSDFRKDFQFYKVREINNYHHAHDAYLNAVVGTALIKKYPKLESEFVYGDYKVYDVRKMIAKSEQEIGKATAKYFFYSNIMNFFKTEITLANGEIRKRPLIETNGETGEIVWDKGRDFATVRKVLSMPQVNIVKKTEVQTGGFSKESILPKRNSDKLIARKKDWDPKKYGGFDSPTVAYSVLVVAKVEKGKSKKLKSVKELLGITIMERSSFEKNPIDFLEAKGYKEVKKDLIIKLPKYSLFELENGRKRMLASAGELQKGNELALPSKYVNFLYLASHYEKLKGSPEDNEQKQLFVEQHKHYLDEIIEQISEFSKRVILADANLDKVLSAYNKHRDKPIREQAENIIHLFTLTNLGAPAAFKYFDTTIDRKRYTSTKEVLDATLIHQSITGLYETRIDLSQLGGDGGGSSEAAAKPAPGGTLNIEDEYRLHETSKGPDVPLGSTWLSDFPQAWAETGGMGLAVRQAPLIIPLKATSTPVSIKQYPMSQEARLGIKPHIQRLLDQGILVPCQSPWNTPLLPVKKPGTNDYRPVQDLREVNKRVEDIHPTVPNPYNLLSGLPPSHQWYTVLDLKDAFFCLRLHPTSQSLFAFEWRDPEMGISGQLTWTRLPQGFKNSPTLFNEALHRDLADFRIQHPDLILLQYVDDLLLAATSELDCQQGTRALLQTLGDLGYRASAKKAQICQKQVKYLGYLLKEGQRWLTEARKETVMGQPTPKTPRQLREFLGKAGFCRLFIPGFAEMAAPLYPLTKPGTLFEWGPDQQKAYQEIKQALLTAPALGLPDLTKPFELFVDEKQGYAKGVLTQKLGPWRRPVAYLSKKLDPVAAGWPPCLRMVAAIAVLTKDAGKLTMGQPLVILAPHAVEALVKQPPDRWLSNARMTHYQALLLDTDRVQFGPIVALNPATLLPLPEEGLQHDCLDILAEAHGTRPDLTDQPLPDADHTWYTDGSSFLQEGQRKAGAAVTTETEVVWAKALPAGTSAQRAELIALTQALKMAEGKKLNVYTDSRYAFATAHIHGEIYRRRGWLTSEGKEIKNKDEILALLKALFLPKRLSIIHCPGHQKGNRAEARGNRMADQAAREVATRETPETSTLLAGKRTADGSEFEKRTADGSEFESPKKKAKVE

SEQ ID NO: 2536 - protein, 2110 aa, synthetic construct
MPAAKRVKLDGGDKKYSIGLDIGTNSVGWAVITDEYKVPSKKFKVLGNTDRHSIKKNLIGALLFDSGETAEATRLKRTARRRYTRRKNRICYLQEIFSNEMAKVDDSFFHRLEESFLVEEDKKHERHPIFGNIVDEVAYHEKYPTIYHLRKKLVDSTDKADLRLIYLALAHMIKFRGHFLIEGDLNPDNSDVDKLFIQLVQTYNQLFEENPINASGVDAKAILSARLSKSRRLENLIAQLPGEKKNGLFGNLIALSLGLTPNFKSNFDLAEDAKLQLSKDTYDDDLDNLLAQIGDQYADLFLAAKNLSDAILLSDILRVNTEITKAPLSASMIKRYDEHHQDLTLLKALVRQQLPEKYKEIFFDQSKNGYAGYIDGGASQEEFYKFIKPILEKMDGTEELLVKLNREDLLRKQRTFDNGSIPHQIHLGELHAILRRQEDFYPFLKDNREKIEKILTFRIPYYVGPLARGNSRFAWMTRKSEETITPWNFEEVVDKGASAQSFIERMTNFDKNLPNEKVLPKHSLLYEYFTVYNELTKVKYVTEGMRKPAFLSGEQKKAIVDLLFKTNRKVTVKQLKEDYFKKIECFDSVEISGVEDRFNASLGTYHDLLKIIKDKDFLDNEENEDILEDIVLTLTLFEDREMIEERLKTYAHLFDDKVMKQLKRRRYTGWGRLSRKLINGIRDKQSGKTILDFLKSDGFANRNFMQLIHDDSLTFKEDIQKAQVSGQGDSLHEHIANLAGSPAIKKGILQTVKVVDELVKVMGRHKPENIVIEMARENQTTQKGQKNSRERMKRIEEGIKELGSQILKEHPVENTQLQNEKLYLYYLQNGRDMYVDQELDINRLSDYDVDHIVPQSFLKDDSIDNKVLTRSDKARGKSDNVPSEEVVKKMKNYWRQLLNAKLITQRKFDNLTKAERGGLSELDKAGFIKRQLVETRQITKHVAQILDSRMNTKYDENDKLIREVKVITLKSKLVSDFRKDFQFYKVREINNYHHAHDAYLNAVVGTALIKKYPKLESEFVYGDYKVYDVRKMIAKSEQEIGKATAKYFFYSNIMNFFKTEITLANGEIRKRPLIETNGETGEIVWDKGRDFATVRKVLSMPQVNIVKKTEVQTGGFSKESILPKRNSDKLIARKKDWDPKKYGGFDSPTVAYSVLVVAKVEKGKSKKLKSVKELLGITIMERSSFEKNPIDFLEAKGYKEVKKDLIIKLPKYSLFELENGRKRMLASAGELQKGNELALPSKYVNFLYLASHYEKLKGSPEDNEQKQLFVEQHKHYLDEIIEQISEFSKRVILADANLDKVLSAYNKHRDKPIREQAENIIHLFTLTNLGAPAAFKYFDTTIDRKRYTSTKEVLDATLIHQSITGLYETRIDLSQLGGDGGEAAAKEAAAKEAAAKEAAAKEAAAKGGTLNIEDEYRLHETSKGPDVPLGSTWLSDFPQAWAETGGMGLAVRQAPLIIPLKATSTPVSIKQYPMSQEARLGIKPHIQRLLDQGILVPCQSPWNTPLLPVKKPGTNDYRPVQDLREVNKRVEDIHPTVPNPYNLLSGLPPSHQWYTVLDLKDAFFCLRLHPTSQSLFAFEWRDPEMGISGQLTWTRLPQGFKNSPTLFNEALHRDLADFRIQHPDLILLQYVDDLLLAATSELDCQQGTRALLQTLGDLGYRASAKKAQICQKQVKYLGYLLKEGQRWLTEARKETVMGQPTPKTPRQLREFLGKAGFCRLFIPGFAEMAAPLYPLTKPGTLFEWGPDQQKAYQEIKQALLTAPALGLPDLTKPFELFVDEKQGYAKGVLTQKLGPWRRPVAYLSKKLDPVAAGWPPCLRMVAAIAVLTKDAGKLTMGQPLVILAPHAVEALVKQPPDRWLSNARMTHYQALLLDTDRVQFGPIVALNPATLLPLPEEGLQHDCLDILAEAHGTRPDLTDQPLPDADHTWYTDGSSFLQEGQRKAGAAVTTETEVVWAKALPAGTSAQRAELIALTQALKMAEGKKLNVYTDSRYAFATAHIHGEIYRRRGWLTSEGKEIKNKDEILALLKALFLPKRLSIIHCPGHQKGNRAEARGNRMADQAAREVATRETPETSTLLAGKRTADGSEFEKRTADGSEFESPKKKAKVE

SEQ ID NO: 2537 - protein, 2097 aa, synthetic construct
MPAAKRVKLDGGDKKYSIGLDIGTNSVGWAVITDEYKVPSKKFKVLGNTDRHSIKKNLIGALLFDSGETAEATRLKRTARRRYTRRKNRICYLQEIFSNEMAKVDDSFFHRLEESFLVEEDKKHERHPIFGNIVDEVAYHEKYPTIYHLRKKLVDSTDKADLRLIYLALAHMIKFRGHFLIEGDLNPDNSDVDKLFIQLVQTYNQLFEENPINASGVDAKAILSARLSKSRRLENLIAQLPGEKKNGLFGNLIALSLGLTPNFKSNFDLAEDAKLQLSKDTYDDDLDNLLAQIGDQYADLFLAAKNLSDAILLSDILRVNTEITKAPLSASMIKRYDEHHQDLTLLKALVRQQLPEKYKEIFFDQSKNGYAGYIDGGASQEEFYKFIKPILEKMDGTEELLVKLNREDLLRKQRTFDNGSIPHQIHLGELHAILRRQEDFYPFLKDNREKIEKILTFRIPYYVGPLARGNSRFAWMTRKSEETITPWNFEEVVDKGASAQSFIERMTNFDKNLPNEKVLPKHSLLYEYFTVYNELTKVKYVTEGMRKPAFLSGEQKKAIVDLLFKTNRKVTVKQLKEDYFKKIECFDSVEISGVEDRFNASLGTYHDLLKIIKDKDFLDNEENEDILEDIVLTLTLFEDREMIEERLKTYAHLFDDKVMKQLKRRRYTGWGRLSRKLINGIRDKQSGKTILDFLKSDGFANRNFMQLIHDDSLTFKEDIQKAQVSGQGDSLHEHIANLAGSPAIKKGILQTVKVVDELVKVMGRHKPENIVIEMARENQTTQKGQKNSRERMKRIEEGIKELGSQILKEHPVENTQLQNEKLYLYYLQNGRDMYVDQELDINRLSDYDVDHIVPQSFLKDDSIDNKVLTRSDKARGKSDNVPSEEVVKKMKNYWRQLLNAKLITQRKFDNLTKAERGGLSELDKAGFIKRQLVETRQITKHVAQILDSRMNTKYDENDKLIREVKVITLKSKLVSDFRKDFQFYKVREINNYHHAHDAYLNAVVGTALIKKYPKLESEFVYGDYKVYDVRKMIAKSEQEIGKATAKYFFYSNIMNFFKTEITLANGEIRKRPLIETNGETGEIVWDKGRDFATVRKVLSMPQVNIVKKTEVQTGGFSKESILPKRNSDKLIARKKDWDPKKYGGFDSPTVAYSVLVVAKVEKGKSKKLKSVKELLGITIMERSSFEKNPIDFLEAKGYKEVKKDLIIKLPKYSLFELENGRKRMLASAGELQKGNELALPSKYVNFLYLASHYEKLKGSPEDNEQKQLFVEQHKHYLDEIIEQISEFSKRVILADANLDKVLSAYNKHRDKPIREQAENIIHLFTLTNLGAPAAFKYFDTTIDRKRYTSTKEVLDATLIHQSITGLYETRIDLSQLGGDGGGSSGSSGSSGSSGGTLNIEDEYRLHETSKGPDVPLGSTWLSDFPQAWAETGGMGLAVRQAPLIIPLKATSTPVSIKQYPMSQEARLGIKPHIQRLLDQGILVPCQSPWNTPLLPVKKPGTNDYRPVQDLREVNKRVEDIHPTVPNPYNLLSGLPPSHQWYTVLDLKDAFFCLRLHPTSQSLFAFEWRDPEMGISGQLTWTRLPQGFKNSPTLFNEALHRDLADFRIQHPDLILLQYVDDLLLAATSELDCQQGTRALLQTLGDLGYRASAKKAQICQKQVKYLGYLLKEGQRWLTEARKETVMGQPTPKTPRQLREFLGKAGFCRLFIPGFAEMAAPLYPLTKPGTLFEWGPDQQKAYQEIKQALLTAPALGLPDLTKPFELFVDEKQGYAKGVLTQKLGPWRRPVAYLSKKLDPVAAGWPPCLRMVAAIAVLTKDAGKLTMGQPLVILAPHAVEALVKQPPDRWLSNARMTHYQALLLDTDRVQFGPIVALNPATLLPLPEEGLQHDCLDILAEAHGTRPDLTDQPLPDADHTWYTDGSSFLQEGQRKAGAAVTTETEVVWAKALPAGTSAQRAELIALTQALKMAEGKKLNVYTDSRYAFATAHIHGEIYRRRGWLTSEGKEIKNKDEILALLKALFLPKRLSIIHCPGHQKGNRAEARGNRMADQAAREVATRETPETSTLLAGKRTADGSEFEKRTADGSEFESPKKKAKVE

SEQ ID NO: 2538 - protein, 2096 aa, synthetic construct
MPAAKRVKLDGGDKKYSIGLDIGTNSVGWAVITDEYKVPSKKFKVLGNTDRHSIKKNLIGALLFDSGETAEATRLKRTARRRYTRRKNRICYLQEIFSNEMAKVDDSFFHRLEESFLVEEDKKHERHPIFGNIVDEVAYHEKYPTIYHLRKKLVDSTDKADLRLIYLALAHMIKFRGHFLIEGDLNPDNSDVDKLFIQLVQTYNQLFEENPINASGVDAKAILSARLSKSRRLENLIAQLPGEKKNGLFGNLIALSLGLTPNFKSNFDLAEDAKLQLSKDTYDDDLDNLLAQIGDQYADLFLAAKNLSDAILLSDILRVNTEITKAPLSASMIKRYDEHHQDLTLLKALVRQQLPEKYKEIFFDQSKNGYAGYIDGGASQEEFYKFIKPILEKMDGTEELLVKLNREDLLRKQRTFDNGSIPHQIHLGELHAILRRQEDFYPFLKDNREKIEKILTFRIPYYVGPLARGNSRFAWMTRKSEETITPWNFEEVVDKGASAQSFIERMTNFDKNLPNEKVLPKHSLLYEYFTVYNELTKVKYVTEGMRKPAFLSGEQKKAIVDLLFKTNRKVTVKQLKEDYFKKIECFDSVEISGVEDRFNASLGTYHDLLKIIKDKDFLDNEENEDILEDIVLTLTLFEDREMIEERLKTYAHLFDDKVMKQLKRRRYTGWGRLSRKLINGIRDKQSGKTILDFLKSDGFANRNFMQLIHDDSLTFKEDIQKAQVSGQGDSLHEHIANLAGSPAIKKGILQTVKVVDELVKVMGRHKPENIVIEMARENQTTQKGQKNSRERMKRIEEGIKELGSQILKEHPVENTQLQNEKLYLYYLQNGRDMYVDQELDINRLSDYDVDHIVPQSFLKDDSIDNKVLTRSDKARGKSDNVPSEEVVKKMKNYWRQLLNAKLITQRKFDNLTKAERGGLSELDKAGFIKRQLVETRQITKHVAQILDSRMNTKYDENDKLIREVKVITLKSKLVSDFRKDFQFYKVREINNYHHAHDAYLNAVVGTALIKKYPKLESEFVYGDYKVYDVRKMIAKSEQEIGKATAKYFFYSNIMNFFKTEITLANGEIRKRPLIETNGETGEIVWDKGRDFATVRKVLSMPQVNIVKKTEVQTGGFSKESILPKRNSDKLIARKKDWDPKKYGGFDSPTVAYSVLVVAKVEKGKSKKLKSVKELLGITIMERSSFEKNPIDFLEAKGYKEVKKDLIIKLPKYSLFELENGRKRMLASAGELQKGNELALPSKYVNFLYLASHYEKLKGSPEDNEQKQLFVEQHKHYLDEIIEQISEFSKRVILADANLDKVLSAYNKHRDKPIREQAENIIHLFTLTNLGAPAAFKYFDTTIDRKRYTSTKEVLDATLIHQSITGLYETRIDLSQLGGDGGGGSGSSEAAAKGGTLNIEDEYRLHETSKGPDVPLGSTWLSDFPQAWAETGGMGLAVRQAPLIIPLKATSTPVSIKQYPMSQEARLGIKPHIQRLLDQGILVPCQSPWNTPLLPVKKPGTNDYRPVQDLREVNKRVEDIHPTVPNPYNLLSGLPPSHQWYTVLDLKDAFFCLRLHPTSQSLFAFEWRDPEMGISGQLTWTRLPQGFKNSPTLFNEALHRDLADFRIQHPDLILLQYVDDLLLAATSELDCQQGTRALLQTLGDLGYRASAKKAQICQKQVKYLGYLLKEGQRWLTEARKETVMGQPTPKTPRQLREFLGKAGFCRLFIPGFAEMAAPLYPLTKPGTLFEWGPDQQKAYQEIKQALLTAPALGLPDLTKPFELFVDEKQGYAKGVLTQKLGPWRRPVAYLSKKLDPVAAGWPPCLRMVAAIAVLTKDAGKLTMGQPLVILAPHAVEALVKQPPDRWLSNARMTHYQALLLDTDRVQFGPIVALNPATLLPLPEEGLQHDCLDILAEAHGTRPDLTDQPLPDADHTWYTDGSSFLQEGQRKAGAAVTTETEVVWAKALPAGTSAQRAELIALTQALKMAEGKKLNVYTDSRYAFATAHIHGEIYRRRGWLTSEGKEIKNKDEILALLKALFLPKRLSIIHCPGHQKGNRAEARGNRMADQAAREVATRETPETSTLLAGKRTADGSEFEKRTADGSEFESPKKKAKVE

SEQ ID NO: 2539 - protein, 2090 aa, synthetic construct
MPAAKRVKLDGGDKKYSIGLDIGTNSVGWAVITDEYKVPSKKFKVLGNTDRHSIKKNLIGALLFDSGETAEATRLKRTARRRYTRRKNRICYLQEIFSNEMAKVDDSFFHRLEESFLVEEDKKHERHPIFGNIVDEVAYHEKYPTIYHLRKKLVDSTDKADLRLIYLALAHMIKFRGHFLIEGDLNPDNSDVDKLFIQLVQTYNQLFEENPINASGVDAKAILSARLSKSRRLENLIAQLPGEKKNGLFGNLIALSLGLTPNFKSNFDLAEDAKLQLSKDTYDDDLDNLLAQIGDQYADLFLAAKNLSDAILLSDILRVNTEITKAPLSASMIKRYDEHHQDLTLLKALVRQQLPEKYKEIFFDQSKNGYAGYIDGGASQEEFYKFIKPILEKMDGTEELLVKLNREDLLRKQRTFDNGSIPHQIHLGELHAILRRQEDFYPFLKDNREKIEKILTFRIPYYVGPLARGNSRFAWMTRKSEETITPWNFEEVVDKGASAQSFIERMTNFDKNLPNEKVLPKHSLLYEYFTVYNELTKVKYVTEGMRKPAFLSGEQKKAIVDLLFKTNRKVTVKQLKEDYFKKIECFDSVEISGVEDRFNASLGTYHDLLKIIKDKDFLDNEENEDILEDIVLTLTLFEDREMIEERLKTYAHLFDDKVMKQLKRRRYTGWGRLSRKLINGIRDKQSGKTILDFLKSDGFANRNFMQLIHDDSLTFKEDIQKAQVSGQGDSLHEHIANLAGSPAIKKGILQTVKVVDELVKVMGRHKPENIVIEMARENQTTQKGQKNSRERMKRIEEGIKELGSQILKEHPVENTQLQNEKLYLYYLQNGRDMYVDQELDINRLSDYDVDHIVPQSFLKDDSIDNKVLTRSDKARGKSDNVPSEEVVKKMKNYWRQLLNAKLITQRKFDNLTKAERGGLSELDKAGFIKRQLVETRQITKHVAQILDSRMNTKYDENDKLIREVKVITLKSKLVSDFRKDFQFYKVREINNYHHAHDAYLNAVVGTALIKKYPKLESEFVYGDYKVYDVRKMIAKSEQEIGKATAKYFFYSNIMNFFKTEITLANGEIRKRPLIETNGETGEIVWDKGRDFATVRKVLSMPQVNIVKKTEVQTGGFSKESILPKRNSDKLIARKKDWDPKKYGGFDSPTVAYSVLVVAKVEKGKSKKLKSVKELLGITIMERSSFEKNPIDFLEAKGYKEVKKDLIIKLPKYSLFELENGRKRMLASAGELQKGNELALPSKYVNFLYLASHYEKLKGSPEDNEQKQLFVEQHKHYLDEIIEQISEFSKRVILADANLDKVLSAYNKHRDKPIREQAENIIHLFTLTNLGAPAAFKYFDTTIDRKRYTSTKEVLDATLIHQSITGLYETRIDLSQLGGDGGEAAAKGGTLNIEDEYRLHETSKGPDVPLGSTWLSDFPQAWAETGGMGLAVRQAPLIIPLKATSTPVSIKQYPMSQEARLGIKPHIQRLLDQGILVPCQSPWNTPLLPVKKPGTNDYRPVQDLREVNKRVEDIHPTVPNPYNLLSGLPPSHQWYTVLDLKDAFFCLRLHPTSQSLFAFEWRDPEMGISGQLTWTRLPQGFKNSPTLFNEALHRDLADFRIQHPDLILLQYVDDLLLAATSELDCQQGTRALLQTLGDLGYRASAKKAQICQKQVKYLGYLLKEGQRWLTEARKETVMGQPTPKTPRQLREFLGKAGFCRLFIPGFAEMAAPLYPLTKPGTLFEWGPDQQKAYQEIKQALLTAPALGLPDLTKPFELFVDEKQGYAKGVLTQKLGPWRRPVAYLSKKLDPVAAGWPPCLRMVAAIAVLTKDAGKLTMGQPLVILAPHAVEALVKQPPDRWLSNARMTHYQALLLDTDRVQFGPIVALNPATLLPLPEEGLQHDCLDILAEAHGTRPDLTDQPLPDADHTWYTDGSSFLQEGQRKAGAAVTTETEVVWAKALPAGTSAQRAELIALTQALKMAEGKKLNVYTDSRYAFATAHIHGEIYRRRGWLTSEGKEIKNKDEILALLKALFLPKRLSIIHCPGHQKGNRAEARGNRMADQAAREVATRETPETSTLLAGKRTADGSEFEKRTADGSEFESPKKKAKVE

SEQ ID NO: 2540 - protein, 2091 aa, synthetic construct
MPAAKRVKLDGGDKKYSIGLDIGTNSVGWAVITDEYKVPSKKFKVLGNTDRHSIKKNLIGALLFDSGETAEATRLKRTARRRYTRRKNRICYLQEIFSNEMAKVDDSFFHRLEESFLVEEDKKHERHPIFGNIVDEVAYHEKYPTIYHLRKKLVDSTDKADLRLIYLALAHMIKFRGHFLIEGDLNPDNSDVDKLFIQLVQTYNQLFEENPINASGVDAKAILSARLSKSRRLENLIAQLPGEKKNGLFGNLIALSLGLTPNFKSNFDLAEDAKLQLSKDTYDDDLDNLLAQIGDQYADLFLAAKNLSDAILLSDILRVNTEITKAPLSASMIKRYDEHHQDLTLLKALVRQQLPEKYKEIFFDQSKNGYAGYIDGGASQEEFYKFIKPILEKMDGTEELLVKLNREDLLRKQRTFDNGSIPHQIHLGELHAILRRQEDFYPFLKDNREKIEKILTFRIPYYVGPLARGNSRFAWMTRKSEETITPWNFEEVVDKGASAQSFIERMTNFDKNLPNEKVLPKHSLLYEYFTVYNELTKVKYVTEGMRKPAFLSGEQKKAIVDLLFKTNRKVTVKQLKEDYFKKIECFDSVEISGVEDRFNASLGTYHDLLKIIKDKDFLDNEENEDILEDIVLTLTLFEDREMIEERLKTYAHLFDDKVMKQLKRRRYTGWGRLSRKLINGIRDKQSGKTILDFLKSDGFANRNFMQLIHDDSLTFKEDIQKAQVSGQGDSLHEHIANLAGSPAIKKGILQTVKVVDELVKVMGRHKPENIVIEMARENQTTQKGQKNSRERMKRIEEGIKELGSQILKEHPVENTQLQNEKLYLYYLQNGRDMYVDQELDINRLSDYDVDHIVPQSFLKDDSIDNKVLTRSDKARGKSDNVPSEEVVKKMKNYWRQLLNAKLITQRKFDNLTKAERGGLSELDKAGFIKRQLVETRQITKHVAQILDSRMNTKYDENDKLIREVKVITLKSKLVSDFRKDFQFYKVREINNYHHAHDAYLNAVVGTALIKKYPKLESEFVYGDYKVYDVRKMIAKSEQEIGKATAKYFFYSNIMNFFKTEITLANGEIRKRPLIETNGETGEIVWDKGRDFATVRKVLSMPQVNIVKKTEVQTGGFSKESILPKRNSDKLIARKKDWDPKKYGGFDSPTVAYSVLVVAKVEKGKSKKLKSVKELLGITIMERSSFEKNPIDFLEAKGYKEVKKDLIIKLPKYSLFELENGRKRMLASAGELQKGNELALPSKYVNFLYLASHYEKLKGSPEDNEQKQLFVEQHKHYLDEIIEQISEFSKRVILADANLDKVLSAYNKHRDKPIREQAENIIHLFTLTNLGAPAAFKYFDTTIDRKRYTSTKEVLDATLIHQSITGLYETRIDLSQLGGDGGPAPGGGGGTLNIEDEYRLHETSKGPDVPLGSTWLSDFPQAWAETGGMGLAVRQAPLIIPLKATSTPVSIKQYPMSQEARLGIKPHIQRLLDQGILVPCQSPWNTPLLPVKKPGTNDYRPVQDLREVNKRVEDIHPTVPNPYNLLSGLPPSHQWYTVLDLKDAFFCLRLHPTSQSLFAFEWRDPEMGISGQLTWTRLPQGFKNSPTLFNEALHRDLADFRIQHPDLILLQYVDDLLLAATSELDCQQGTRALLQTLGDLGYRASAKKAQICQKQVKYLGYLLKEGQRWLTEARKETVMGQPTPKTPRQLREFLGKAGFCRLFIPGFAEMAAPLYPLTKPGTLFEWGPDQQKAYQEIKQALLTAPALGLPDLTKPFELFVDEKQGYAKGVLTQKLGPWRRPVAYLSKKLDPVAAGWPPCLRMVAAIAVLTKDAGKLTMGQPLVILAPHAVEALVKQPPDRWLSNARMTHYQALLLDTDRVQFGPIVALNPATLLPLPEEGLQHDCLDILAEAHGTRPDLTDQPLPDADHTWYTDGSSFLQEGQRKAGAAVTTETEVVWAKALPAGTSAQRAELIALTQALKMAEGKKLNVYTDSRYAFATAHIHGEIYRRRGWLTSEGKEIKNKDEILALLKALFLPKRLSIIHCPGHQKGNRAEARGNRMADQAAREVATRETPETSTLLAGKRTADGSEFEKRTADGSEFESPKKKAKVE

SEQ ID NO: 2541 - protein, 2115 aa, synthetic construct
MPAAKRVKLDGGDKKYSIGLDIGTNSVGWAVITDEYKVPSKKFKVLGNTDRHSIKKNLIGALLFDSGETAEATRLKRTARRRYTRRKNRICYLQEIFSNEMAKVDDSFFHRLEESFLVEEDKKHERHPIFGNIVDEVAYHEKYPTIYHLRKKLVDSTDKADLRLIYLALAHMIKFRGHFLIEGDLNPDNSDVDKLFIQLVQTYNQLFEENPINASGVDAKAILSARLSKSRRLENLIAQLPGEKKNGLFGNLIALSLGLTPNFKSNFDLAEDAKLQLSKDTYDDDLDNLLAQIGDQYADLFLAAKNLSDAILLSDILRVNTEITKAPLSASMIKRYDEHHQDLTLLKALVRQQLPEKYKEIFFDQSKNGYAGYIDGGASQEEFYKFIKPILEKMDGTEELLVKLNREDLLRKQRTFDNGSIPHQIHLGELHAILRRQEDFYPFLKDNREKIEKILTFRIPYYVGPLARGNSRFAWMTRKSEETITPWNFEEVVDKGASAQSFIERMTNFDKNLPNEKVLPKHSLLYEYFTVYNELTKVKYVTEGMRKPAFLSGEQKKAIVDLLFKTNRKVTVKQLKEDYFKKIECFDSVEISGVEDRFNASLGTYHDLLKIIKDKDFLDNEENEDILEDIVLTLTLFEDREMIEERLKTYAHLFDDKVMKQLKRRRYTGWGRLSRKLINGIRDKQSGKTILDFLKSDGFANRNFMQLIHDDSLTFKEDIQKAQVSGQGDSLHEHIANLAGSPAIKKGILQTVKVVDELVKVMGRHKPENIVIEMARENQTTQKGQKNSRERMKRIEEGIKELGSQILKEHPVENTQLQNEKLYLYYLQNGRDMYVDQELDINRLSDYDVDHIVPQSFLKDDSIDNKVLTRSDKARGKSDNVPSEEVVKKMKNYWRQLLNAKLITQRKFDNLTKAERGGLSELDKAGFIKRQLVETRQITKHVAQILDSRMNTKYDENDKLIREVKVITLKSKLVSDFRKDFQFYKVREINNYHHAHDAYLNAVVGTALIKKYPKLESEFVYGDYKVYDVRKMIAKSEQEIGKATAKYFFYSNIMNFFKTEITLANGEIRKRPLIETNGETGEIVWDKGRDFATVRKVLSMPQVNIVKKTEVQTGGFSKESILPKRNSDKLIARKKDWDPKKYGGFDSPTVAYSVLVVAKVEKGKSKKLKSVKELLGITIMERSSFEKNPIDFLEAKGYKEVKKDLIIKLPKYSLFELENGRKRMLASAGELQKGNELALPSKYVNFLYLASHYEKLKGSPEDNEQKQLFVEQHKHYLDEIIEQISEFSKRVILADANLDKVLSAYNKHRDKPIREQAENIIHLFTLTNLGAPAAFKYFDTTIDRKRYTSTKEVLDATLIHQSITGLYETRIDLSQLGGDGGEAAAKEAAAKEAAAKEAAAKEAAAKEAAAKGGTLNIEDEYRLHETSKGPDVPLGSTWLSDFPQAWAETGGMGLAVRQAPLIIPLKATSTPVSIKQYPMSQEARLGIKPHIQRLLDQGILVPCQSPWNTPLLPVKKPGTNDYRPVQDLREVNKRVEDIHPTVPNPYNLLSGLPPSHQWYTVLDLKDAFFCLRLHPTSQSLFAFEWRDPEMGISGQLTWTRLPQGFKNSPTLFNEALHRDLADFRIQHPDLILLQYVDDLLLAATSELDCQQGTRALLQTLGDLGYRASAKKAQICQKQVKYLGYLLKEGQRWLTEARKETVMGQPTPKTPRQLREFLGKAGFCRLFIPGFAEMAAPLYPLTKPGTLFEWGPDQQKAYQEIKQALLTAPALGLPDLTKPFELFVDEKQGYAKGVLTQKLGPWRRPVAYLSKKLDPVAAGWPPCLRMVAAIAVLTKDAGKLTMGQPLVILAPHAVEALVKQPPDRWLSNARMTHYQALLLDTDRVQFGPIVALNPATLLPLPEEGLQHDCLDILAEAHGTRPDLTDQPLPDADHTWYTDGSSFLQEGQRKAGAAVTTETEVVWAKALPAGTSAQRAELIALTQALKMAEGKKLNVYTDSRYAFATAHIHGEIYRRRGWLTSEGKEIKNKDEILALLKALFLPKRLSIIHCPGHQKGNRAEARGNRMADQAAREVATRETPETSTLLAGKRTADGSEFEKRTADGSEFESPKKKAKVE

SEQ ID NO: 2542 - protein, 2096 aa, synthetic construct
MPAAKRVKLDGGDKKYSIGLDIGTNSVGWAVITDEYKVPSKKFKVLGNTDRHSIKKNLIGALLFDSGETAEATRLKRTARRRYTRRKNRICYLQEIFSNEMAKVDDSFFHRLEESFLVEEDKKHERHPIFGNIVDEVAYHEKYPTIYHLRKKLVDSTDKADLRLIYLALAHMIKFRGHFLIEGDLNPDNSDVDKLFIQLVQTYNQLFEENPINASGVDAKAILSARLSKSRRLENLIAQLPGEKKNGLFGNLIALSLGLTPNFKSNFDLAEDAKLQLSKDTYDDDLDNLLAQIGDQYADLFLAAKNLSDAILLSDILRVNTEITKAPLSASMIKRYDEHHQDLTLLKALVRQQLPEKYKEIFFDQSKNGYAGYIDGGASQEEFYKFIKPILEKMDGTEELLVKLNREDLLRKQRTFDNGSIPHQIHLGELHAILRRQEDFYPFLKDNREKIEKILTFRIPYYVGPLARGNSRFAWMTRKSEETITPWNFEEVVDKGASAQSFIERMTNFDKNLPNEKVLPKHSLLYEYFTVYNELTKVKYVTEGMRKPAFLSGEQKKAIVDLLFKTNRKVTVKQLKEDYFKKIECFDSVEISGVEDRFNASLGTYHDLLKIIKDKDFLDNEENEDILEDIVLTLTLFEDREMIEERLKTYAHLFDDKVMKQLKRRRYTGWGRLSRKLINGIRDKQSGKTILDFLKSDGFANRNFMQLIHDDSLTFKEDIQKAQVSGQGDSLHEHIANLAGSPAIKKGILQTVKVVDELVKVMGRHKPENIVIEMARENQTTQKGQKNSRERMKRIEEGIKELGSQILKEHPVENTQLQNEKLYLYYLQNGRDMYVDQELDINRLSDYDVDHIVPQSFLKDDSIDNKVLTRSDKARGKSDNVPSEEVVKKMKNYWRQLLNAKLITQRKFDNLTKAERGGLSELDKAGFIKRQLVETRQITKHVAQILDSRMNTKYDENDKLIREVKVITLKSKLVSDFRKDFQFYKVREINNYHHAHDAYLNAVVGTALIKKYPKLESEFVYGDYKVYDVRKMIAKSEQEIGKATAKYFFYSNIMNFFKTEITLANGEIRKRPLIETNGETGEIVWDKGRDFATVRKVLSMPQVNIVKKTEVQTGGFSKESILPKRNSDKLIARKKDWDPKKYGGFDSPTVAYSVLVVAKVEKGKSKKLKSVKELLGITIMERSSFEKNPIDFLEAKGYKEVKKDLIIKLPKYSLFELENGRKRMLASAGELQKGNELALPSKYVNFLYLASHYEKLKGSPEDNEQKQLFVEQHKHYLDEIIEQISEFSKRVILADANLDKVLSAYNKHRDKPIREQAENIIHLFTLTNLGAPAAFKYFDTTIDRKRYTSTKEVLDATLIHQSITGLYETRIDLSQLGGDGGPAPGSSEAAAKGGTLNIEDEYRLHETSKGPDVPLGSTWLSDFPQAWAETGGMGLAVRQAPLIIPLKATSTPVSIKQYPMSQEARLGIKPHIQRLLDQGILVPCQSPWNTPLLPVKKPGTNDYRPVQDLREVNKRVEDIHPTVPNPYNLLSGLPPSHQWYTVLDLKDAFFCLRLHPTSQSLFAFEWRDPEMGISGQLTWTRLPQGFKNSPTLFNEALHRDLADFRIQHPDLILLQYVDDLLLAATSELDCQQGTRALLQTLGDLGYRASAKKAQICQKQVKYLGYLLKEGQRWLTEARKETVMGQPTPKTPRQLREFLGKAGFCRLFIPGFAEMAAPLYPLTKPGTLFEWGPDQQKAYQEIKQALLTAPALGLPDLTKPFELFVDEKQGYAKGVLTQKLGPWRRPVAYLSKKLDPVAAGWPPCLRMVAAIAVLTKDAGKLTMGQPLVILAPHAVEALVKQPPDRWLSNARMTHYQALLLDTDRVQFGPIVALNPATLLPLPEEGLQHDCLDILAEAHGTRPDLTDQPLPDADHTWYTDGSSFLQEGQRKAGAAVTTETEVVWAKALPAGTSAQRAELIALTQALKMAEGKKLNVYTDSRYAFATAHIHGEIYRRRGWLTSEGKEIKNKDEILALLKALFLPKRLSIIHCPGHQKGNRAEARGNRMADQAAREVATRETPETSTLLAGKRTADGSEFEKRTADGSEFESPKKKAKVE

SEQ ID NO: 2543 - protein, 2094 aa, synthetic construct
MPAAKRVKLDGGDKKYSIGLDIGTNSVGWAVITDEYKVPSKKFKVLGNTDRHSIKKNLIGALLFDSGETAEATRLKRTARRRYTRRKNRICYLQEIFSNEMAKVDDSFFHRLEESFLVEEDKKHERHPIFGNIVDEVAYHEKYPTIYHLRKKLVDSTDKADLRLIYLALAHMIKFRGHFLIEGDLNPDNSDVDKLFIQLVQTYNQLFEENPINASGVDAKAILSARLSKSRRLENLIAQLPGEKKNGLFGNLIALSLGLTPNFKSNFDLAEDAKLQLSKDTYDDDLDNLLAQIGDQYADLFLAAKNLSDAILLSDILRVNTEITKAPLSASMIKRYDEHHQDLTLLKALVRQQLPEKYKEIFFDQSKNGYAGYIDGGASQEEFYKFIKPILEKMDGTEELLVKLNREDLLRKQRTFDNGSIPHQIHLGELHAILRRQEDFYPFLKDNREKIEKILTFRIPYYVGPLARGNSRFAWMTRKSEETITPWNFEEVVDKGASAQSFIERMTNFDKNLPNEKVLPKHSLLYEYFTVYNELTKVKYVTEGMRKPAFLSGEQKKAIVDLLFKTNRKVTVKQLKEDYFKKIECFDSVEISGVEDRFNASLGTYHDLLKIIKDKDFLDNEENEDILEDIVLTLTLFEDREMIEERLKTYAHLFDDKVMKQLKRRRYTGWGRLSRKLINGIRDKQSGKTILDFLKSDGFANRNFMQLIHDDSLTFKEDIQKAQVSGQGDSLHEHIANLAGSPAIKKGILQTVKVVDELVKVMGRHKPENIVIEMARENQTTQKGQKNSRERMKRIEEGIKELGSQILKEHPVENTQLQNEKLYLYYLQNGRDMYVDQELDINRLSDYDVDHIVPQSFLKDDSIDNKVLTRSDKARGKSDNVPSEEVVKKMKNYWRQLLNAKLITQRKFDNLTKAERGGLSELDKAGFIKRQLVETRQITKHVAQILDSRMNTKYDENDKLIREVKVITLKSKLVSDFRKDFQFYKVREINNYHHAHDAYLNAVVGTALIKKYPKLESEFVYGDYKVYDVRKMIAKSEQEIGKATAKYFFYSNIMNFFKTEITLANGEIRKRPLIETNGETGEIVWDKGRDFATVRKVLSMPQVNIVKKTEVQTGGFSKESILPKRNSDKLIARKKDWDPKKYGGFDSPTVAYSVLVVAKVEKGKSKKLKSVKELLGITIMERSSFEKNPIDFLEAKGYKEVKKDLIIKLPKYSLFELENGRKRMLASAGELQKGNELALPSKYVNFLYLASHYEKLKGSPEDNEQKQLFVEQHKHYLDEIIEQISEFSKRVILADANLDKVLSAYNKHRDKPIREQAENIIHLFTLTNLGAPAAFKYFDTTIDRKRYTSTKEVLDATLIHQSITGLYETRIDLSQLGGDGGGGGPAPGGSGGTLNIEDEYRLHETSKGPDVPLGSTWLSDFPQAWAETGGMGLAVRQAPLIIPLKATSTPVSIKQYPMSQEARLGIKPHIQRLLDQGILVPCQSPWNTPLLPVKKPGTNDYRPVQDLREVNKRVEDIHPTVPNPYNLLSGLPPSHQWYTVLDLKDAFFCLRLHPTSQSLFAFEWRDPEMGISGQLTWTRLPQGFKNSPTLFNEALHRDLADFRIQHPDLILLQYVDDLLLAATSELDCQQGTRALLQTLGDLGYRASAKKAQICQKQVKYLGYLLKEGQRWLTEARKETVMGQPTPKTPRQLREFLGKAGFCRLFIPGFAEMAAPLYPLTKPGTLFEWGPDQQKAYQEIKQALLTAPALGLPDLTKPFELFVDEKQGYAKGVLTQKLGPWRRPVAYLSKKLDPVAAGWPPCLRMVAAIAVLTKDAGKLTMGQPLVILAPHAVEALVKQPPDRWLSNARMTHYQALLLDTDRVQFGPIVALNPATLLPLPEEGLQHDCLDILAEAHGTRPDLTDQPLPDADHTWYTDGSSFLQEGQRKAGAAVTTETEVVWAKALPAGTSAQRAELIALTQALKMAEGKKLNVYTDSRYAFATAHIHGEIYRRRGWLTSEGKEIKNKDEILALLKALFLPKRLSIIHCPGHQKGNRAEARGNRMADQAAREVATRETPETSTLLAGKRTADGSEFEKRTADGSEFESPKKKAKVE

SEQ ID NO: 2544 - protein, 2097 aa, synthetic construct
MPAAKRVKLDGGDKKYSIGLDIGTNSVGWAVITDEYKVPSKKFKVLGNTDRHSIKKNLIGALLFDSGETAEATRLKRTARRRYTRRKNRICYLQEIFSNEMAKVDDSFFHRLEESFLVEEDKKHERHPIFGNIVDEVAYHEKYPTIYHLRKKLVDSTDKADLRLIYLALAHMIKFRGHFLIEGDLNPDNSDVDKLFIQLVQTYNQLFEENPINASGVDAKAILSARLSKSRRLENLIAQLPGEKKNGLFGNLIALSLGLTPNFKSNFDLAEDAKLQLSKDTYDDDLDNLLAQIGDQYADLFLAAKNLSDAILLSDILRVNTEITKAPLSASMIKRYDEHHQDLTLLKALVRQQLPEKYKEIFFDQSKNGYAGYIDGGASQEEFYKFIKPILEKMDGTEELLVKLNREDLLRKQRTFDNGSIPHQIHLGELHAILRRQEDFYPFLKDNREKIEKILTFRIPYYVGPLARGNSRFAWMTRKSEETITPWNFEEVVDKGASAQSFIERMTNFDKNLPNEKVLPKHSLLYEYFTVYNELTKVKYVTEGMRKPAFLSGEQKKAIVDLLFKTNRKVTVKQLKEDYFKKIECFDSVEISGVEDRFNASLGTYHDLLKIIKDKDFLDNEENEDILEDIVLTLTLFEDREMIEERLKTYAHLFDDKVMKQLKRRRYTGWGRLSRKLINGIRDKQSGKTILDFLKSDGFANRNFMQLIHDDSLTFKEDIQKAQVSGQGDSLHEHIANLAGSPAIKKGILQTVKVVDELVKVMGRHKPENIVIEMARENQTTQKGQKNSRERMKRIEEGIKELGSQILKEHPVENTQLQNEKLYLYYLQNGRDMYVDQELDINRLSDYDVDHIVPQSFLKDDSIDNKVLTRSDKARGKSDNVPSEEVVKKMKNYWRQLLNAKLITQRKFDNLTKAERGGLSELDKAGFIKRQLVETRQITKHVAQILDSRMNTKYDENDKLIREVKVITLKSKLVSDFRKDFQFYKVREINNYHHAHDAYLNAVVGTALIKKYPKLESEFVYGDYKVYDVRKMIAKSEQEIGKATAKYFFYSNIMNFFKTEITLANGEIRKRPLIETNGETGEIVWDKGRDFATVRKVLSMPQVNIVKKTEVQTGGFSKESILPKRNSDKLIARKKDWDPKKYGGFDSPTVAYSVLVVAKVEKGKSKKLKSVKELLGITIMERSSFEKNPIDFLEAKGYKEVKKDLIIKLPKYSLFELENGRKRMLASAGELQKGNELALPSKYVNFLYLASHYEKLKGSPEDNEQKQLFVEQHKHYLDEIIEQISEFSKRVILADANLDKVLSAYNKHRDKPIREQAENIIHLFTLTNLGAPAAFKYFDTTIDRKRYTSTKEVLDATLIHQSITGLYETRIDLSQLGGDGGGGSGGSGGSGGSGGTLNIEDEYRLHETSKGPDVPLGSTWLSDFPQAWAETGGMGLAVRQAPLIIPLKATSTPVSIKQYPMSQEARLGIKPHIQRLLDQGILVPCQSPWNTPLLPVKKPGTNDYRPVQDLREVNKRVEDIHPTVPNPYNLLSGLPPSHQWYTVLDLKDAFFCLRLHPTSQSLFAFEWRDPEMGISGQLTWTRLPQGFKNSPTLFNEALHRDLADFRIQHPDLILLQYVDDLLLAATSELDCQQGTRALLQTLGDLGYRASAKKAQICQKQVKYLGYLLKEGQRWLTEARKETVMGQPTPKTPRQLREFLGKAGFCRLFIPGFAEMAAPLYPLTKPGTLFEWGPDQQKAYQEIKQALLTAPALGLPDLTKPFELFVDEKQGYAKGVLTQKLGPWRRPVAYLSKKLDPVAAGWPPCLRMVAAIAVLTKDAGKLTMGQPLVILAPHAVEALVKQPPDRWLSNARMTHYQALLLDTDRVQFGPIVALNPATLLPLPEEGLQHDCLDILAEAHGTRPDLTDQPLPDADHTWYTDGSSFLQEGQRKAGAAVTTETEVVWAKALPAGTSAQRAELIALTQALKMAEGKKLNVYTDSRYAFATAHIHGEIYRRRGWLTSEGKEIKNKDEILALLKALFLPKRLSIIHCPGHQKGNRAEARGNRMADQAAREVATRETPETSTLLAGKRTADGSEFEKRTADGSEFESPKKKAKVE

SEQ ID NO: 2545 - protein, 2094 aa, synthetic construct
MPAAKRVKLDGGDKKYSIGLDIGTNSVGWAVITDEYKVPSKKFKVLGNTDRHSIKKNLIGALLFDSGETAEATRLKRTARRRYTRRKNRICYLQEIFSNEMAKVDDSFFHRLEESFLVEEDKKHERHPIFGNIVDEVAYHEKYPTIYHLRKKLVDSTDKADLRLIYLALAHMIKFRGHFLIEGDLNPDNSDVDKLFIQLVQTYNQLFEENPINASGVDAKAILSARLSKSRRLENLIAQLPGEKKNGLFGNLIALSLGLTPNFKSNFDLAEDAKLQLSKDTYDDDLDNLLAQIGDQYADLFLAAKNLSDAILLSDILRVNTEITKAPLSASMIKRYDEHHQDLTLLKALVRQQLPEKYKEIFFDQSKNGYAGYIDGGASQEEFYKFIKPILEKMDGTEELLVKLNREDLLRKQRTFDNGSIPHQIHLGELHAILRRQEDFYPFLKDNREKIEKILTFRIPYYVGPLARGNSRFAWMTRKSEETITPWNFEEVVDKGASAQSFIERMTNFDKNLPNEKVLPKHSLLYEYFTVYNELTKVKYVTEGMRKPAFLSGEQKKAIVDLLFKTNRKVTVKQLKEDYFKKIECFDSVEISGVEDRFNASLGTYHDLLKIIKDKDFLDNEENEDILEDIVLTLTLFEDREMIEERLKTYAHLFDDKVMKQLKRRRYTGWGRLSRKLINGIRDKQSGKTILDFLKSDGFANRNFMQLIHDDSLTFKEDIQKAQVSGQGDSLHEHIANLAGSPAIKKGILQTVKVVDELVKVMGRHKPENIVIEMARENQTTQKGQKNSRERMKRIEEGIKELGSQILKEHPVENTQLQNEKLYLYYLQNGRDMYVDQELDINRLSDYDVDHIVPQSFLKDDSIDNKVLTRSDKARGKSDNVPSEEVVKKMKNYWRQLLNAKLITQRKFDNLTKAERGGLSELDKAGFIKRQLVETRQITKHVAQILDSRMNTKYDENDKLIREVKVITLKSKLVSDFRKDFQFYKVREINNYHHAHDAYLNAVVGTALIKKYPKLESEFVYGDYKVYDVRKMIAKSEQEIGKATAKYFFYSNIMNFFKTEITLANGEIRKRPLIETNGETGEIVWDKGRDFATVRKVLSMPQVNIVKKTEVQTGGFSKESILPKRNSDKLIARKKDWDPKKYGGFDSPTVAYSVLVVAKVEKGKSKKLKSVKELLGITIMERSSFEKNPIDFLEAKGYKEVKKDLIIKLPKYSLFELENGRKRMLASAGELQKGNELALPSKYVNFLYLASHYEKLKGSPEDNEQKQLFVEQHKHYLDEIIEQISEFSKRVILADANLDKVLSAYNKHRDKPIREQAENIIHLFTLTNLGAPAAFKYFDTTIDRKRYTSTKEVLDATLIHQSITGLYETRIDLSQLGGDGGGGSGSSGGGGGTLNIEDEYRLHETSKGPDVPLGSTWLSDFPQAWAETGGMGLAVRQAPLIIPLKATSTPVSIKQYPMSQEARLGIKPHIQRLLDQGILVPCQSPWNTPLLPVKKPGTNDYRPVQDLREVNKRVEDIHPTVPNPYNLLSGLPPSHQWYTVLDLKDAFFCLRLHPTSQSLFAFEWRDPEMGISGQLTWTRLPQGFKNSPTLFNEALHRDLADFRIQHPDLILLQYVDDLLLAATSELDCQQGTRALLQTLGDLGYRASAKKAQICQKQVKYLGYLLKEGQRWLTEARKETVMGQPTPKTPRQLREFLGKAGFCRLFIPGFAEMAAPLYPLTKPGTLFEWGPDQQKAYQEIKQALLTAPALGLPDLTKPFELFVDEKQGYAKGVLTQKLGPWRRPVAYLSKKLDPVAAGWPPCLRMVAAIAVLTKDAGKLTMGQPLVILAPHAVEALVKQPPDRWLSNARMTHYQALLLDTDRVQFGPIVALNPATLLPLPEEGLQHDCLDILAEAHGTRPDLTDQPLPDADHTWYTDGSSFLQEGQRKAGAAVTTETEVVWAKALPAGTSAQRAELIALTQALKMAEGKKLNVYTDSRYAFATAHIHGEIYRRRGWLTSEGKEIKNKDEILALLKALFLPKRLSIIHCPGHQKGNRAEARGNRMADQAAREVATRETPETSTLLAGKRTADGSEFEKRTADGSEFESPKKKAKVE

SEQ ID NO: 2546 - protein, 2091 aa, synthetic construct
MPAAKRVKLDGGDKKYSIGLDIGTNSVGWAVITDEYKVPSKKFKVLGNTDRHSIKKNLIGALLFDSGETAEATRLKRTARRRYTRRKNRICYLQEIFSNEMAKVDDSFFHRLEESFLVEEDKKHERHPIFGNIVDEVAYHEKYPTIYHLRKKLVDSTDKADLRLIYLALAHMIKFRGHFLIEGDLNPDNSDVDKLFIQLVQTYNQLFEENPINASGVDAKAILSARLSKSRRLENLIAQLPGEKKNGLFGNLIALSLGLTPNFKSNFDLAEDAKLQLSKDTYDDDLDNLLAQIGDQYADLFLAAKNLSDAILLSDILRVNTEITKAPLSASMIKRYDEHHQDLTLLKALVRQQLPEKYKEIFFDQSKNGYAGYIDGGASQEEFYKFIKPILEKMDGTEELLVKLNREDLLRKQRTFDNGSIPHQIHLGELHAILRRQEDFYPFLKDNREKIEKILTFRIPYYVGPLARGNSRFAWMTRKSEETITPWNFEEVVDKGASAQSFIERMTNFDKNLPNEKVLPKHSLLYEYFTVYNELTKVKYVTEGMRKPAFLSGEQKKAIVDLLFKTNRKVTVKQLKEDYFKKIECFDSVEISGVEDRFNASLGTYHDLLKIIKDKDFLDNEENEDILEDIVLTLTLFEDREMIEERLKTYAHLFDDKVMKQLKRRRYTGWGRLSRKLINGIRDKQSGKTILDFLKSDGFANRNFMQLIHDDSLTFKEDIQKAQVSGQGDSLHEHIANLAGSPAIKKGILQTVKVVDELVKVMGRHKPENIVIEMARENQTTQKGQKNSRERMKRIEEGIKELGSQILKEHPVENTQLQNEKLYLYYLQNGRDMYVDQELDINRLSDYDVDHIVPQSFLKDDSIDNKVLTRSDKARGKSDNVPSEEVVKKMKNYWRQLLNAKLITQRKFDNLTKAERGGLSELDKAGFIKRQLVETRQITKHVAQILDSRMNTKYDENDKLIREVKVITLKSKLVSDFRKDFQFYKVREINNYHHAHDAYLNAVVGTALIKKYPKLESEFVYGDYKVYDVRKMIAKSEQEIGKATAKYFFYSNIMNFFKTEITLANGEIRKRPLIETNGETGEIVWDKGRDFATVRKVLSMPQVNIVKKTEVQTGGFSKESILPKRNSDKLIARKKDWDPKKYGGFDSPTVAYSVLVVAKVEKGKSKKLKSVKELLGITIMERSSFEKNPIDFLEAKGYKEVKKDLIIKLPKYSLFELENGRKRMLASAGELQKGNELALPSKYVNFLYLASHYEKLKGSPEDNEQKQLFVEQHKHYLDEIIEQISEFSKRVILADANLDKVLSAYNKHRDKPIREQAENIIHLFTLTNLGAPAAFKYFDTTIDRKRYTSTKEVLDATLIHQSITGLYETRIDLSQLGGDGGPAPGGSGGTLNIEDEYRLHETSKGPDVPLGSTWLSDFPQAWAETGGMGLAVRQAPLIIPLKATSTPVSIKQYPMSQEARLGIKPHIQRLLDQGILVPCQSPWNTPLLPVKKPGTNDYRPVQDLREVNKRVEDIHPTVPNPYNLLSGLPPSHQWYTVLDLKDAFFCLRLHPTSQSLFAFEWRDPEMGISGQLTWTRLPQGFKNSPTLFNEALHRDLADFRIQHPDLILLQYVDDLLLAATSELDCQQGTRALLQTLGDLGYRASAKKAQICQKQVKYLGYLLKEGQRWLTEARKETVMGQPTPKTPRQLREFLGKAGFCRLFIPGFAEMAAPLYPLTKPGTLFEWGPDQQKAYQEIKQALLTAPALGLPDLTKPFELFVDEKQGYAKGVLTQKLGPWRRPVAYLSKKLDPVAAGWPPCLRMVAAIAVLTKDAGKLTMGQPLVILAPHAVEALVKQPPDRWLSNARMTHYQALLLDTDRVQFGPIVALNPATLLPLPEEGLQHDCLDILAEAHGTRPDLTDQPLPDADHTWYTDGSSFLQEGQRKAGAAVTTETEVVWAKALPAGTSAQRAELIALTQALKMAEGKKLNVYTDSRYAFATAHIHGEIYRRRGWLTSEGKEIKNKDEILALLKALFLPKRLSIIHCPGHQKGNRAEARGNRMADQAAREVATRETPETSTLLAGKRTADGSEFEKRTADGSEFESPKKKAKVE

SEQ ID NO: 2547 - protein, 2091 aa, synthetic construct
MPAAKRVKLDGGDKKYSIGLDIGTNSVGWAVITDEYKVPSKKFKVLGNTDRHSIKKNLIGALLFDSGETAEATRLKRTARRRYTRRKNRICYLQEIFSNEMAKVDDSFFHRLEESFLVEEDKKHERHPIFGNIVDEVAYHEKYPTIYHLRKKLVDSTDKADLRLIYLALAHMIKFRGHFLIEGDLNPDNSDVDKLFIQLVQTYNQLFEENPINASGVDAKAILSARLSKSRRLENLIAQLPGEKKNGLFGNLIALSLGLTPNFKSNFDLAEDAKLQLSKDTYDDDLDNLLAQIGDQYADLFLAAKNLSDAILLSDILRVNTEITKAPLSASMIKRYDEHHQDLTLLKALVRQQLPEKYKEIFFDQSKNGYAGYIDGGASQEEFYKFIKPILEKMDGTEELLVKLNREDLLRKQRTFDNGSIPHQIHLGELHAILRRQEDFYPFLKDNREKIEKILTFRIPYYVGPLARGNSRFAWMTRKSEETITPWNFEEVVDKGASAQSFIERMTNFDKNLPNEKVLPKHSLLYEYFTVYNELTKVKYVTEGMRKPAFLSGEQKKAIVDLLFKTNRKVTVKQLKEDYFKKIECFDSVEISGVEDRFNASLGTYHDLLKIIKDKDFLDNEENEDILEDIVLTLTLFEDREMIEERLKTYAHLFDDKVMKQLKRRRYTGWGRLSRKLINGIRDKQSGKTILDFLKSDGFANRNFMQLIHDDSLTFKEDIQKAQVSGQGDSLHEHIANLAGSPAIKKGILQTVKVVDELVKVMGRHKPENIVIEMARENQTTQKGQKNSRERMKRIEEGIKELGSQILKEHPVENTQLQNEKLYLYYLQNGRDMYVDQELDINRLSDYDVDHIVPQSFLKDDSIDNKVLTRSDKARGKSDNVPSEEVVKKMKNYWRQLLNAKLITQRKFDNLTKAERGGLSELDKAGFIKRQLVETRQITKHVAQILDSRMNTKYDENDKLIREVKVITLKSKLVSDFRKDFQFYKVREINNYHHAHDAYLNAVVGTALIKKYPKLESEFVYGDYKVYDVRKMIAKSEQEIGKATAKYFFYSNIMNFFKTEITLANGEIRKRPLIETNGETGEIVWDKGRDFATVRKVLSMPQVNIVKKTEVQTGGFSKESILPKRNSDKLIARKKDWDPKKYGGFDSPTVAYSVLVVAKVEKGKSKKLKSVKELLGITIMERSSFEKNPIDFLEAKGYKEVKKDLIIKLPKYSLFELENGRKRMLASAGELQKGNELALPSKYVNFLYLASHYEKLKGSPEDNEQKQLFVEQHKHYLDEIIEQISEFSKRVILADANLDKVLSAYNKHRDKPIREQAENIIHLFTLTNLGAPAAFKYFDTTIDRKRYTSTKEVLDATLIHQSITGLYETRIDLSQLGGDGGGGGPAPGGTLNIEDEYRLHETSKGPDVPLGSTWLSDFPQAWAETGGMGLAVRQAPLIIPLKATSTPVSIKQYPMSQEARLGIKPHIQRLLDQGILVPCQSPWNTPLLPVKKPGTNDYRPVQDLREVNKRVEDIHPTVPNPYNLLSGLPPSHQWYTVLDLKDAFFCLRLHPTSQSLFAFEWRDPEMGISGQLTWTRLPQGFKNSPTLFNEALHRDLADFRIQHPDLILLQYVDDLLLAATSELDCQQGTRALLQTLGDLGYRASAKKAQICQKQVKYLGYLLKEGQRWLTEARKETVMGQPTPKTPRQLREFLGKAGFCRLFIPGFAEMAAPLYPLTKPGTLFEWGPDQQKAYQEIKQALLTAPALGLPDLTKPFELFVDEKQGYAKGVLTQKLGPWRRPVAYLSKKLDPVAAGWPPCLRMVAAIAVLTKDAGKLTMGQPLVILAPHAVEALVKQPPDRWLSNARMTHYQALLLDTDRVQFGPIVALNPATLLPLPEEGLQHDCLDILAEAHGTRPDLTDQPLPDADHTWYTDGSSFLQEGQRKAGAAVTTETEVVWAKALPAGTSAQRAELIALTQALKMAEGKKLNVYTDSRYAFATAHIHGEIYRRRGWLTSEGKEIKNKDEILALLKALFLPKRLSIIHCPGHQKGNRAEARGNRMADQAAREVATRETPETSTLLAGKRTADGSEFEKRTADGSEFESPKKKAKVE

SEQ ID NO: 2548 - protein, 2096 aa, synthetic construct
MPAAKRVKLDGGDKKYSIGLDIGTNSVGWAVITDEYKVPSKKFKVLGNTDRHSIKKNLIGALLFDSGETAEATRLKRTARRRYTRRKNRICYLQEIFSNEMAKVDDSFFHRLEESFLVEEDKKHERHPIFGNIVDEVAYHEKYPTIYHLRKKLVDSTDKADLRLIYLALAHMIKFRGHFLIEGDLNPDNSDVDKLFIQLVQTYNQLFEENPINASGVDAKAILSARLSKSRRLENLIAQLPGEKKNGLFGNLIALSLGLTPNFKSNFDLAEDAKLQLSKDTYDDDLDNLLAQIGDQYADLFLAAKNLSDAILLSDILRVNTEITKAPLSASMIKRYDEHHQDLTLLKALVRQQLPEKYKEIFFDQSKNGYAGYIDGGASQEEFYKFIKPILEKMDGTEELLVKLNREDLLRKQRTFDNGSIPHQIHLGELHAILRRQEDFYPFLKDNREKIEKILTFRIPYYVGPLARGNSRFAWMTRKSEETITPWNFEEVVDKGASAQSFIERMTNFDKNLPNEKVLPKHSLLYEYFTVYNELTKVKYVTEGMRKPAFLSGEQKKAIVDLLFKTNRKVTVKQLKEDYFKKIECFDSVEISGVEDRFNASLGTYHDLLKIIKDKDFLDNEENEDILEDIVLTLTLFEDREMIEERLKTYAHLFDDKVMKQLKRRRYTGWGRLSRKLINGIRDKQSGKTILDFLKSDGFANRNFMQLIHDDSLTFKEDIQKAQVSGQGDSLHEHIANLAGSPAIKKGILQTVKVVDELVKVMGRHKPENIVIEMARENQTTQKGQKNSRERMKRIEEGIKELGSQILKEHPVENTQLQNEKLYLYYLQNGRDMYVDQELDINRLSDYDVDHIVPQSFLKDDSIDNKVLTRSDKARGKSDNVPSEEVVKKMKNYWRQLLNAKLITQRKFDNLTKAERGGLSELDKAGFIKRQLVETRQITKHVAQILDSRMNTKYDENDKLIREVKVITLKSKLVSDFRKDFQFYKVREINNYHHAHDAYLNAVVGTALIKKYPKLESEFVYGDYKVYDVRKMIAKSEQEIGKATAKYFFYSNIMNFFKTEITLANGEIRKRPLIETNGETGEIVWDKGRDFATVRKVLSMPQVNIVKKTEVQTGGFSKESILPKRNSDKLIARKKDWDPKKYGGFDSPTVAYSVLVVAKVEKGKSKKLKSVKELLGITIMERSSFEKNPIDFLEAKGYKEVKKDLIIKLPKYSLFELENGRKRMLASAGELQKGNELALPSKYVNFLYLASHYEKLKGSPEDNEQKQLFVEQHKHYLDEIIEQISEFSKRVILADANLDKVLSAYNKHRDKPIREQAENIIHLFTLTNLGAPAAFKYFDTTIDRKRYTSTKEVLDATLIHQSITGLYETRIDLSQLGGDGGEAAAKGGSGSSGGTLNIEDEYRLHETSKGPDVPLGSTWLSDFPQAWAETGGMGLAVRQAPLIIPLKATSTPVSIKQYPMSQEARLGIKPHIQRLLDQGILVPCQSPWNTPLLPVKKPGTNDYRPVQDLREVNKRVEDIHPTVPNPYNLLSGLPPSHQWYTVLDLKDAFFCLRLHPTSQSLFAFEWRDPEMGISGQLTWTRLPQGFKNSPTLFNEALHRDLADFRIQHPDLILLQYVDDLLLAATSELDCQQGTRALLQTLGDLGYRASAKKAQICQKQVKYLGYLLKEGQRWLTEARKETVMGQPTPKTPRQLREFLGKAGFCRLFIPGFAEMAAPLYPLTKPGTLFEWGPDQQKAYQEIKQALLTAPALGLPDLTKPFELFVDEKQGYAKGVLTQKLGPWRRPVAYLSKKLDPVAAGWPPCLRMVAAIAVLTKDAGKLTMGQPLVILAPHAVEALVKQPPDRWLSNARMTHYQALLLDTDRVQFGPIVALNPATLLPLPEEGLQHDCLDILAEAHGTRPDLTDQPLPDADHTWYTDGSSFLQEGQRKAGAAVTTETEVVWAKALPAGTSAQRAELIALTQALKMAEGKKLNVYTDSRYAFATAHIHGEIYRRRGWLTSEGKEIKNKDEILALLKALFLPKRLSIIHCPGHQKGNRAEARGNRMADQAAREVATRETPETSTLLAGKRTADGSEFEKRTADGSEFESPKKKAKVE

SEQ ID NO: 2549 - protein, 2093 aa, synthetic construct
MPAAKRVKLDGGDKKYSIGLDIGTNSVGWAVITDEYKVPSKKFKVLGNTDRHSIKKNLIGALLFDSGETAEATRLKRTARRRYTRRKNRICYLQEIFSNEMAKVDDSFFHRLEESFLVEEDKKHERHPIFGNIVDEVAYHEKYPTIYHLRKKLVDSTDKADLRLIYLALAHMIKFRGHFLIEGDLNPDNSDVDKLFIQLVQTYNQLFEENPINASGVDAKAILSARLSKSRRLENLIAQLPGEKKNGLFGNLIALSLGLTPNFKSNFDLAEDAKLQLSKDTYDDDLDNLLAQIGDQYADLFLAAKNLSDAILLSDILRVNTEITKAPLSASMIKRYDEHHQDLTLLKALVRQQLPEKYKEIFFDQSKNGYAGYIDGGASQEEFYKFIKPILEKMDGTEELLVKLNREDLLRKQRTFDNGSIPHQIHLGELHAILRRQEDFYPFLKDNREKIEKILTFRIPYYVGPLARGNSRFAWMTRKSEETITPWNFEEVVDKGASAQSFIERMTNFDKNLPNEKVLPKHSLLYEYFTVYNELTKVKYVTEGMRKPAFLSGEQKKAIVDLLFKTNRKVTVKQLKEDYFKKIECFDSVEISGVEDRFNASLGTYHDLLKIIKDKDFLDNEENEDILEDIVLTLTLFEDREMIEERLKTYAHLFDDKVMKQLKRRRYTGWGRLSRKLINGIRDKQSGKTILDFLKSDGFANRNFMQLIHDDSLTFKEDIQKAQVSGQGDSLHEHIANLAGSPAIKKGILQTVKVVDELVKVMGRHKPENIVIEMARENQTTQKGQKNSRERMKRIEEGIKELGSQILKEHPVENTQLQNEKLYLYYLQNGRDMYVDQELDINRLSDYDVDHIVPQSFLKDDSIDNKVLTRSDKARGKSDNVPSEEVVKKMKNYWRQLLNAKLITQRKFDNLTKAERGGLSELDKAGFIKRQLVETRQITKHVAQILDSRMNTKYDENDKLIREVKVITLKSKLVSDFRKDFQFYKVREINNYHHAHDAYLNAVVGTALIKKYPKLESEFVYGDYKVYDVRKMIAKSEQEIGKATAKYFFYSNIMNFFKTEITLANGEIRKRPLIETNGETGEIVWDKGRDFATVRKVLSMPQVNIVKKTEVQTGGFSKESILPKRNSDKLIARKKDWDPKKYGGFDSPTVAYSVLVVAKVEKGKSKKLKSVKELLGITIMERSSFEKNPIDFLEAKGYKEVKKDLIIKLPKYSLFELENGRKRMLASAGELQKGNELALPSKYVNFLYLASHYEKLKGSPEDNEQKQLFVEQHKHYLDEIIEQISEFSKRVILADANLDKVLSAYNKHRDKPIREQAENIIHLFTLTNLGAPAAFKYFDTTIDRKRYTSTKEVLDATLIHQSITGLYETRIDLSQLGGDGGGGGGGGGGGGTLNIEDEYRLHETSKGPDVPLGSTWLSDFPQAWAETGGMGLAVRQAPLIIPLKATSTPVSIKQYPMSQEARLGIKPHIQRLLDQGILVPCQSPWNTPLLPVKKPGTNDYRPVQDLREVNKRVEDIHPTVPNPYNLLSGLPPSHQWYTVLDLKDAFFCLRLHPTSQSLFAFEWRDPEMGISGQLTWTRLPQGFKNSPTLFNEALHRDLADFRIQHPDLILLQYVDDLLLAATSELDCQQGTRALLQTLGDLGYRASAKKAQICQKQVKYLGYLLKEGQRWLTEARKETVMGQPTPKTPRQLREFLGKAGFCRLFIPGFAEMAAPLYPLTKPGTLFEWGPDQQKAYQEIKQALLTAPALGLPDLTKPFELFVDEKQGYAKGVLTQKLGPWRRPVAYLSKKLDPVAAGWPPCLRMVAAIAVLTKDAGKLTMGQPLVILAPHAVEALVKQPPDRWLSNARMTHYQALLLDTDRVQFGPIVALNPATLLPLPEEGLQHDCLDILAEAHGTRPDLTDQPLPDADHTWYTDGSSFLQEGQRKAGAAVTTETEVVWAKALPAGTSAQRAELIALTQALKMAEGKKLNVYTDSRYAFATAHIHGEIYRRRGWLTSEGKEIKNKDEILALLKALFLPKRLSIIHCPGHQKGNRAEARGNRMADQAAREVATRETPETSTLLAGKRTADGSEFEKRTADGSEFESPKKKAKVE

SEQ ID NO: 2550 - protein, 2096 aa, synthetic construct
MPAAKRVKLDGGDKKYSIGLDIGTNSVGWAVITDEYKVPSKKFKVLGNTDRHSIKKNLIGALLFDSGETAEATRLKRTARRRYTRRKNRICYLQEIFSNEMAKVDDSFFHRLEESFLVEEDKKHERHPIFGNIVDEVAYHEKYPTIYHLRKKLVDSTDKADLRLIYLALAHMIKFRGHFLIEGDLNPDNSDVDKLFIQLVQTYNQLFEENPINASGVDAKAILSARLSKSRRLENLIAQLPGEKKNGLFGNLIALSLGLTPNFKSNFDLAEDAKLQLSKDTYDDDLDNLLAQIGDQYADLFLAAKNLSDAILLSDILRVNTEITKAPLSASMIKRYDEHHQDLTLLKALVRQQLPEKYKEIFFDQSKNGYAGYIDGGASQEEFYKFIKPILEKMDGTEELLVKLNREDLLRKQRTFDNGSIPHQIHLGELHAILRRQEDFYPFLKDNREKIEKILTFRIPYYVGPLARGNSRFAWMTRKSEETITPWNFEEVVDKGASAQSFIERMTNFDKNLPNEKVLPKHSLLYEYFTVYNELTKVKYVTEGMRKPAFLSGEQKKAIVDLLFKTNRKVTVKQLKEDYFKKIECFDSVEISGVEDRFNASLGTYHDLLKIIKDKDFLDNEENEDILEDIVLTLTLFEDREMIEERLKTYAHLFDDKVMKQLKRRRYTGWGRLSRKLINGIRDKQSGKTILDFLKSDGFANRNFMQLIHDDSLTFKEDIQKAQVSGQGDSLHEHIANLAGSPAIKKGILQTVKVVDELVKVMGRHKPENIVIEMARENQTTQKGQKNSRERMKRIEEGIKELGSQILKEHPVENTQLQNEKLYLYYLQNGRDMYVDQELDINRLSDYDVDHIVPQSFLKDDSIDNKVLTRSDKARGKSDNVPSEEVVKKMKNYWRQLLNAKLITQRKFDNLTKAERGGLSELDKAGFIKRQLVETRQITKHVAQILDSRMNTKYDENDKLIREVKVITLKSKLVSDFRKDFQFYKVREINNYHHAHDAYLNAVVGTALIKKYPKLESEFVYGDYKVYDVRKMIAKSEQEIGKATAKYFFYSNIMNFFKTEITLANGEIRKRPLIETNGETGEIVWDKGRDFATVRKVLSMPQVNIVKKTEVQTGGFSKESILPKRNSDKLIARKKDWDPKKYGGFDSPTVAYSVLVVAKVEKGKSKKLKSVKELLGITIMERSSFEKNPIDFLEAKGYKEVKKDLIIKLPKYSLFELENGRKRMLASAGELQKGNELALPSKYVNFLYLASHYEKLKGSPEDNEQKQLFVEQHKHYLDEIIEQISEFSKRVILADANLDKVLSAYNKHRDKPIREQAENIIHLFTLTNLGAPAAFKYFDTTIDRKRYTSTKEVLDATLIHQSITGLYETRIDLSQLGGDGGGSSEAAAKGGGGGTLNIEDEYRLHETSKGPDVPLGSTWLSDFPQAWAETGGMGLAVRQAPLIIPLKATSTPVSIKQYPMSQEARLGIKPHIQRLLDQGILVPCQSPWNTPLLPVKKPGTNDYRPVQDLREVNKRVEDIHPTVPNPYNLLSGLPPSHQWYTVLDLKDAFFCLRLHPTSQSLFAFEWRDPEMGISGQLTWTRLPQGFKNSPTLFNEALHRDLADFRIQHPDLILLQYVDDLLLAATSELDCQQGTRALLQTLGDLGYRASAKKAQICQKQVKYLGYLLKEGQRWLTEARKETVMGQPTPKTPRQLREFLGKAGFCRLFIPGFAEMAAPLYPLTKPGTLFEWGPDQQKAYQEIKQALLTAPALGLPDLTKPFELFVDEKQGYAKGVLTQKLGPWRRPVAYLSKKLDPVAAGWPPCLRMVAAIAVLTKDAGKLTMGQPLVILAPHAVEALVKQPPDRWLSNARMTHYQALLLDTDRVQFGPIVALNPATLLPLPEEGLQHDCLDILAEAHGTRPDLTDQPLPDADHTWYTDGSSFLQEGQRKAGAAVTTETEVVWAKALPAGTSAQRAELIALTQALKMAEGKKLNVYTDSRYAFATAHIHGEIYRRRGWLTSEGKEIKNKDEILALLKALFLPKRLSIIHCPGHQKGNRAEARGNRMADQAAREVATRETPETSTLLAGKRTADGSEFEKRTADGSEFESPKKKAKVE

SEQ ID NO: 2551 - protein, 2096 aa, synthetic construct
MPAAKRVKLDGGDKKYSIGLDIGTNSVGWAVITDEYKVPSKKFKVLGNTDRHSIKKNLIGALLFDSGETAEATRLKRTARRRYTRRKNRICYLQEIFSNEMAKVDDSFFHRLEESFLVEEDKKHERHPIFGNIVDEVAYHEKYPTIYHLRKKLVDSTDKADLRLIYLALAHMIKFRGHFLIEGDLNPDNSDVDKLFIQLVQTYNQLFEENPINASGVDAKAILSARLSKSRRLENLIAQLPGEKKNGLFGNLIALSLGLTPNFKSNFDLAEDAKLQLSKDTYDDDLDNLLAQIGDQYADLFLAAKNLSDAILLSDILRVNTEITKAPLSASMIKRYDEHHQDLTLLKALVRQQLPEKYKEIFFDQSKNGYAGYIDGGASQEEFYKFIKPILEKMDGTEELLVKLNREDLLRKQRTFDNGSIPHQIHLGELHAILRRQEDFYPFLKDNREKIEKILTFRIPYYVGPLARGNSRFAWMTRKSEETITPWNFEEVVDKGASAQSFIERMTNFDKNLPNEKVLPKHSLLYEYFTVYNELTKVKYVTEGMRKPAFLSGEQKKAIVDLLFKTNRKVTVKQLKEDYFKKIECFDSVEISGVEDRFNASLGTYHDLLKIIKDKDFLDNEENEDILEDIVLTLTLFEDREMIEERLKTYAHLFDDKVMKQLKRRRYTGWGRLSRKLINGIRDKQSGKTILDFLKSDGFANRNFMQLIHDDSLTFKEDIQKAQVSGQGDSLHEHIANLAGSPAIKKGILQTVKVVDELVKVMGRHKPENIVIEMARENQTTQKGQKNSRERMKRIEEGIKELGSQILKEHPVENTQLQNEKLYLYYLQNGRDMYVDQELDINRLSDYDVDHIVPQSFLKDDSIDNKVLTRSDKARGKSDNVPSEEVVKKMKNYWRQLLNAKLITQRKFDNLTKAERGGLSELDKAGFIKRQLVETRQITKHVAQILDSRMNTKYDENDKLIREVKVITLKSKLVSDFRKDFQFYKVREINNYHHAHDAYLNAVVGTALIKKYPKLESEFVYGDYKVYDVRKMIAKSEQEIGKATAKYFFYSNIMNFFKTEITLANGEIRKRPLIETNGETGEIVWDKGRDFATVRKVLSMPQVNIVKKTEVQTGGFSKESILPKRNSDKLIARKKDWDPKKYGGFDSPTVAYSVLVVAKVEKGKSKKLKSVKELLGITIMERSSFEKNPIDFLEAKGYKEVKKDLIIKLPKYSLFELENGRKRMLASAGELQKGNELALPSKYVNFLYLASHYEKLKGSPEDNEQKQLFVEQHKHYLDEIIEQISEFSKRVILADANLDKVLSAYNKHRDKPIREQAENIIHLFTLTNLGAPAAFKYFDTTIDRKRYTSTKEVLDATLIHQSITGLYETRIDLSQLGGDGGEAAAKGGSGGGGGTLNIEDEYRLHETSKGPDVPLGSTWLSDFPQAWAETGGMGLAVRQAPLIIPLKATSTPVSIKQYPMSQEARLGIKPHIQRLLDQGILVPCQSPWNTPLLPVKKPGTNDYRPVQDLREVNKRVEDIHPTVPNPYNLLSGLPPSHQWYTVLDLKDAFFCLRLHPTSQSLFAFEWRDPEMGISGQLTWTRLPQGFKNSPTLFNEALHRDLADFRIQHPDLILLQYVDDLLLAATSELDCQQGTRALLQTLGDLGYRASAKKAQICQKQVKYLGYLLKEGQRWLTEARKETVMGQPTPKTPRQLREFLGKAGFCRLFIPGFAEMAAPLYPLTKPGTLFEWGPDQQKAYQEIKQALLTAPALGLPDLTKPFELFVDEKQGYAKGVLTQKLGPWRRPVAYLSKKLDPVAAGWPPCLRMVAAIAVLTKDAGKLTMGQPLVILAPHAVEALVKQPPDRWLSNARMTHYQALLLDTDRVQFGPIVALNPATLLPLPEEGLQHDCLDILAEAHGTRPDLTDQPLPDADHTWYTDGSSFLQEGQRKAGAAVTTETEVVWAKALPAGTSAQRAELIALTQALKMAEGKKLNVYTDSRYAFATAHIHGEIYRRRGWLTSEGKEIKNKDEILALLKALFLPKRLSIIHCPGHQKGNRAEARGNRMADQAAREVATRETPETSTLLAGKRTADGSEFEKRTADGSEFESPKKKAKVE

SEQ ID NO: 2552 - protein, 2094 aa, synthetic construct
MPAAKRVKLDGGDKKYSIGLDIGTNSVGWAVITDEYKVPSKKFKVLGNTDRHSIKKNLIGALLFDSGETAEATRLKRTARRRYTRRKNRICYLQEIFSNEMAKVDDSFFHRLEESFLVEEDKKHERHPIFGNIVDEVAYHEKYPTIYHLRKKLVDSTDKADLRLIYLALAHMIKFRGHFLIEGDLNPDNSDVDKLFIQLVQTYNQLFEENPINASGVDAKAILSARLSKSRRLENLIAQLPGEKKNGLFGNLIALSLGLTPNFKSNFDLAEDAKLQLSKDTYDDDLDNLLAQIGDQYADLFLAAKNLSDAILLSDILRVNTEITKAPLSASMIKRYDEHHQDLTLLKALVRQQLPEKYKEIFFDQSKNGYAGYIDGGASQEEFYKFIKPILEKMDGTEELLVKLNREDLLRKQRTFDNGSIPHQIHLGELHAILRRQEDFYPFLKDNREKIEKILTFRIPYYVGPLARGNSRFAWMTRKSEETITPWNFEEVVDKGASAQSFIERMTNFDKNLPNEKVLPKHSLLYEYFTVYNELTKVKYVTEGMRKPAFLSGEQKKAIVDLLFKTNRKVTVKQLKEDYFKKIECFDSVEISGVEDRFNASLGTYHDLLKIIKDKDFLDNEENEDILEDIVLTLTLFEDREMIEERLKTYAHLFDDKVMKQLKRRRYTGWGRLSRKLINGIRDKQSGKTILDFLKSDGFANRNFMQLIHDDSLTFKEDIQKAQVSGQGDSLHEHIANLAGSPAIKKGILQTVKVVDELVKVMGRHKPENIVIEMARENQTTQKGQKNSRERMKRIEEGIKELGSQILKEHPVENTQLQNEKLYLYYLQNGRDMYVDQELDINRLSDYDVDHIVPQSFLKDDSIDNKVLTRSDKARGKSDNVPSEEVVKKMKNYWRQLLNAKLITQRKFDNLTKAERGGLSELDKAGFIKRQLVETRQITKHVAQILDSRMNTKYDENDKLIREVKVITLKSKLVSDFRKDFQFYKVREINNYHHAHDAYLNAVVGTALIKKYPKLESEFVYGDYKVYDVRKMIAKSEQEIGKATAKYFFYSNIMNFFKTEITLANGEIRKRPLIETNGETGEIVWDKGRDFATVRKVLSMPQVNIVKKTEVQTGGFSKESILPKRNSDKLIARKKDWDPKKYGGFDSPTVAYSVLVVAKVEKGKSKKLKSVKELLGITIMERSSFEKNPIDFLEAKGYKEVKKDLIIKLPKYSLFELENGRKRMLASAGELQKGNELALPSKYVNFLYLASHYEKLKGSPEDNEQKQLFVEQHKHYLDEIIEQISEFSKRVILADANLDKVLSAYNKHRDKPIREQAENIIHLFTLTNLGAPAAFKYFDTTIDRKRYTSTKEVLDATLIHQSITGLYETRIDLSQLGGDGGGSSPAPGGSGGTLNIEDEYRLHETSKGPDVPLGSTWLSDFPQAWAETGGMGLAVRQAPLIIPLKATSTPVSIKQYPMSQEARLGIKPHIQRLLDQGILVPCQSPWNTPLLPVKKPGTNDYRPVQDLREVNKRVEDIHPTVPNPYNLLSGLPPSHQWYTVLDLKDAFFCLRLHPTSQSLFAFEWRDPEMGISGQLTWTRLPQGFKNSPTLFNEALHRDLADFRIQHPDLILLQYVDDLLLAATSELDCQQGTRALLQTLGDLGYRASAKKAQICQKQVKYLGYLLKEGQRWLTEARKETVMGQPTPKTPRQLREFLGKAGFCRLFIPGFAEMAAPLYPLTKPGTLFEWGPDQQKAYQEIKQALLTAPALGLPDLTKPFELFVDEKQGYAKGVLTQKLGPWRRPVAYLSKKLDPVAAGWPPCLRMVAAIAVLTKDAGKLTMGQPLVILAPHAVEALVKQPPDRWLSNARMTHYQALLLDTDRVQFGPIVALNPATLLPLPEEGLQHDCLDILAEAHGTRPDLTDQPLPDADHTWYTDGSSFLQEGQRKAGAAVTTETEVVWAKALPAGTSAQRAELIALTQALKMAEGKKLNVYTDSRYAFATAHIHGEIYRRRGWLTSEGKEIKNKDEILALLKALFLPKRLSIIHCPGHQKGNRAEARGNRMADQAAREVATRETPETSTLLAGKRTADGSEFEKRTADGSEFESPKKKAKVE

SEQ ID NO: 2553 - protein, 2096 aa, synthetic construct
MPAAKRVKLDGGDKKYSIGLDIGTNSVGWAVITDEYKVPSKKFKVLGNTDRHSIKKNLIGALLFDSGETAEATRLKRTARRRYTRRKNRICYLQEIFSNEMAKVDDSFFHRLEESFLVEEDKKHERHPIFGNIVDEVAYHEKYPTIYHLRKKLVDSTDKADLRLIYLALAHMIKFRGHFLIEGDLNPDNSDVDKLFIQLVQTYNQLFEENPINASGVDAKAILSARLSKSRRLENLIAQLPGEKKNGLFGNLIALSLGLTPNFKSNFDLAEDAKLQLSKDTYDDDLDNLLAQIGDQYADLFLAAKNLSDAILLSDILRVNTEITKAPLSASMIKRYDEHHQDLTLLKALVRQQLPEKYKEIFFDQSKNGYAGYIDGGASQEEFYKFIKPILEKMDGTEELLVKLNREDLLRKQRTFDNGSIPHQIHLGELHAILRRQEDFYPFLKDNREKIEKILTFRIPYYVGPLARGNSRFAWMTRKSEETITPWNFEEVVDKGASAQSFIERMTNFDKNLPNEKVLPKHSLLYEYFTVYNELTKVKYVTEGMRKPAFLSGEQKKAIVDLLFKTNRKVTVKQLKEDYFKKIECFDSVEISGVEDRFNASLGTYHDLLKIIKDKDFLDNEENEDILEDIVLTLTLFEDREMIEERLKTYAHLFDDKVMKQLKRRRYTGWGRLSRKLINGIRDKQSGKTILDFLKSDGFANRNFMQLIHDDSLTFKEDIQKAQVSGQGDSLHEHIANLAGSPAIKKGILQTVKVVDELVKVMGRHKPENIVIEMARENQTTQKGQKNSRERMKRIEEGIKELGSQILKEHPVENTQLQNEKLYLYYLQNGRDMYVDQELDINRLSDYDVDHIVPQSFLKDDSIDNKVLTRSDKARGKSDNVPSEEVVKKMKNYWRQLLNAKLITQRKFDNLTKAERGGLSELDKAGFIKRQLVETRQITKHVAQILDSRMNTKYDENDKLIREVKVITLKSKLVSDFRKDFQFYKVREINNYHHAHDAYLNAVVGTALIKKYPKLESEFVYGDYKVYDVRKMIAKSEQEIGKATAKYFFYSNIMNFFKTEITLANGEIRKRPLIETNGETGEIVWDKGRDFATVRKVLSMPQVNIVKKTEVQTGGFSKESILPKRNSDKLIARKKDWDPKKYGGFDSPTVAYSVLVVAKVEKGKSKKLKSVKELLGITIMERSSFEKNPIDFLEAKGYKEVKKDLIIKLPKYSLFELENGRKRMLASAGELQKGNELALPSKYVNFLYLASHYEKLKGSPEDNEQKQLFVEQHKHYLDEIIEQISEFSKRVILADANLDKVLSAYNKHRDKPIREQAENIIHLFTLTNLGAPAAFKYFDTTIDRKRYTSTKEVLDATLIHQSITGLYETRIDLSQLGGDGGGSSEAAAKGGSGGTLNIEDEYRLHETSKGPDVPLGSTWLSDFPQAWAETGGMGLAVRQAPLIIPLKATSTPVSIKQYPMSQEARLGIKPHIQRLLDQGILVPCQSPWNTPLLPVKKPGTNDYRPVQDLREVNKRVEDIHPTVPNPYNLLSGLPPSHQWYTVLDLKDAFFCLRLHPTSQSLFAFEWRDPEMGISGQLTWTRLPQGFKNSPTLFNEALHRDLADFRIQHPDLILLQYVDDLLLAATSELDCQQGTRALLQTLGDLGYRASAKKAQICQKQVKYLGYLLKEGQRWLTEARKETVMGQPTPKTPRQLREFLGKAGFCRLFIPGFAEMAAPLYPLTKPGTLFEWGPDQQKAYQEIKQALLTAPALGLPDLTKPFELFVDEKQGYAKGVLTQKLGPWRRPVAYLSKKLDPVAAGWPPCLRMVAAIAVLTKDAGKLTMGQPLVILAPHAVEALVKQPPDRWLSNARMTHYQALLLDTDRVQFGPIVALNPATLLPLPEEGLQHDCLDILAEAHGTRPDLTDQPLPDADHTWYTDGSSFLQEGQRKAGAAVTTETEVVWAKALPAGTSAQRAELIALTQALKMAEGKKLNVYTDSRYAFATAHIHGEIYRRRGWLTSEGKEIKNKDEILALLKALFLPKRLSIIHCPGHQKGNRAEARGNRMADQAAREVATRETPETSTLLAGKRTADGSEFEKRTADGSEFESPKKKAKVE

SEQ ID NO: 2554 - protein, 2094 aa, synthetic construct
MPAAKRVKLDGGDKKYSIGLDIGTNSVGWAVITDEYKVPSKKFKVLGNTDRHSIKKNLIGALLFDSGETAEATRLKRTARRRYTRRKNRICYLQEIFSNEMAKVDDSFFHRLEESFLVEEDKKHERHPIFGNIVDEVAYHEKYPTIYHLRKKLVDSTDKADLRLIYLALAHMIKFRGHFLIEGDLNPDNSDVDKLFIQLVQTYNQLFEENPINASGVDAKAILSARLSKSRRLENLIAQLPGEKKNGLFGNLIALSLGLTPNFKSNFDLAEDAKLQLSKDTYDDDLDNLLAQIGDQYADLFLAAKNLSDAILLSDILRVNTEITKAPLSASMIKRYDEHHQDLTLLKALVRQQLPEKYKEIFFDQSKNGYAGYIDGGASQEEFYKFIKPILEKMDGTEELLVKLNREDLLRKQRTFDNGSIPHQIHLGELHAILRRQEDFYPFLKDNREKIEKILTFRIPYYVGPLARGNSRFAWMTRKSEETITPWNFEEVVDKGASAQSFIERMTNFDKNLPNEKVLPKHSLLYEYFTVYNELTKVKYVTEGMRKPAFLSGEQKKAIVDLLFKTNRKVTVKQLKEDYFKKIECFDSVEISGVEDRFNASLGTYHDLLKIIKDKDFLDNEENEDILEDIVLTLTLFEDREMIEERLKTYAHLFDDKVMKQLKRRRYTGWGRLSRKLINGIRDKQSGKTILDFLKSDGFANRNFMQLIHDDSLTFKEDIQKAQVSGQGDSLHEHIANLAGSPAIKKGILQTVKVVDELVKVMGRHKPENIVIEMARENQTTQKGQKNSRERMKRIEEGIKELGSQILKEHPVENTQLQNEKLYLYYLQNGRDMYVDQELDINRLSDYDVDHIVPQSFLKDDSIDNKVLTRSDKARGKSDNVPSEEVVKKMKNYWRQLLNAKLITQRKFDNLTKAERGGLSELDKAGFIKRQLVETRQITKHVAQILDSRMNTKYDENDKLIREVKVITLKSKLVSDFRKDFQFYKVREINNYHHAHDAYLNAVVGTALIKKYPKLESEFVYGDYKVYDVRKMIAKSEQEIGKATAKYFFYSNIMNFFKTEITLANGEIRKRPLIETNGETGEIVWDKGRDFATVRKVLSMPQVNIVKKTEVQTGGFSKESILPKRNSDKLIARKKDWDPKKYGGFDSPTVAYSVLVVAKVEKGKSKKLKSVKELLGITIMERSSFEKNPIDFLEAKGYKEVKKDLIIKLPKYSLFELENGRKRMLASAGELQKGNELALPSKYVNFLYLASHYEKLKGSPEDNEQKQLFVEQHKHYLDEIIEQISEFSKRVILADANLDKVLSAYNKHRDKPIREQAENIIHLFTLTNLGAPAAFKYFDTTIDRKRYTSTKEVLDATLIHQSITGLYETRIDLSQLGGDGGGSSGGGPAPGGTLNIEDEYRLHETSKGPDVPLGSTWLSDFPQAWAETGGMGLAVRQAPLIIPLKATSTPVSIKQYPMSQEARLGIKPHIQRLLDQGILVPCQSPWNTPLLPVKKPGTNDYRPVQDLREVNKRVEDIHPTVPNPYNLLSGLPPSHQWYTVLDLKDAFFCLRLHPTSQSLFAFEWRDPEMGISGQLTWTRLPQGFKNSPTLFNEALHRDLADFRIQHPDLILLQYVDDLLLAATSELDCQQGTRALLQTLGDLGYRASAKKAQICQKQVKYLGYLLKEGQRWLTEARKETVMGQPTPKTPRQLREFLGKAGFCRLFIPGFAEMAAPLYPLTKPGTLFEWGPDQQKAYQEIKQALLTAPALGLPDLTKPFELFVDEKQGYAKGVLTQKLGPWRRPVAYLSKKLDPVAAGWPPCLRMVAAIAVLTKDAGKLTMGQPLVILAPHAVEALVKQPPDRWLSNARMTHYQALLLDTDRVQFGPIVALNPATLLPLPEEGLQHDCLDILAEAHGTRPDLTDQPLPDADHTWYTDGSSFLQEGQRKAGAAVTTETEVVWAKALPAGTSAQRAELIALTQALKMAEGKKLNVYTDSRYAFATAHIHGEIYRRRGWLTSEGKEIKNKDEILALLKALFLPKRLSIIHCPGHQKGNRAEARGNRMADQAAREVATRETPETSTLLAGKRTADGSEFEKRTADGSEFESPKKKAKVE

SEQ ID NO: 2555 - protein, 2100 aa, synthetic construct
MPAAKRVKLDGGDKKYSIGLDIGTNSVGWAVITDEYKVPSKKFKVLGNTDRHSIKKNLIGALLFDSGETAEATRLKRTARRRYTRRKNRICYLQEIFSNEMAKVDDSFFHRLEESFLVEEDKKHERHPIFGNIVDEVAYHEKYPTIYHLRKKLVDSTDKADLRLIYLALAHMIKFRGHFLIEGDLNPDNSDVDKLFIQLVQTYNQLFEENPINASGVDAKAILSARLSKSRRLENLIAQLPGEKKNGLFGNLIALSLGLTPNFKSNFDLAEDAKLQLSKDTYDDDLDNLLAQIGDQYADLFLAAKNLSDAILLSDILRVNTEITKAPLSASMIKRYDEHHQDLTLLKALVRQQLPEKYKEIFFDQSKNGYAGYIDGGASQEEFYKFIKPILEKMDGTEELLVKLNREDLLRKQRTFDNGSIPHQIHLGELHAILRRQEDFYPFLKDNREKIEKILTFRIPYYVGPLARGNSRFAWMTRKSEETITPWNFEEVVDKGASAQSFIERMTNFDKNLPNEKVLPKHSLLYEYFTVYNELTKVKYVTEGMRKPAFLSGEQKKAIVDLLFKTNRKVTVKQLKEDYFKKIECFDSVEISGVEDRFNASLGTYHDLLKIIKDKDFLDNEENEDILEDIVLTLTLFEDREMIEERLKTYAHLFDDKVMKQLKRRRYTGWGRLSRKLINGIRDKQSGKTILDFLKSDGFANRNFMQLIHDDSLTFKEDIQKAQVSGQGDSLHEHIANLAGSPAIKKGILQTVKVVDELVKVMGRHKPENIVIEMARENQTTQKGQKNSRERMKRIEEGIKELGSQILKEHPVENTQLQNEKLYLYYLQNGRDMYVDQELDINRLSDYDVDHIVPQSFLKDDSIDNKVLTRSDKARGKSDNVPSEEVVKKMKNYWRQLLNAKLITQRKFDNLTKAERGGLSELDKAGFIKRQLVETRQITKHVAQILDSRMNTKYDENDKLIREVKVITLKSKLVSDFRKDFQFYKVREINNYHHAHDAYLNAVVGTALIKKYPKLESEFVYGDYKVYDVRKMIAKSEQEIGKATAKYFFYSNIMNFFKTEITLANGEIRKRPLIETNGETGEIVWDKGRDFATVRKVLSMPQVNIVKKTEVQTGGFSKESILPKRNSDKLIARKKDWDPKKYGGFDSPTVAYSVLVVAKVEKGKSKKLKSVKELLGITIMERSSFEKNPIDFLEAKGYKEVKKDLIIKLPKYSLFELENGRKRMLASAGELQKGNELALPSKYVNFLYLASHYEKLKGSPEDNEQKQLFVEQHKHYLDEIIEQISEFSKRVILADANLDKVLSAYNKHRDKPIREQAENIIHLFTLTNLGAPAAFKYFDTTIDRKRYTSTKEVLDATLIHQSITGLYETRIDLSQLGGDGGGGSGGSGGSGGSGGSGGTLNIEDEYRLHETSKGPDVPLGSTWLSDFPQAWAETGGMGLAVRQAPLIIPLKATSTPVSIKQYPMSQEARLGIKPHIQRLLDQGILVPCQSPWNTPLLPVKKPGTNDYRPVQDLREVNKRVEDIHPTVPNPYNLLSGLPPSHQWYTVLDLKDAFFCLRLHPTSQSLFAFEWRDPEMGISGQLTWTRLPQGFKNSPTLFNEALHRDLADFRIQHPDLILLQYVDDLLLAATSELDCQQGTRALLQTLGDLGYRASAKKAQICQKQVKYLGYLLKEGQRWLTEARKETVMGQPTPKTPRQLREFLGKAGFCRLFIPGFAEMAAPLYPLTKPGTLFEWGPDQQKAYQEIKQALLTAPALGLPDLTKPFELFVDEKQGYAKGVLTQKLGPWRRPVAYLSKKLDPVAAGWPPCLRMVAAIAVLTKDAGKLTMGQPLVILAPHAVEALVKQPPDRWLSNARMTHYQALLLDTDRVQFGPIVALNPATLLPLPEEGLQHDCLDILAEAHGTRPDLTDQPLPDADHTWYTDGSSFLQEGQRKAGAAVTTETEVVWAKALPAGTSAQRAELIALTQALKMAEGKKLNVYTDSRYAFATAHIHGEIYRRRGWLTSEGKEIKNKDEILALLKALFLPKRLSIIHCPGHQKGNRAEARGNRMADQAAREVATRETPETSTLLAGKRTADGSEFEKRTADGSEFESPKKKAKVE

SEQ ID NO: 2556 - protein, 2096 aa, synthetic construct
MPAAKRVKLDGGDKKYSIGLDIGTNSVGWAVITDEYKVPSKKFKVLGNTDRHSIKKNLIGALLFDSGETAEATRLKRTARRRYTRRKNRICYLQEIFSNEMAKVDDSFFHRLEESFLVEEDKKHERHPIFGNIVDEVAYHEKYPTIYHLRKKLVDSTDKADLRLIYLALAHMIKFRGHFLIEGDLNPDNSDVDKLFIQLVQTYNQLFEENPINASGVDAKAILSARLSKSRRLENLIAQLPGEKKNGLFGNLIALSLGLTPNFKSNFDLAEDAKLQLSKDTYDDDLDNLLAQIGDQYADLFLAAKNLSDAILLSDILRVNTEITKAPLSASMIKRYDEHHQDLTLLKALVRQQLPEKYKEIFFDQSKNGYAGYIDGGASQEEFYKFIKPILEKMDGTEELLVKLNREDLLRKQRTFDNGSIPHQIHLGELHAILRRQEDFYPFLKDNREKIEKILTFRIPYYVGPLARGNSRFAWMTRKSEETITPWNFEEVVDKGASAQSFIERMTNFDKNLPNEKVLPKHSLLYEYFTVYNELTKVKYVTEGMRKPAFLSGEQKKAIVDLLFKTNRKVTVKQLKEDYFKKIECFDSVEISGVEDRFNASLGTYHDLLKIIKDKDFLDNEENEDILEDIVLTLTLFEDREMIEERLKTYAHLFDDKVMKQLKRRRYTGWGRLSRKLINGIRDKQSGKTILDFLKSDGFANRNFMQLIHDDSLTFKEDIQKAQVSGQGDSLHEHIANLAGSPAIKKGILQTVKVVDELVKVMGRHKPENIVIEMARENQTTQKGQKNSRERMKRIEEGIKELGSQILKEHPVENTQLQNEKLYLYYLQNGRDMYVDQELDINRLSDYDVDHIVPQSFLKDDSIDNKVLTRSDKARGKSDNVPSEEVVKKMKNYWRQLLNAKLITQRKFDNLTKAERGGLSELDKAGFIKRQLVETRQITKHVAQILDSRMNTKYDENDKLIREVKVITLKSKLVSDFRKDFQFYKVREINNYHHAHDAYLNAVVGTALIKKYPKLESEFVYGDYKVYDVRKMIAKSEQEIGKATAKYFFYSNIMNFFKTEITLANGEIRKRPLIETNGETGEIVWDKGRDFATVRKVLSMPQVNIVKKTEVQTGGFSKESILPKRNSDKLIARKKDWDPKKYGGFDSPTVAYSVLVVAKVEKGKSKKLKSVKELLGITIMERSSFEKNPIDFLEAKGYKEVKKDLIIKLPKYSLFELENGRKRMLASAGELQKGNELALPSKYVNFLYLASHYEKLKGSPEDNEQKQLFVEQHKHYLDEIIEQISEFSKRVILADANLDKVLSAYNKHRDKPIREQAENIIHLFTLTNLGAPAAFKYFDTTIDRKRYTSTKEVLDATLIHQSITGLYETRIDLSQLGGDGGEAAAKGGGPAPGGTLNIEDEYRLHETSKGPDVPLGSTWLSDFPQAWAETGGMGLAVRQAPLIIPLKATSTPVSIKQYPMSQEARLGIKPHIQRLLDQGILVPCQSPWNTPLLPVKKPGTNDYRPVQDLREVNKRVEDIHPTVPNPYNLLSGLPPSHQWYTVLDLKDAFFCLRLHPTSQSLFAFEWRDPEMGISGQLTWTRLPQGFKNSPTLFNEALHRDLADFRIQHPDLILLQYVDDLLLAATSELDCQQGTRALLQTLGDLGYRASAKKAQICQKQVKYLGYLLKEGQRWLTEARKETVMGQPTPKTPRQLREFLGKAGFCRLFIPGFAEMAAPLYPLTKPGTLFEWGPDQQKAYQEIKQALLTAPALGLPDLTKPFELFVDEKQGYAKGVLTQKLGPWRRPVAYLSKKLDPVAAGWPPCLRMVAAIAVLTKDAGKLTMGQPLVILAPHAVEALVKQPPDRWLSNARMTHYQALLLDTDRVQFGPIVALNPATLLPLPEEGLQHDCLDILAEAHGTRPDLTDQPLPDADHTWYTDGSSFLQEGQRKAGAAVTTETEVVWAKALPAGTSAQRAELIALTQALKMAEGKKLNVYTDSRYAFATAHIHGEIYRRRGWLTSEGKEIKNKDEILALLKALFLPKRLSIIHCPGHQKGNRAEARGNRMADQAAREVATRETPETSTLLAGKRTADGSEFEKRTADGSEFESPKKKAKVE

SEQ ID NO: 2557 - protein, 2094 aa, synthetic construct
MPAAKRVKLDGGDKKYSIGLDIGTNSVGWAVITDEYKVPSKKFKVLGNTDRHSIKKNLIGALLFDSGETAEATRLKRTARRRYTRRKNRICYLQEIFSNEMAKVDDSFFHRLEESFLVEEDKKHERHPIFGNIVDEVAYHEKYPTIYHLRKKLVDSTDKADLRLIYLALAHMIKFRGHFLIEGDLNPDNSDVDKLFIQLVQTYNQLFEENPINASGVDAKAILSARLSKSRRLENLIAQLPGEKKNGLFGNLIALSLGLTPNFKSNFDLAEDAKLQLSKDTYDDDLDNLLAQIGDQYADLFLAAKNLSDAILLSDILRVNTEITKAPLSASMIKRYDEHHQDLTLLKALVRQQLPEKYKEIFFDQSKNGYAGYIDGGASQEEFYKFIKPILEKMDGTEELLVKLNREDLLRKQRTFDNGSIPHQIHLGELHAILRRQEDFYPFLKDNREKIEKILTFRIPYYVGPLARGNSRFAWMTRKSEETITPWNFEEVVDKGASAQSFIERMTNFDKNLPNEKVLPKHSLLYEYFTVYNELTKVKYVTEGMRKPAFLSGEQKKAIVDLLFKTNRKVTVKQLKEDYFKKIECFDSVEISGVEDRFNASLGTYHDLLKIIKDKDFLDNEENEDILEDIVLTLTLFEDREMIEERLKTYAHLFDDKVMKQLKRRRYTGWGRLSRKLINGIRDKQSGKTILDFLKSDGFANRNFMQLIHDDSLTFKEDIQKAQVSGQGDSLHEHIANLAGSPAIKKGILQTVKVVDELVKVMGRHKPENIVIEMARENQTTQKGQKNSRERMKRIEEGIKELGSQILKEHPVENTQLQNEKLYLYYLQNGRDMYVDQELDINRLSDYDVDHIVPQSFLKDDSIDNKVLTRSDKARGKSDNVPSEEVVKKMKNYWRQLLNAKLITQRKFDNLTKAERGGLSELDKAGFIKRQLVETRQITKHVAQILDSRMNTKYDENDKLIREVKVITLKSKLVSDFRKDFQFYKVREINNYHHAHDAYLNAVVGTALIKKYPKLESEFVYGDYKVYDVRKMIAKSEQEIGKATAKYFFYSNIMNFFKTEITLANGEIRKRPLIETNGETGEIVWDKGRDFATVRKVLSMPQVNIVKKTEVQTGGFSKESILPKRNSDKLIARKKDWDPKKYGGFDSPTVAYSVLVVAKVEKGKSKKLKSVKELLGITIMERSSFEKNPIDFLEAKGYKEVKKDLIIKLPKYSLFELENGRKRMLASAGELQKGNELALPSKYVNFLYLASHYEKLKGSPEDNEQKQLFVEQHKHYLDEIIEQISEFSKRVILADANLDKVLSAYNKHRDKPIREQAENIIHLFTLTNLGAPAAFKYFDTTIDRKRYTSTKEVLDATLIHQSITGLYETRIDLSQLGGDGGGSSGSSGSSGGTLNIEDEYRLHETSKGPDVPLGSTWLSDFPQAWAETGGMGLAVRQAPLIIPLKATSTPVSIKQYPMSQEARLGIKPHIQRLLDQGILVPCQSPWNTPLLPVKKPGTNDYRPVQDLREVNKRVEDIHPTVPNPYNLLSGLPPSHQWYTVLDLKDAFFCLRLHPTSQSLFAFEWRDPEMGISGQLTWTRLPQGFKNSPTLFNEALHRDLADFRIQHPDLILLQYVDDLLLAATSELDCQQGTRALLQTLGDLGYRASAKKAQICQKQVKYLGYLLKEGQRWLTEARKETVMGQPTPKTPRQLREFLGKAGFCRLFIPGFAEMAAPLYPLTKPGTLFEWGPDQQKAYQEIKQALLTAPALGLPDLTKPFELFVDEKQGYAKGVLTQKLGPWRRPVAYLSKKLDPVAAGWPPCLRMVAAIAVLTKDAGKLTMGQPLVILAPHAVEALVKQPPDRWLSNARMTHYQALLLDTDRVQFGPIVALNPATLLPLPEEGLQHDCLDILAEAHGTRPDLTDQPLPDADHTWYTDGSSFLQEGQRKAGAAVTTETEVVWAKALPAGTSAQRAELIALTQALKMAEGKKLNVYTDSRYAFATAHIHGEIYRRRGWLTSEGKEIKNKDEILALLKALFLPKRLSIIHCPGHQKGNRAEARGNRMADQAAREVATRETPETSTLLAGKRTADGSEFEKRTADGSEFESPKKKAKVE

SEQ ID NO: 2558 - protein, 2094 aa, synthetic construct
MPAAKRVKLDGGDKKYSIGLDIGTNSVGWAVITDEYKVPSKKFKVLGNTDRHSIKKNLIGALLFDSGETAEATRLKRTARRRYTRRKNRICYLQEIFSNEMAKVDDSFFHRLEESFLVEEDKKHERHPIFGNIVDEVAYHEKYPTIYHLRKKLVDSTDKADLRLIYLALAHMIKFRGHFLIEGDLNPDNSDVDKLFIQLVQTYNQLFEENPINASGVDAKAILSARLSKSRRLENLIAQLPGEKKNGLFGNLIALSLGLTPNFKSNFDLAEDAKLQLSKDTYDDDLDNLLAQIGDQYADLFLAAKNLSDAILLSDILRVNTEITKAPLSASMIKRYDEHHQDLTLLKALVRQQLPEKYKEIFFDQSKNGYAGYIDGGASQEEFYKFIKPILEKMDGTEELLVKLNREDLLRKQRTFDNGSIPHQIHLGELHAILRRQEDFYPFLKDNREKIEKILTFRIPYYVGPLARGNSRFAWMTRKSEETITPWNFEEVVDKGASAQSFIERMTNFDKNLPNEKVLPKHSLLYEYFTVYNELTKVKYVTEGMRKPAFLSGEQKKAIVDLLFKTNRKVTVKQLKEDYFKKIECFDSVEISGVEDRFNASLGTYHDLLKIIKDKDFLDNEENEDILEDIVLTLTLFEDREMIEERLKTYAHLFDDKVMKQLKRRRYTGWGRLSRKLINGIRDKQSGKTILDFLKSDGFANRNFMQLIHDDSLTFKEDIQKAQVSGQGDSLHEHIANLAGSPAIKKGILQTVKVVDELVKVMGRHKPENIVIEMARENQTTQKGQKNSRERMKRIEEGIKELGSQILKEHPVENTQLQNEKLYLYYLQNGRDMYVDQELDINRLSDYDVDHIVPQSFLKDDSIDNKVLTRSDKARGKSDNVPSEEVVKKMKNYWRQLLNAKLITQRKFDNLTKAERGGLSELDKAGFIKRQLVETRQITKHVAQILDSRMNTKYDENDKLIREVKVITLKSKLVSDFRKDFQFYKVREINNYHHAHDAYLNAVVGTALIKKYPKLESEFVYGDYKVYDVRKMIAKSEQEIGKATAKYFFYSNIMNFFKTEITLANGEIRKRPLIETNGETGEIVWDKGRDFATVRKVLSMPQVNIVKKTEVQTGGFSKESILPKRNSDKLIARKKDWDPKKYGGFDSPTVAYSVLVVAKVEKGKSKKLKSVKELLGITIMERSSFEKNPIDFLEAKGYKEVKKDLIIKLPKYSLFELENGRKRMLASAGELQKGNELALPSKYVNFLYLASHYEKLKGSPEDNEQKQLFVEQHKHYLDEIIEQISEFSKRVILADANLDKVLSAYNKHRDKPIREQAENIIHLFTLTNLGAPAAFKYFDTTIDRKRYTSTKEVLDATLIHQSITGLYETRIDLSQLGGDGGGGSGSSPAPGGTLNIEDEYRLHETSKGPDVPLGSTWLSDFPQAWAETGGMGLAVRQAPLIIPLKATSTPVSIKQYPMSQEARLGIKPHIQRLLDQGILVPCQSPWNTPLLPVKKPGTNDYRPVQDLREVNKRVEDIHPTVPNPYNLLSGLPPSHQWYTVLDLKDAFFCLRLHPTSQSLFAFEWRDPEMGISGQLTWTRLPQGFKNSPTLFNEALHRDLADFRIQHPDLILLQYVDDLLLAATSELDCQQGTRALLQTLGDLGYRASAKKAQICQKQVKYLGYLLKEGQRWLTEARKETVMGQPTPKTPRQLREFLGKAGFCRLFIPGFAEMAAPLYPLTKPGTLFEWGPDQQKAYQEIKQALLTAPALGLPDLTKPFELFVDEKQGYAKGVLTQKLGPWRRPVAYLSKKLDPVAAGWPPCLRMVAAIAVLTKDAGKLTMGQPLVILAPHAVEALVKQPPDRWLSNARMTHYQALLLDTDRVQFGPIVALNPATLLPLPEEGLQHDCLDILAEAHGTRPDLTDQPLPDADHTWYTDGSSFLQEGQRKAGAAVTTETEVVWAKALPAGTSAQRAELIALTQALKMAEGKKLNVYTDSRYAFATAHIHGEIYRRRGWLTSEGKEIKNKDEILALLKALFLPKRLSIIHCPGHQKGNRAEARGNRMADQAAREVATRETPETSTLLAGKRTADGSEFEKRTADGSEFESPKKKAKVE

SEQ ID NO: 2559 - protein, 2091 aa, synthetic construct
MPAAKRVKLDGGDKKYSIGLDIGTNSVGWAVITDEYKVPSKKFKVLGNTDRHSIKKNLIGALLFDSGETAEATRLKRTARRRYTRRKNRICYLQEIFSNEMAKVDDSFFHRLEESFLVEEDKKHERHPIFGNIVDEVAYHEKYPTIYHLRKKLVDSTDKADLRLIYLALAHMIKFRGHFLIEGDLNPDNSDVDKLFIQLVQTYNQLFEENPINASGVDAKAILSARLSKSRRLENLIAQLPGEKKNGLFGNLIALSLGLTPNFKSNFDLAEDAKLQLSKDTYDDDLDNLLAQIGDQYADLFLAAKNLSDAILLSDILRVNTEITKAPLSASMIKRYDEHHQDLTLLKALVRQQLPEKYKEIFFDQSKNGYAGYIDGGASQEEFYKFIKPILEKMDGTEELLVKLNREDLLRKQRTFDNGSIPHQIHLGELHAILRRQEDFYPFLKDNREKIEKILTFRIPYYVGPLARGNSRFAWMTRKSEETITPWNFEEVVDKGASAQSFIERMTNFDKNLPNEKVLPKHSLLYEYFTVYNELTKVKYVTEGMRKPAFLSGEQKKAIVDLLFKTNRKVTVKQLKEDYFKKIECFDSVEISGVEDRFNASLGTYHDLLKIIKDKDFLDNEENEDILEDIVLTLTLFEDREMIEERLKTYAHLFDDKVMKQLKRRRYTGWGRLSRKLINGIRDKQSGKTILDFLKSDGFANRNFMQLIHDDSLTFKEDIQKAQVSGQGDSLHEHIANLAGSPAIKKGILQTVKVVDELVKVMGRHKPENIVIEMARENQTTQKGQKNSRERMKRIEEGIKELGSQILKEHPVENTQLQNEKLYLYYLQNGRDMYVDQELDINRLSDYDVDHIVPQSFLKDDSIDNKVLTRSDKARGKSDNVPSEEVVKKMKNYWRQLLNAKLITQRKFDNLTKAERGGLSELDKAGFIKRQLVETRQITKHVAQILDSRMNTKYDENDKLIREVKVITLKSKLVSDFRKDFQFYKVREINNYHHAHDAYLNAVVGTALIKKYPKLESEFVYGDYKVYDVRKMIAKSEQEIGKATAKYFFYSNIMNFFKTEITLANGEIRKRPLIETNGETGEIVWDKGRDFATVRKVLSMPQVNIVKKTEVQTGGFSKESILPKRNSDKLIARKKDWDPKKYGGFDSPTVAYSVLVVAKVEKGKSKKLKSVKELLGITIMERSSFEKNPIDFLEAKGYKEVKKDLIIKLPKYSLFELENGRKRMLASAGELQKGNELALPSKYVNFLYLASHYEKLKGSPEDNEQKQLFVEQHKHYLDEIIEQISEFSKRVILADANLDKVLSAYNKHRDKPIREQAENIIHLFTLTNLGAPAAFKYFDTTIDRKRYTSTKEVLDATLIHQSITGLYETRIDLSQLGGDGGGGSGGGGGTLNIEDEYRLHETSKGPDVPLGSTWLSDFPQAWAETGGMGLAVRQAPLIIPLKATSTPVSIKQYPMSQEARLGIKPHIQRLLDQGILVPCQSPWNTPLLPVKKPGTNDYRPVQDLREVNKRVEDIHPTVPNPYNLLSGLPPSHQWYTVLDLKDAFFCLRLHPTSQSLFAFEWRDPEMGISGQLTWTRLPQGFKNSPTLFNEALHRDLADFRIQHPDLILLQYVDDLLLAATSELDCQQGTRALLQTLGDLGYRASAKKAQICQKQVKYLGYLLKEGQRWLTEARKETVMGQPTPKTPRQLREFLGKAGFCRLFIPGFAEMAAPLYPLTKPGTLFEWGPDQQKAYQEIKQALLTAPALGLPDLTKPFELFVDEKQGYAKGVLTQKLGPWRRPVAYLSKKLDPVAAGWPPCLRMVAAIAVLTKDAGKLTMGQPLVILAPHAVEALVKQPPDRWLSNARMTHYQALLLDTDRVQFGPIVALNPATLLPLPEEGLQHDCLDILAEAHGTRPDLTDQPLPDADHTWYTDGSSFLQEGQRKAGAAVTTETEVVWAKALPAGTSAQRAELIALTQALKMAEGKKLNVYTDSRYAFATAHIHGEIYRRRGWLTSEGKEIKNKDEILALLKALFLPKRLSIIHCPGHQKGNRAEARGNRMADQAAREVATRETPETSTLLAGKRTADGSEFEKRTADGSEFESPKKKAKVE

SEQ ID NO: 2560 - protein, 2092 aa, synthetic construct
MPAAKRVKLDGGDKKYSIGLDIGTNSVGWAVITDEYKVPSKKFKVLGNTDRHSIKKNLIGALLFDSGETAEATRLKRTARRRYTRRKNRICYLQEIFSNEMAKVDDSFFHRLEESFLVEEDKKHERHPIFGNIVDEVAYHEKYPTIYHLRKKLVDSTDKADLRLIYLALAHMIKFRGHFLIEGDLNPDNSDVDKLFIQLVQTYNQLFEENPINASGVDAKAILSARLSKSRRLENLIAQLPGEKKNGLFGNLIALSLGLTPNFKSNFDLAEDAKLQLSKDTYDDDLDNLLAQIGDQYADLFLAAKNLSDAILLSDILRVNTEITKAPLSASMIKRYDEHHQDLTLLKALVRQQLPEKYKEIFFDQSKNGYAGYIDGGASQEEFYKFIKPILEKMDGTEELLVKLNREDLLRKQRTFDNGSIPHQIHLGELHAILRRQEDFYPFLKDNREKIEKILTFRIPYYVGPLARGNSRFAWMTRKSEETITPWNFEEVVDKGASAQSFIERMTNFDKNLPNEKVLPKHSLLYEYFTVYNELTKVKYVTEGMRKPAFLSGEQKKAIVDLLFKTNRKVTVKQLKEDYFKKIECFDSVEISGVEDRFNASLGTYHDLLKIIKDKDFLDNEENEDILEDIVLTLTLFEDREMIEERLKTYAHLFDDKVMKQLKRRRYTGWGRLSRKLINGIRDKQSGKTILDFLKSDGFANRNFMQLIHDDSLTFKEDIQKAQVSGQGDSLHEHIANLAGSPAIKKGILQTVKVVDELVKVMGRHKPENIVIEMARENQTTQKGQKNSRERMKRIEEGIKELGSQILKEHPVENTQLQNEKLYLYYLQNGRDMYVDQELDINRLSDYDVDHIVPQSFLKDDSIDNKVLTRSDKARGKSDNVPSEEVVKKMKNYWRQLLNAKLITQRKFDNLTKAERGGLSELDKAGFIKRQLVETRQITKHVAQILDSRMNTKYDENDKLIREVKVITLKSKLVSDFRKDFQFYKVREINNYHHAHDAYLNAVVGTALIKKYPKLESEFVYGDYKVYDVRKMIAKSEQEIGKATAKYFFYSNIMNFFKTEITLANGEIRKRPLIETNGETGEIVWDKGRDFATVRKVLSMPQVNIVKKTEVQTGGFSKESILPKRNSDKLIARKKDWDPKKYGGFDSPTVAYSVLVVAKVEKGKSKKLKSVKELLGITIMERSSFEKNPIDFLEAKGYKEVKKDLIIKLPKYSLFELENGRKRMLASAGELQKGNELALPSKYVNFLYLASHYEKLKGSPEDNEQKQLFVEQHKHYLDEIIEQISEFSKRVILADANLDKVLSAYNKHRDKPIREQAENIIHLFTLTNLGAPAAFKYFDTTIDRKRYTSTKEVLDATLIHQSITGLYETRIDLSQLGGDGGGGGGGGGGGTLNIEDEYRLHETSKGPDVPLGSTWLSDFPQAWAETGGMGLAVRQAPLIIPLKATSTPVSIKQYPMSQEARLGIKPHIQRLLDQGILVPCQSPWNTPLLPVKKPGTNDYRPVQDLREVNKRVEDIHPTVPNPYNLLSGLPPSHQWYTVLDLKDAFFCLRLHPTSQSLFAFEWRDPEMGISGQLTWTRLPQGFKNSPTLFNEALHRDLADFRIQHPDLILLQYVDDLLLAATSELDCQQGTRALLQTLGDLGYRASAKKAQICQKQVKYLGYLLKEGQRWLTEARKETVMGQPTPKTPRQLREFLGKAGFCRLFIPGFAEMAAPLYPLTKPGTLFEWGPDQQKAYQEIKQALLTAPALGLPDLTKPFELFVDEKQGYAKGVLTQKLGPWRRPVAYLSKKLDPVAAGWPPCLRMVAAIAVLTKDAGKLTMGQPLVILAPHAVEALVKQPPDRWLSNARMTHYQALLLDTDRVQFGPIVALNPATLLPLPEEGLQHDCLDILAEAHGTRPDLTDQPLPDADHTWYTDGSSFLQEGQRKAGAAVTTETEVVWAKALPAGTSAQRAELIALTQALKMAEGKKLNVYTDSRYAFATAHIHGEIYRRRGWLTSEGKEIKNKDEILALLKALFLPKRLSIIHCPGHQKGNRAEARGNRMADQAAREVATRETPETSTLLAGKRTADGSEFEKRTADGSEFESPKKKAKVE

SEQ ID NO: 2561 - protein, 2100 aa, synthetic construct
MPAAKRVKLDGGDKKYSIGLDIGTNSVGWAVITDEYKVPSKKFKVLGNTDRHSIKKNLIGALLFDSGETAEATRLKRTARRRYTRRKNRICYLQEIFSNEMAKVDDSFFHRLEESFLVEEDKKHERHPIFGNIVDEVAYHEKYPTIYHLRKKLVDSTDKADLRLIYLALAHMIKFRGHFLIEGDLNPDNSDVDKLFIQLVQTYNQLFEENPINASGVDAKAILSARLSKSRRLENLIAQLPGEKKNGLFGNLIALSLGLTPNFKSNFDLAEDAKLQLSKDTYDDDLDNLLAQIGDQYADLFLAAKNLSDAILLSDILRVNTEITKAPLSASMIKRYDEHHQDLTLLKALVRQQLPEKYKEIFFDQSKNGYAGYIDGGASQEEFYKFIKPILEKMDGTEELLVKLNREDLLRKQRTFDNGSIPHQIHLGELHAILRRQEDFYPFLKDNREKIEKILTFRIPYYVGPLARGNSRFAWMTRKSEETITPWNFEEVVDKGASAQSFIERMTNFDKNLPNEKVLPKHSLLYEYFTVYNELTKVKYVTEGMRKPAFLSGEQKKAIVDLLFKTNRKVTVKQLKEDYFKKIECFDSVEISGVEDRFNASLGTYHDLLKIIKDKDFLDNEENEDILEDIVLTLTLFEDREMIEERLKTYAHLFDDKVMKQLKRRRYTGWGRLSRKLINGIRDKQSGKTILDFLKSDGFANRNFMQLIHDDSLTFKEDIQKAQVSGQGDSLHEHIANLAGSPAIKKGILQTVKVVDELVKVMGRHKPENIVIEMARENQTTQKGQKNSRERMKRIEEGIKELGSQILKEHPVENTQLQNEKLYLYYLQNGRDMYVDQELDINRLSDYDVDHIVPQSFLKDDSIDNKVLTRSDKARGKSDNVPSEEVVKKMKNYWRQLLNAKLITQRKFDNLTKAERGGLSELDKAGFIKRQLVETRQITKHVAQILDSRMNTKYDENDKLIREVKVITLKSKLVSDFRKDFQFYKVREINNYHHAHDAYLNAVVGTALIKKYPKLESEFVYGDYKVYDVRKMIAKSEQEIGKATAKYFFYSNIMNFFKTEITLANGEIRKRPLIETNGETGEIVWDKGRDFATVRKVLSMPQVNIVKKTEVQTGGFSKESILPKRNSDKLIARKKDWDPKKYGGFDSPTVAYSVLVVAKVEKGKSKKLKSVKELLGITIMERSSFEKNPIDFLEAKGYKEVKKDLIIKLPKYSLFELENGRKRMLASAGELQKGNELALPSKYVNFLYLASHYEKLKGSPEDNEQKQLFVEQHKHYLDEIIEQISEFSKRVILADANLDKVLSAYNKHRDKPIREQAENIIHLFTLTNLGAPAAFKYFDTTIDRKRYTSTKEVLDATLIHQSITGLYETRIDLSQLGGDGGEAAAKGGGGSEAAAKGGTLNIEDEYRLHETSKGPDVPLGSTWLSDFPQAWAETGGMGLAVRQAPLIIPLKATSTPVSIKQYPMSQEARLGIKPHIQRLLDQGILVPCQSPWNTPLLPVKKPGTNDYRPVQDLREVNKRVEDIHPTVPNPYNLLSGLPPSHQWYTVLDLKDAFFCLRLHPTSQSLFAFEWRDPEMGISGQLTWTRLPQGFKNSPTLFNEALHRDLADFRIQHPDLILLQYVDDLLLAATSELDCQQGTRALLQTLGDLGYRASAKKAQICQKQVKYLGYLLKEGQRWLTEARKETVMGQPTPKTPRQLREFLGKAGFCRLFIPGFAEMAAPLYPLTKPGTLFEWGPDQQKAYQEIKQALLTAPALGLPDLTKPFELFVDEKQGYAKGVLTQKLGPWRRPVAYLSKKLDPVAAGWPPCLRMVAAIAVLTKDAGKLTMGQPLVILAPHAVEALVKQPPDRWLSNARMTHYQALLLDTDRVQFGPIVALNPATLLPLPEEGLQHDCLDILAEAHGTRPDLTDQPLPDADHTWYTDGSSFLQEGQRKAGAAVTTETEVVWAKALPAGTSAQRAELIALTQALKMAEGKKLNVYTDSRYAFATAHIHGEIYRRRGWLTSEGKEIKNKDEILALLKALFLPKRLSIIHCPGHQKGNRAEARGNRMADQAAREVATRETPETSTLLAGKRTADGSEFEKRTADGSEFESPKKKAKVE

SEQ ID NO: 2562 - protein, 2091 aa, synthetic construct
MPAAKRVKLDGGDKKYSIGLDIGTNSVGWAVITDEYKVPSKKFKVLGNTDRHSIKKNLIGALLFDSGETAEATRLKRTARRRYTRRKNRICYLQEIFSNEMAKVDDSFFHRLEESFLVEEDKKHERHPIFGNIVDEVAYHEKYPTIYHLRKKLVDSTDKADLRLIYLALAHMIKFRGHFLIEGDLNPDNSDVDKLFIQLVQTYNQLFEENPINASGVDAKAILSARLSKSRRLENLIAQLPGEKKNGLFGNLIALSLGLTPNFKSNFDLAEDAKLQLSKDTYDDDLDNLLAQIGDQYADLFLAAKNLSDAILLSDILRVNTEITKAPLSASMIKRYDEHHQDLTLLKALVRQQLPEKYKEIFFDQSKNGYAGYIDGGASQEEFYKFIKPILEKMDGTEELLVKLNREDLLRKQRTFDNGSIPHQIHLGELHAILRRQEDFYPFLKDNREKIEKILTFRIPYYVGPLARGNSRFAWMTRKSEETITPWNFEEVVDKGASAQSFIERMTNFDKNLPNEKVLPKHSLLYEYFTVYNELTKVKYVTEGMRKPAFLSGEQKKAIVDLLFKTNRKVTVKQLKEDYFKKIECFDSVEISGVEDRFNASLGTYHDLLKIIKDKDFLDNEENEDILEDIVLTLTLFEDREMIEERLKTYAHLFDDKVMKQLKRRRYTGWGRLSRKLINGIRDKQSGKTILDFLKSDGFANRNFMQLIHDDSLTFKEDIQKAQVSGQGDSLHEHIANLAGSPAIKKGILQTVKVVDELVKVMGRHKPENIVIEMARENQTTQKGQKNSRERMKRIEEGIKELGSQILKEHPVENTQLQNEKLYLYYLQNGRDMYVDQELDINRLSDYDVDHIVPQSFLKDDSIDNKVLTRSDKARGKSDNVPSEEVVKKMKNYWRQLLNAKLITQRKFDNLTKAERGGLSELDKAGFIKRQLVETRQITKHVAQILDSRMNTKYDENDKLIREVKVITLKSKLVSDFRKDFQFYKVREINNYHHAHDAYLNAVVGTALIKKYPKLESEFVYGDYKVYDVRKMIAKSEQEIGKATAKYFFYSNIMNFFKTEITLANGEIRKRPLIETNGETGEIVWDKGRDFATVRKVLSMPQVNIVKKTEVQTGGFSKESILPKRNSDKLIARKKDWDPKKYGGFDSPTVAYSVLVVAKVEKGKSKKLKSVKELLGITIMERSSFEKNPIDFLEAKGYKEVKKDLIIKLPKYSLFELENGRKRMLASAGELQKGNELALPSKYVNFLYLASHYEKLKGSPEDNEQKQLFVEQHKHYLDEIIEQISEFSKRVILADANLDKVLSAYNKHRDKPIREQAENIIHLFTLTNLGAPAAFKYFDTTIDRKRYTSTKEVLDATLIHQSITGLYETRIDLSQLGGDGGGGGGGGGGTLNIEDEYRLHETSKGPDVPLGSTWLSDFPQAWAETGGMGLAVRQAPLIIPLKATSTPVSIKQYPMSQEARLGIKPHIQRLLDQGILVPCQSPWNTPLLPVKKPGTNDYRPVQDLREVNKRVEDIHPTVPNPYNLLSGLPPSHQWYTVLDLKDAFFCLRLHPTSQSLFAFEWRDPEMGISGQLTWTRLPQGFKNSPTLFNEALHRDLADFRIQHPDLILLQYVDDLLLAATSELDCQQGTRALLQTLGDLGYRASAKKAQICQKQVKYLGYLLKEGQRWLTEARKETVMGQPTPKTPRQLREFLGKAGFCRLFIPGFAEMAAPLYPLTKPGTLFEWGPDQQKAYQEIKQALLTAPALGLPDLTKPFELFVDEKQGYAKGVLTQKLGPWRRPVAYLSKKLDPVAAGWPPCLRMVAAIAVLTKDAGKLTMGQPLVILAPHAVEALVKQPPDRWLSNARMTHYQALLLDTDRVQFGPIVALNPATLLPLPEEGLQHDCLDILAEAHGTRPDLTDQPLPDADHTWYTDGSSFLQEGQRKAGAAVTTETEVVWAKALPAGTSAQRAELIALTQALKMAEGKKLNVYTDSRYAFATAHIHGEIYRRRGWLTSEGKEIKNKDEILALLKALFLPKRLSIIHCPGHQKGNRAEARGNRMADQAAREVATRETPETSTLLAGKRTADGSEFEKRTADGSEFESPKKKAKVE

SEQ ID NO: 2563 - protein, 2094 aa, synthetic construct
MPAAKRVKLDGGDKKYSIGLDIGTNSVGWAVITDEYKVPSKKFKVLGNTDRHSIKKNLIGALLFDSGETAEATRLKRTARRRYTRRKNRICYLQEIFSNEMAKVDDSFFHRLEESFLVEEDKKHERHPIFGNIVDEVAYHEKYPTIYHLRKKLVDSTDKADLRLIYLALAHMIKFRGHFLIEGDLNPDNSDVDKLFIQLVQTYNQLFEENPINASGVDAKAILSARLSKSRRLENLIAQLPGEKKNGLFGNLIALSLGLTPNFKSNFDLAEDAKLQLSKDTYDDDLDNLLAQIGDQYADLFLAAKNLSDAILLSDILRVNTEITKAPLSASMIKRYDEHHQDLTLLKALVRQQLPEKYKEIFFDQSKNGYAGYIDGGASQEEFYKFIKPILEKMDGTEELLVKLNREDLLRKQRTFDNGSIPHQIHLGELHAILRRQEDFYPFLKDNREKIEKILTFRIPYYVGPLARGNSRFAWMTRKSEETITPWNFEEVVDKGASAQSFIERMTNFDKNLPNEKVLPKHSLLYEYFTVYNELTKVKYVTEGMRKPAFLSGEQKKAIVDLLFKTNRKVTVKQLKEDYFKKIECFDSVEISGVEDRFNASLGTYHDLLKIIKDKDFLDNEENEDILEDIVLTLTLFEDREMIEERLKTYAHLFDDKVMKQLKRRRYTGWGRLSRKLINGIRDKQSGKTILDFLKSDGFANRNFMQLIHDDSLTFKEDIQKAQVSGQGDSLHEHIANLAGSPAIKKGILQTVKVVDELVKVMGRHKPENIVIEMARENQTTQKGQKNSRERMKRIEEGIKELGSQILKEHPVENTQLQNEKLYLYYLQNGRDMYVDQELDINRLSDYDVDHIVPQSFLKDDSIDNKVLTRSDKARGKSDNVPSEEVVKKMKNYWRQLLNAKLITQRKFDNLTKAERGGLSELDKAGFIKRQLVETRQITKHVAQILDSRMNTKYDENDKLIREVKVITLKSKLVSDFRKDFQFYKVREINNYHHAHDAYLNAVVGTALIKKYPKLESEFVYGDYKVYDVRKMIAKSEQEIGKATAKYFFYSNIMNFFKTEITLANGEIRKRPLIETNGETGEIVWDKGRDFATVRKVLSMPQVNIVKKTEVQTGGFSKESILPKRNSDKLIARKKDWDPKKYGGFDSPTVAYSVLVVAKVEKGKSKKLKSVKELLGITIMERSSFEKNPIDFLEAKGYKEVKKDLIIKLPKYSLFELENGRKRMLASAGELQKGNELALPSKYVNFLYLASHYEKLKGSPEDNEQKQLFVEQHKHYLDEIIEQISEFSKRVILADANLDKVLSAYNKHRDKPIREQAENIIHLFTLTNLGAPAAFKYFDTTIDRKRYTSTKEVLDATLIHQSITGLYETRIDLSQLGGDGGGGSPAPGSSGGTLNIEDEYRLHETSKGPDVPLGSTWLSDFPQAWAETGGMGLAVRQAPLIIPLKATSTPVSIKQYPMSQEARLGIKPHIQRLLDQGILVPCQSPWNTPLLPVKKPGTNDYRPVQDLREVNKRVEDIHPTVPNPYNLLSGLPPSHQWYTVLDLKDAFFCLRLHPTSQSLFAFEWRDPEMGISGQLTWTRLPQGFKNSPTLFNEALHRDLADFRIQHPDLILLQYVDDLLLAATSELDCQQGTRALLQTLGDLGYRASAKKAQICQKQVKYLGYLLKEGQRWLTEARKETVMGQPTPKTPRQLREFLGKAGFCRLFIPGFAEMAAPLYPLTKPGTLFEWGPDQQKAYQEIKQALLTAPALGLPDLTKPFELFVDEKQGYAKGVLTQKLGPWRRPVAYLSKKLDPVAAGWPPCLRMVAAIAVLTKDAGKLTMGQPLVILAPHAVEALVKQPPDRWLSNARMTHYQALLLDTDRVQFGPIVALNPATLLPLPEEGLQHDCLDILAEAHGTRPDLTDQPLPDADHTWYTDGSSFLQEGQRKAGAAVTTETEVVWAKALPAGTSAQRAELIALTQALKMAEGKKLNVYTDSRYAFATAHIHGEIYRRRGWLTSEGKEIKNKDEILALLKALFLPKRLSIIHCPGHQKGNRAEARGNRMADQAAREVATRETPETSTLLAGKRTADGSEFEKRTADGSEFESPKKKAKVE

SEQ ID NO: 2564 - protein, 2096 aa, synthetic construct
MPAAKRVKLDGGDKKYSIGLDIGTNSVGWAVITDEYKVPSKKFKVLGNTDRHSIKKNLIGALLFDSGETAEATRLKRTARRRYTRRKNRICYLQEIFSNEMAKVDDSFFHRLEESFLVEEDKKHERHPIFGNIVDEVAYHEKYPTIYHLRKKLVDSTDKADLRLIYLALAHMIKFRGHFLIEGDLNPDNSDVDKLFIQLVQTYNQLFEENPINASGVDAKAILSARLSKSRRLENLIAQLPGEKKNGLFGNLIALSLGLTPNFKSNFDLAEDAKLQLSKDTYDDDLDNLLAQIGDQYADLFLAAKNLSDAILLSDILRVNTEITKAPLSASMIKRYDEHHQDLTLLKALVRQQLPEKYKEIFFDQSKNGYAGYIDGGASQEEFYKFIKPILEKMDGTEELLVKLNREDLLRKQRTFDNGSIPHQIHLGELHAILRRQEDFYPFLKDNREKIEKILTFRIPYYVGPLARGNSRFAWMTRKSEETITPWNFEEVVDKGASAQSFIERMTNFDKNLPNEKVLPKHSLLYEYFTVYNELTKVKYVTEGMRKPAFLSGEQKKAIVDLLFKTNRKVTVKQLKEDYFKKIECFDSVEISGVEDRFNASLGTYHDLLKIIKDKDFLDNEENEDILEDIVLTLTLFEDREMIEERLKTYAHLFDDKVMKQLKRRRYTGWGRLSRKLINGIRDKQSGKTILDFLKSDGFANRNFMQLIHDDSLTFKEDIQKAQVSGQGDSLHEHIANLAGSPAIKKGILQTVKVVDELVKVMGRHKPENIVIEMARENQTTQKGQKNSRERMKRIEEGIKELGSQILKEHPVENTQLQNEKLYLYYLQNGRDMYVDQELDINRLSDYDVDHIVPQSFLKDDSIDNKVLTRSDKARGKSDNVPSEEVVKKMKNYWRQLLNAKLITQRKFDNLTKAERGGLSELDKAGFIKRQLVETRQITKHVAQILDSRMNTKYDENDKLIREVKVITLKSKLVSDFRKDFQFYKVREINNYHHAHDAYLNAVVGTALIKKYPKLESEFVYGDYKVYDVRKMIAKSEQEIGKATAKYFFYSNIMNFFKTEITLANGEIRKRPLIETNGETGEIVWDKGRDFATVRKVLSMPQVNIVKKTEVQTGGFSKESILPKRNSDKLIARKKDWDPKKYGGFDSPTVAYSVLVVAKVEKGKSKKLKSVKELLGITIMERSSFEKNPIDFLEAKGYKEVKKDLIIKLPKYSLFELENGRKRMLASAGELQKGNELALPSKYVNFLYLASHYEKLKGSPEDNEQKQLFVEQHKHYLDEIIEQISEFSKRVILADANLDKVLSAYNKHRDKPIREQAENIIHLFTLTNLGAPAAFKYFDTTIDRKRYTSTKEVLDATLIHQSITGLYETRIDLSQLGGDGGPAPGGSEAAAKGGTLNIEDEYRLHETSKGPDVPLGSTWLSDFPQAWAETGGMGLAVRQAPLIIPLKATSTPVSIKQYPMSQEARLGIKPHIQRLLDQGILVPCQSPWNTPLLPVKKPGTNDYRPVQDLREVNKRVEDIHPTVPNPYNLLSGLPPSHQWYTVLDLKDAFFCLRLHPTSQSLFAFEWRDPEMGISGQLTWTRLPQGFKNSPTLFNEALHRDLADFRIQHPDLILLQYVDDLLLAATSELDCQQGTRALLQTLGDLGYRASAKKAQICQKQVKYLGYLLKEGQRWLTEARKETVMGQPTPKTPRQLREFLGKAGFCRLFIPGFAEMAAPLYPLTKPGTLFEWGPDQQKAYQEIKQALLTAPALGLPDLTKPFELFVDEKQGYAKGVLTQKLGPWRRPVAYLSKKLDPVAAGWPPCLRMVAAIAVLTKDAGKLTMGQPLVILAPHAVEALVKQPPDRWLSNARMTHYQALLLDTDRVQFGPIVALNPATLLPLPEEGLQHDCLDILAEAHGTRPDLTDQPLPDADHTWYTDGSSFLQEGQRKAGAAVTTETEVVWAKALPAGTSAQRAELIALTQALKMAEGKKLNVYTDSRYAFATAHIHGEIYRRRGWLTSEGKEIKNKDEILALLKALFLPKRLSIIHCPGHQKGNRAEARGNRMADQAAREVATRETPETSTLLAGKRTADGSEFEKRTADGSEFESPKKKAKVE

SEQ ID NO: 2565 - protein, 2094 aa, synthetic construct
MPAAKRVKLDGGDKKYSIGLDIGTNSVGWAVITDEYKVPSKKFKVLGNTDRHSIKKNLIGALLFDSGETAEATRLKRTARRRYTRRKNRICYLQEIFSNEMAKVDDSFFHRLEESFLVEEDKKHERHPIFGNIVDEVAYHEKYPTIYHLRKKLVDSTDKADLRLIYLALAHMIKFRGHFLIEGDLNPDNSDVDKLFIQLVQTYNQLFEENPINASGVDAKAILSARLSKSRRLENLIAQLPGEKKNGLFGNLIALSLGLTPNFKSNFDLAEDAKLQLSKDTYDDDLDNLLAQIGDQYADLFLAAKNLSDAILLSDILRVNTEITKAPLSASMIKRYDEHHQDLTLLKALVRQQLPEKYKEIFFDQSKNGYAGYIDGGASQEEFYKFIKPILEKMDGTEELLVKLNREDLLRKQRTFDNGSIPHQIHLGELHAILRRQEDFYPFLKDNREKIEKILTFRIPYYVGPLARGNSRFAWMTRKSEETITPWNFEEVVDKGASAQSFIERMTNFDKNLPNEKVLPKHSLLYEYFTVYNELTKVKYVTEGMRKPAFLSGEQKKAIVDLLFKTNRKVTVKQLKEDYFKKIECFDSVEISGVEDRFNASLGTYHDLLKIIKDKDFLDNEENEDILEDIVLTLTLFEDREMIEERLKTYAHLFDDKVMKQLKRRRYTGWGRLSRKLINGIRDKQSGKTILDFLKSDGFANRNFMQLIHDDSLTFKEDIQKAQVSGQGDSLHEHIANLAGSPAIKKGILQTVKVVDELVKVMGRHKPENIVIEMARENQTTQKGQKNSRERMKRIEEGIKELGSQILKEHPVENTQLQNEKLYLYYLQNGRDMYVDQELDINRLSDYDVDHIVPQSFLKDDSIDNKVLTRSDKARGKSDNVPSEEVVKKMKNYWRQLLNAKLITQRKFDNLTKAERGGLSELDKAGFIKRQLVETRQITKHVAQILDSRMNTKYDENDKLIREVKVITLKSKLVSDFRKDFQFYKVREINNYHHAHDAYLNAVVGTALIKKYPKLESEFVYGDYKVYDVRKMIAKSEQEIGKATAKYFFYSNIMNFFKTEITLANGEIRKRPLIETNGETGEIVWDKGRDFATVRKVLSMPQVNIVKKTEVQTGGFSKESILPKRNSDKLIARKKDWDPKKYGGFDSPTVAYSVLVVAKVEKGKSKKLKSVKELLGITIMERSSFEKNPIDFLEAKGYKEVKKDLIIKLPKYSLFELENGRKRMLASAGELQKGNELALPSKYVNFLYLASHYEKLKGSPEDNEQKQLFVEQHKHYLDEIIEQISEFSKRVILADANLDKVLSAYNKHRDKPIREQAENIIHLFTLTNLGAPAAFKYFDTTIDRKRYTSTKEVLDATLIHQSITGLYETRIDLSQLGGDGGGSSGGGGGSGGTLNIEDEYRLHETSKGPDVPLGSTWLSDFPQAWAETGGMGLAVRQAPLIIPLKATSTPVSIKQYPMSQEARLGIKPHIQRLLDQGILVPCQSPWNTPLLPVKKPGTNDYRPVQDLREVNKRVEDIHPTVPNPYNLLSGLPPSHQWYTVLDLKDAFFCLRLHPTSQSLFAFEWRDPEMGISGQLTWTRLPQGFKNSPTLFNEALHRDLADFRIQHPDLILLQYVDDLLLAATSELDCQQGTRALLQTLGDLGYRASAKKAQICQKQVKYLGYLLKEGQRWLTEARKETVMGQPTPKTPRQLREFLGKAGFCRLFIPGFAEMAAPLYPLTKPGTLFEWGPDQQKAYQEIKQALLTAPALGLPDLTKPFELFVDEKQGYAKGVLTQKLGPWRRPVAYLSKKLDPVAAGWPPCLRMVAAIAVLTKDAGKLTMGQPLVILAPHAVEALVKQPPDRWLSNARMTHYQALLLDTDRVQFGPIVALNPATLLPLPEEGLQHDCLDILAEAHGTRPDLTDQPLPDADHTWYTDGSSFLQEGQRKAGAAVTTETEVVWAKALPAGTSAQRAELIALTQALKMAEGKKLNVYTDSRYAFATAHIHGEIYRRRGWLTSEGKEIKNKDEILALLKALFLPKRLSIIHCPGHQKGNRAEARGNRMADQAAREVATRETPETSTLLAGKRTADGSEFEKRTADGSEFESPKKKAKVE

SEQ ID NO: 2566 - protein, 2115 aa, synthetic construct
MPAAKRVKLDGGDKKYSIGLDIGTNSVGWAVITDEYKVPSKKFKVLGNTDRHSIKKNLIGALLFDSGETAEATRLKRTARRRYTRRKNRICYLQEIFSNEMAKVDDSFFHRLEESFLVEEDKKHERHPIFGNIVDEVAYHEKYPTIYHLRKKLVDSTDKADLRLIYLALAHMIKFRGHFLIEGDLNPDNSDVDKLFIQLVQTYNQLFEENPINASGVDAKAILSARLSKSRRLENLIAQLPGEKKNGLFGNLIALSLGLTPNFKSNFDLAEDAKLQLSKDTYDDDLDNLLAQIGDQYADLFLAAKNLSDAILLSDILRVNTEITKAPLSASMIKRYDEHHQDLTLLKALVRQQLPEKYKEIFFDQSKNGYAGYIDGGASQEEFYKFIKPILEKMDGTEELLVKLNREDLLRKQRTFDNGSIPHQIHLGELHAILRRQEDFYPFLKDNREKIEKILTFRIPYYVGPLARGNSRFAWMTRKSEETITPWNFEEVVDKGASAQSFIERMTNFDKNLPNEKVLPKHSLLYEYFTVYNELTKVKYVTEGMRKPAFLSGEQKKAIVDLLFKTNRKVTVKQLKEDYFKKIECFDSVEISGVEDRFNASLGTYHDLLKIIKDKDFLDNEENEDILEDIVLTLTLFEDREMIEERLKTYAHLFDDKVMKQLKRRRYTGWGRLSRKLINGIRDKQSGKTILDFLKSDGFANRNFMQLIHDDSLTFKEDIQKAQVSGQGDSLHEHIANLAGSPAIKKGILQTVKVVDELVKVMGRHKPENIVIEMARENQTTQKGQKNSRERMKRIEEGIKELGSQILKEHPVENTQLQNEKLYLYYLQNGRDMYVDQELDINRLSDYDVDHIVPQSFLKDDSIDNKVLTRSDKARGKSDNVPSEEVVKKMKNYWRQLLNAKLITQRKFDNLTKAERGGLSELDKAGFIKRQLVETRQITKHVAQILDSRMNTKYDENDKLIREVKVITLKSKLVSDFRKDFQFYKVREINNYHHAHDAYLNAVVGTALIKKYPKLESEFVYGDYKVYDVRKMIAKSEQEIGKATAKYFFYSNIMNFFKTEITLANGEIRKRPLIETNGETGEIVWDKGRDFATVRKVLSMPQVNIVKKTEVQTGGFSKESILPKRNSDKLIARKKDWDPKKYGGFDSPTVAYSVLVVAKVEKGKSKKLKSVKELLGITIMERSSFEKNPIDFLEAKGYKEVKKDLIIKLPKYSLFELENGRKRMLASAGELQKGNELALPSKYVNFLYLASHYEKLKGSPEDNEQKQLFVEQHKHYLDEIIEQISEFSKRVILADANLDKVLSAYNKHRDKPIREQAENIIHLFTLTNLGAPAAFKYFDTTIDRKRYTSTKEVLDATLIHQSITGLYETRIDLSQLGGDGGGGGGSGGGGSGGGGSGGGGSGGGGSGGGGSGGTLNIEDEYRLHETSKGPDVPLGSTWLSDFPQAWAETGGMGLAVRQAPLIIPLKATSTPVSIKQYPMSQEARLGIKPHIQRLLDQGILVPCQSPWNTPLLPVKKPGTNDYRPVQDLREVNKRVEDIHPTVPNPYNLLSGLPPSHQWYTVLDLKDAFFCLRLHPTSQSLFAFEWRDPEMGISGQLTWTRLPQGFKNSPTLFNEALHRDLADFRIQHPDLILLQYVDDLLLAATSELDCQQGTRALLQTLGDLGYRASAKKAQICQKQVKYLGYLLKEGQRWLTEARKETVMGQPTPKTPRQLREFLGKAGFCRLFIPGFAEMAAPLYPLTKPGTLFEWGPDQQKAYQEIKQALLTAPALGLPDLTKPFELFVDEKQGYAKGVLTQKLGPWRRPVAYLSKKLDPVAAGWPPCLRMVAAIAVLTKDAGKLTMGQPLVILAPHAVEALVKQPPDRWLSNARMTHYQALLLDTDRVQFGPIVALNPATLLPLPEEGLQHDCLDILAEAHGTRPDLTDQPLPDADHTWYTDGSSFLQEGQRKAGAAVTTETEVVWAKALPAGTSAQRAELIALTQALKMAEGKKLNVYTDSRYAFATAHIHGEIYRRRGWLTSEGKEIKNKDEILALLKALFLPKRLSIIHCPGHQKGNRAEARGNRMADQAAREVATRETPETSTLLAGKRTADGSEFEKRTADGSEFESPKKKAKVE

SEQ ID NO: 2567 - protein, 2094 aa, synthetic construct
MPAAKRVKLDGGDKKYSIGLDIGTNSVGWAVITDEYKVPSKKFKVLGNTDRHSIKKNLIGALLFDSGETAEATRLKRTARRRYTRRKNRICYLQEIFSNEMAKVDDSFFHRLEESFLVEEDKKHERHPIFGNIVDEVAYHEKYPTIYHLRKKLVDSTDKADLRLIYLALAHMIKFRGHFLIEGDLNPDNSDVDKLFIQLVQTYNQLFEENPINASGVDAKAILSARLSKSRRLENLIAQLPGEKKNGLFGNLIALSLGLTPNFKSNFDLAEDAKLQLSKDTYDDDLDNLLAQIGDQYADLFLAAKNLSDAILLSDILRVNTEITKAPLSASMIKRYDEHHQDLTLLKALVRQQLPEKYKEIFFDQSKNGYAGYIDGGASQEEFYKFIKPILEKMDGTEELLVKLNREDLLRKQRTFDNGSIPHQIHLGELHAILRRQEDFYPFLKDNREKIEKILTFRIPYYVGPLARGNSRFAWMTRKSEETITPWNFEEVVDKGASAQSFIERMTNFDKNLPNEKVLPKHSLLYEYFTVYNELTKVKYVTEGMRKPAFLSGEQKKAIVDLLFKTNRKVTVKQLKEDYFKKIECFDSVEISGVEDRFNASLGTYHDLLKIIKDKDFLDNEENEDILEDIVLTLTLFEDREMIEERLKTYAHLFDDKVMKQLKRRRYTGWGRLSRKLINGIRDKQSGKTILDFLKSDGFANRNFMQLIHDDSLTFKEDIQKAQVSGQGDSLHEHIANLAGSPAIKKGILQTVKVVDELVKVMGRHKPENIVIEMARENQTTQKGQKNSRERMKRIEEGIKELGSQILKEHPVENTQLQNEKLYLYYLQNGRDMYVDQELDINRLSDYDVDHIVPQSFLKDDSIDNKVLTRSDKARGKSDNVPSEEVVKKMKNYWRQLLNAKLITQRKFDNLTKAERGGLSELDKAGFIKRQLVETRQITKHVAQILDSRMNTKYDENDKLIREVKVITLKSKLVSDFRKDFQFYKVREINNYHHAHDAYLNAVVGTALIKKYPKLESEFVYGDYKVYDVRKMIAKSEQEIGKATAKYFFYSNIMNFFKTEITLANGEIRKRPLIETNGETGEIVWDKGRDFATVRKVLSMPQVNIVKKTEVQTGGFSKESILPKRNSDKLIARKKDWDPKKYGGFDSPTVAYSVLVVAKVEKGKSKKLKSVKELLGITIMERSSFEKNPIDFLEAKGYKEVKKDLIIKLPKYSLFELENGRKRMLASAGELQKGNELALPSKYVNFLYLASHYEKLKGSPEDNEQKQLFVEQHKHYLDEIIEQISEFSKRVILADANLDKVLSAYNKHRDKPIREQAENIIHLFTLTNLGAPAAFKYFDTTIDRKRYTSTKEVLDATLIHQSITGLYETRIDLSQLGGDGGGSSGGSGGGGGTLNIEDEYRLHETSKGPDVPLGSTWLSDFPQAWAETGGMGLAVRQAPLIIPLKATSTPVSIKQYPMSQEARLGIKPHIQRLLDQGILVPCQSPWNTPLLPVKKPGTNDYRPVQDLREVNKRVEDIHPTVPNPYNLLSGLPPSHQWYTVLDLKDAFFCLRLHPTSQSLFAFEWRDPEMGISGQLTWTRLPQGFKNSPTLFNEALHRDLADFRIQHPDLILLQYVDDLLLAATSELDCQQGTRALLQTLGDLGYRASAKKAQICQKQVKYLGYLLKEGQRWLTEARKETVMGQPTPKTPRQLREFLGKAGFCRLFIPGFAEMAAPLYPLTKPGTLFEWGPDQQKAYQEIKQALLTAPALGLPDLTKPFELFVDEKQGYAKGVLTQKLGPWRRPVAYLSKKLDPVAAGWPPCLRMVAAIAVLTKDAGKLTMGQPLVILAPHAVEALVKQPPDRWLSNARMTHYQALLLDTDRVQFGPIVALNPATLLPLPEEGLQHDCLDILAEAHGTRPDLTDQPLPDADHTWYTDGSSFLQEGQRKAGAAVTTETEVVWAKALPAGTSAQRAELIALTQALKMAEGKKLNVYTDSRYAFATAHIHGEIYRRRGWLTSEGKEIKNKDEILALLKALFLPKRLSIIHCPGHQKGNRAEARGNRMADQAAREVATRETPETSTLLAGKRTADGSEFEKRTADGSEFESPKKKAKVE

SEQ ID NO: 2568 - protein, 2090 aa, synthetic construct
MPAAKRVKLDGGDKKYSIGLDIGTNSVGWAVITDEYKVPSKKFKVLGNTDRHSIKKNLIGALLFDSGETAEATRLKRTARRRYTRRKNRICYLQEIFSNEMAKVDDSFFHRLEESFLVEEDKKHERHPIFGNIVDEVAYHEKYPTIYHLRKKLVDSTDKADLRLIYLALAHMIKFRGHFLIEGDLNPDNSDVDKLFIQLVQTYNQLFEENPINASGVDAKAILSARLSKSRRLENLIAQLPGEKKNGLFGNLIALSLGLTPNFKSNFDLAEDAKLQLSKDTYDDDLDNLLAQIGDQYADLFLAAKNLSDAILLSDILRVNTEITKAPLSASMIKRYDEHHQDLTLLKALVRQQLPEKYKEIFFDQSKNGYAGYIDGGASQEEFYKFIKPILEKMDGTEELLVKLNREDLLRKQRTFDNGSIPHQIHLGELHAILRRQEDFYPFLKDNREKIEKILTFRIPYYVGPLARGNSRFAWMTRKSEETITPWNFEEVVDKGASAQSFIERMTNFDKNLPNEKVLPKHSLLYEYFTVYNELTKVKYVTEGMRKPAFLSGEQKKAIVDLLFKTNRKVTVKQLKEDYFKKIECFDSVEISGVEDRFNASLGTYHDLLKIIKDKDFLDNEENEDILEDIVLTLTLFEDREMIEERLKTYAHLFDDKVMKQLKRRRYTGWGRLSRKLINGIRDKQSGKTILDFLKSDGFANRNFMQLIHDDSLTFKEDIQKAQVSGQGDSLHEHIANLAGSPAIKKGILQTVKVVDELVKVMGRHKPENIVIEMARENQTTQKGQKNSRERMKRIEEGIKELGSQILKEHPVENTQLQNEKLYLYYLQNGRDMYVDQELDINRLSDYDVDHIVPQSFLKDDSIDNKVLTRSDKARGKSDNVPSEEVVKKMKNYWRQLLNAKLITQRKFDNLTKAERGGLSELDKAGFIKRQLVETRQITKHVAQILDSRMNTKYDENDKLIREVKVITLKSKLVSDFRKDFQFYKVREINNYHHAHDAYLNAVVGTALIKKYPKLESEFVYGDYKVYDVRKMIAKSEQEIGKATAKYFFYSNIMNFFKTEITLANGEIRKRPLIETNGETGEIVWDKGRDFATVRKVLSMPQVNIVKKTEVQTGGFSKESILPKRNSDKLIARKKDWDPKKYGGFDSPTVAYSVLVVAKVEKGKSKKLKSVKELLGITIMERSSFEKNPIDFLEAKGYKEVKKDLIIKLPKYSLFELENGRKRMLASAGELQKGNELALPSKYVNFLYLASHYEKLKGSPEDNEQKQLFVEQHKHYLDEIIEQISEFSKRVILADANLDKVLSAYNKHRDKPIREQAENIIHLFTLTNLGAPAAFKYFDTTIDRKRYTSTKEVLDATLIHQSITGLYETRIDLSQLGGDGGPAPAPGGTLNIEDEYRLHETSKGPDVPLGSTWLSDFPQAWAETGGMGLAVRQAPLIIPLKATSTPVSIKQYPMSQEARLGIKPHIQRLLDQGILVPCQSPWNTPLLPVKKPGTNDYRPVQDLREVNKRVEDIHPTVPNPYNLLSGLPPSHQWYTVLDLKDAFFCLRLHPTSQSLFAFEWRDPEMGISGQLTWTRLPQGFKNSPTLFNEALHRDLADFRIQHPDLILLQYVDDLLLAATSELDCQQGTRALLQTLGDLGYRASAKKAQICQKQVKYLGYLLKEGQRWLTEARKETVMGQPTPKTPRQLREFLGKAGFCRLFIPGFAEMAAPLYPLTKPGTLFEWGPDQQKAYQEIKQALLTAPALGLPDLTKPFELFVDEKQGYAKGVLTQKLGPWRRPVAYLSKKLDPVAAGWPPCLRMVAAIAVLTKDAGKLTMGQPLVILAPHAVEALVKQPPDRWLSNARMTHYQALLLDTDRVQFGPIVALNPATLLPLPEEGLQHDCLDILAEAHGTRPDLTDQPLPDADHTWYTDGSSFLQEGQRKAGAAVTTETEVVWAKALPAGTSAQRAELIALTQALKMAEGKKLNVYTDSRYAFATAHIHGEIYRRRGWLTSEGKEIKNKDEILALLKALFLPKRLSIIHCPGHQKGNRAEARGNRMADQAAREVATRETPETSTLLAGKRTADGSEFEKRTADGSEFESPKKKAKVE

SEQ ID NO: 2569 - protein, 2095 aa, synthetic construct
MPAAKRVKLDGGDKKYSIGLDIGTNSVGWAVITDEYKVPSKKFKVLGNTDRHSIKKNLIGALLFDSGETAEATRLKRTARRRYTRRKNRICYLQEIFSNEMAKVDDSFFHRLEESFLVEEDKKHERHPIFGNIVDEVAYHEKYPTIYHLRKKLVDSTDKADLRLIYLALAHMIKFRGHFLIEGDLNPDNSDVDKLFIQLVQTYNQLFEENPINASGVDAKAILSARLSKSRRLENLIAQLPGEKKNGLFGNLIALSLGLTPNFKSNFDLAEDAKLQLSKDTYDDDLDNLLAQIGDQYADLFLAAKNLSDAILLSDILRVNTEITKAPLSASMIKRYDEHHQDLTLLKALVRQQLPEKYKEIFFDQSKNGYAGYIDGGASQEEFYKFIKPILEKMDGTEELLVKLNREDLLRKQRTFDNGSIPHQIHLGELHAILRRQEDFYPFLKDNREKIEKILTFRIPYYVGPLARGNSRFAWMTRKSEETITPWNFEEVVDKGASAQSFIERMTNFDKNLPNEKVLPKHSLLYEYFTVYNELTKVKYVTEGMRKPAFLSGEQKKAIVDLLFKTNRKVTVKQLKEDYFKKIECFDSVEISGVEDRFNASLGTYHDLLKIIKDKDFLDNEENEDILEDIVLTLTLFEDREMIEERLKTYAHLFDDKVMKQLKRRRYTGWGRLSRKLINGIRDKQSGKTILDFLKSDGFANRNFMQLIHDDSLTFKEDIQKAQVSGQGDSLHEHIANLAGSPAIKKGILQTVKVVDELVKVMGRHKPENIVIEMARENQTTQKGQKNSRERMKRIEEGIKELGSQILKEHPVENTQLQNEKLYLYYLQNGRDMYVDQELDINRLSDYDVDHIVPQSFLKDDSIDNKVLTRSDKARGKSDNVPSEEVVKKMKNYWRQLLNAKLITQRKFDNLTKAERGGLSELDKAGFIKRQLVETRQITKHVAQILDSRMNTKYDENDKLIREVKVITLKSKLVSDFRKDFQFYKVREINNYHHAHDAYLNAVVGTALIKKYPKLESEFVYGDYKVYDVRKMIAKSEQEIGKATAKYFFYSNIMNFFKTEITLANGEIRKRPLIETNGETGEIVWDKGRDFATVRKVLSMPQVNIVKKTEVQTGGFSKESILPKRNSDKLIARKKDWDPKKYGGFDSPTVAYSVLVVAKVEKGKSKKLKSVKELLGITIMERSSFEKNPIDFLEAKGYKEVKKDLIIKLPKYSLFELENGRKRMLASAGELQKGNELALPSKYVNFLYLASHYEKLKGSPEDNEQKQLFVEQHKHYLDEIIEQISEFSKRVILADANLDKVLSAYNKHRDKPIREQAENIIHLFTLTNLGAPAAFKYFDTTIDRKRYTSTKEVLDATLIHQSITGLYETRIDLSQLGGDGGEAAAKEAAAKGGTLNIEDEYRLHETSKGPDVPLGSTWLSDFPQAWAETGGMGLAVRQAPLIIPLKATSTPVSIKQYPMSQEARLGIKPHIQRLLDQGILVPCQSPWNTPLLPVKKPGTNDYRPVQDLREVNKRVEDIHPTVPNPYNLLSGLPPSHQWYTVLDLKDAFFCLRLHPTSQSLFAFEWRDPEMGISGQLTWTRLPQGFKNSPTLFNEALHRDLADFRIQHPDLILLQYVDDLLLAATSELDCQQGTRALLQTLGDLGYRASAKKAQICQKQVKYLGYLLKEGQRWLTEARKETVMGQPTPKTPRQLREFLGKAGFCRLFIPGFAEMAAPLYPLTKPGTLFEWGPDQQKAYQEIKQALLTAPALGLPDLTKPFELFVDEKQGYAKGVLTQKLGPWRRPVAYLSKKLDPVAAGWPPCLRMVAAIAVLTKDAGKLTMGQPLVILAPHAVEALVKQPPDRWLSNARMTHYQALLLDTDRVQFGPIVALNPATLLPLPEEGLQHDCLDILAEAHGTRPDLTDQPLPDADHTWYTDGSSFLQEGQRKAGAAVTTETEVVWAKALPAGTSAQRAELIALTQALKMAEGKKLNVYTDSRYAFATAHIHGEIYRRRGWLTSEGKEIKNKDEILALLKALFLPKRLSIIHCPGHQKGNRAEARGNRMADQAAREVATRETPETSTLLAGKRTADGSEFEKRTADGSEFESPKKKAKVE

SEQ ID NO: 2570 - protein, 2096 aa, synthetic construct
MPAAKRVKLDGGDKKYSIGLDIGTNSVGWAVITDEYKVPSKKFKVLGNTDRHSIKKNLIGALLFDSGETAEATRLKRTARRRYTRRKNRICYLQEIFSNEMAKVDDSFFHRLEESFLVEEDKKHERHPIFGNIVDEVAYHEKYPTIYHLRKKLVDSTDKADLRLIYLALAHMIKFRGHFLIEGDLNPDNSDVDKLFIQLVQTYNQLFEENPINASGVDAKAILSARLSKSRRLENLIAQLPGEKKNGLFGNLIALSLGLTPNFKSNFDLAEDAKLQLSKDTYDDDLDNLLAQIGDQYADLFLAAKNLSDAILLSDILRVNTEITKAPLSASMIKRYDEHHQDLTLLKALVRQQLPEKYKEIFFDQSKNGYAGYIDGGASQEEFYKFIKPILEKMDGTEELLVKLNREDLLRKQRTFDNGSIPHQIHLGELHAILRRQEDFYPFLKDNREKIEKILTFRIPYYVGPLARGNSRFAWMTRKSEETITPWNFEEVVDKGASAQSFIERMTNFDKNLPNEKVLPKHSLLYEYFTVYNELTKVKYVTEGMRKPAFLSGEQKKAIVDLLFKTNRKVTVKQLKEDYFKKIECFDSVEISGVEDRFNASLGTYHDLLKIIKDKDFLDNEENEDILEDIVLTLTLFEDREMIEERLKTYAHLFDDKVMKQLKRRRYTGWGRLSRKLINGIRDKQSGKTILDFLKSDGFANRNFMQLIHDDSLTFKEDIQKAQVSGQGDSLHEHIANLAGSPAIKKGILQTVKVVDELVKVMGRHKPENIVIEMARENQTTQKGQKNSRERMKRIEEGIKELGSQILKEHPVENTQLQNEKLYLYYLQNGRDMYVDQELDINRLSDYDVDHIVPQSFLKDDSIDNKVLTRSDKARGKSDNVPSEEVVKKMKNYWRQLLNAKLITQRKFDNLTKAERGGLSELDKAGFIKRQLVETRQITKHVAQILDSRMNTKYDENDKLIREVKVITLKSKLVSDFRKDFQFYKVREINNYHHAHDAYLNAVVGTALIKKYPKLESEFVYGDYKVYDVRKMIAKSEQEIGKATAKYFFYSNIMNFFKTEITLANGEIRKRPLIETNGETGEIVWDKGRDFATVRKVLSMPQVNIVKKTEVQTGGFSKESILPKRNSDKLIARKKDWDPKKYGGFDSPTVAYSVLVVAKVEKGKSKKLKSVKELLGITIMERSSFEKNPIDFLEAKGYKEVKKDLIIKLPKYSLFELENGRKRMLASAGELQKGNELALPSKYVNFLYLASHYEKLKGSPEDNEQKQLFVEQHKHYLDEIIEQISEFSKRVILADANLDKVLSAYNKHRDKPIREQAENIIHLFTLTNLGAPAAFKYFDTTIDRKRYTSTKEVLDATLIHQSITGLYETRIDLSQLGGDGGGSSGGSEAAAKGGTLNIEDEYRLHETSKGPDVPLGSTWLSDFPQAWAETGGMGLAVRQAPLIIPLKATSTPVSIKQYPMSQEARLGIKPHIQRLLDQGILVPCQSPWNTPLLPVKKPGTNDYRPVQDLREVNKRVEDIHPTVPNPYNLLSGLPPSHQWYTVLDLKDAFFCLRLHPTSQSLFAFEWRDPEMGISGQLTWTRLPQGFKNSPTLFNEALHRDLADFRIQHPDLILLQYVDDLLLAATSELDCQQGTRALLQTLGDLGYRASAKKAQICQKQVKYLGYLLKEGQRWLTEARKETVMGQPTPKTPRQLREFLGKAGFCRLFIPGFAEMAAPLYPLTKPGTLFEWGPDQQKAYQEIKQALLTAPALGLPDLTKPFELFVDEKQGYAKGVLTQKLGPWRRPVAYLSKKLDPVAAGWPPCLRMVAAIAVLTKDAGKLTMGQPLVILAPHAVEALVKQPPDRWLSNARMTHYQALLLDTDRVQFGPIVALNPATLLPLPEEGLQHDCLDILAEAHGTRPDLTDQPLPDADHTWYTDGSSFLQEGQRKAGAAVTTETEVVWAKALPAGTSAQRAELIALTQALKMAEGKKLNVYTDSRYAFATAHIHGEIYRRRGWLTSEGKEIKNKDEILALLKALFLPKRLSIIHCPGHQKGNRAEARGNRMADQAAREVATRETPETSTLLAGKRTADGSEFEKRTADGSEFESPKKKAKVE

SEQ ID NO: 2571 - protein, 2094 aa, synthetic construct
MPAAKRVKLDGGDKKYSIGLDIGTNSVGWAVITDEYKVPSKKFKVLGNTDRHSIKKNLIGALLFDSGETAEATRLKRTARRRYTRRKNRICYLQEIFSNEMAKVDDSFFHRLEESFLVEEDKKHERHPIFGNIVDEVAYHEKYPTIYHLRKKLVDSTDKADLRLIYLALAHMIKFRGHFLIEGDLNPDNSDVDKLFIQLVQTYNQLFEENPINASGVDAKAILSARLSKSRRLENLIAQLPGEKKNGLFGNLIALSLGLTPNFKSNFDLAEDAKLQLSKDTYDDDLDNLLAQIGDQYADLFLAAKNLSDAILLSDILRVNTEITKAPLSASMIKRYDEHHQDLTLLKALVRQQLPEKYKEIFFDQSKNGYAGYIDGGASQEEFYKFIKPILEKMDGTEELLVKLNREDLLRKQRTFDNGSIPHQIHLGELHAILRRQEDFYPFLKDNREKIEKILTFRIPYYVGPLARGNSRFAWMTRKSEETITPWNFEEVVDKGASAQSFIERMTNFDKNLPNEKVLPKHSLLYEYFTVYNELTKVKYVTEGMRKPAFLSGEQKKAIVDLLFKTNRKVTVKQLKEDYFKKIECFDSVEISGVEDRFNASLGTYHDLLKIIKDKDFLDNEENEDILEDIVLTLTLFEDREMIEERLKTYAHLFDDKVMKQLKRRRYTGWGRLSRKLINGIRDKQSGKTILDFLKSDGFANRNFMQLIHDDSLTFKEDIQKAQVSGQGDSLHEHIANLAGSPAIKKGILQTVKVVDELVKVMGRHKPENIVIEMARENQTTQKGQKNSRERMKRIEEGIKELGSQILKEHPVENTQLQNEKLYLYYLQNGRDMYVDQELDINRLSDYDVDHIVPQSFLKDDSIDNKVLTRSDKARGKSDNVPSEEVVKKMKNYWRQLLNAKLITQRKFDNLTKAERGGLSELDKAGFIKRQLVETRQITKHVAQILDSRMNTKYDENDKLIREVKVITLKSKLVSDFRKDFQFYKVREINNYHHAHDAYLNAVVGTALIKKYPKLESEFVYGDYKVYDVRKMIAKSEQEIGKATAKYFFYSNIMNFFKTEITLANGEIRKRPLIETNGETGEIVWDKGRDFATVRKVLSMPQVNIVKKTEVQTGGFSKESILPKRNSDKLIARKKDWDPKKYGGFDSPTVAYSVLVVAKVEKGKSKKLKSVKELLGITIMERSSFEKNPIDFLEAKGYKEVKKDLIIKLPKYSLFELENGRKRMLASAGELQKGNELALPSKYVNFLYLASHYEKLKGSPEDNEQKQLFVEQHKHYLDEIIEQISEFSKRVILADANLDKVLSAYNKHRDKPIREQAENIIHLFTLTNLGAPAAFKYFDTTIDRKRYTSTKEVLDATLIHQSITGLYETRIDLSQLGGDGGGGGGSSGGSGGTLNIEDEYRLHETSKGPDVPLGSTWLSDFPQAWAETGGMGLAVRQAPLIIPLKATSTPVSIKQYPMSQEARLGIKPHIQRLLDQGILVPCQSPWNTPLLPVKKPGTNDYRPVQDLREVNKRVEDIHPTVPNPYNLLSGLPPSHQWYTVLDLKDAFFCLRLHPTSQSLFAFEWRDPEMGISGQLTWTRLPQGFKNSPTLFNEALHRDLADFRIQHPDLILLQYVDDLLLAATSELDCQQGTRALLQTLGDLGYRASAKKAQICQKQVKYLGYLLKEGQRWLTEARKETVMGQPTPKTPRQLREFLGKAGFCRLFIPGFAEMAAPLYPLTKPGTLFEWGPDQQKAYQEIKQALLTAPALGLPDLTKPFELFVDEKQGYAKGVLTQKLGPWRRPVAYLSKKLDPVAAGWPPCLRMVAAIAVLTKDAGKLTMGQPLVILAPHAVEALVKQPPDRWLSNARMTHYQALLLDTDRVQFGPIVALNPATLLPLPEEGLQHDCLDILAEAHGTRPDLTDQPLPDADHTWYTDGSSFLQEGQRKAGAAVTTETEVVWAKALPAGTSAQRAELIALTQALKMAEGKKLNVYTDSRYAFATAHIHGEIYRRRGWLTSEGKEIKNKDEILALLKALFLPKRLSIIHCPGHQKGNRAEARGNRMADQAAREVATRETPETSTLLAGKRTADGSEFEKRTADGSEFESPKKKAKVE

SEQ ID NO: 2572 - protein, 2091 aa, synthetic construct
MPAAKRVKLDGGDKKYSIGLDIGTNSVGWAVITDEYKVPSKKFKVLGNTDRHSIKKNLIGALLFDSGETAEATRLKRTARRRYTRRKNRICYLQEIFSNEMAKVDDSFFHRLEESFLVEEDKKHERHPIFGNIVDEVAYHEKYPTIYHLRKKLVDSTDKADLRLIYLALAHMIKFRGHFLIEGDLNPDNSDVDKLFIQLVQTYNQLFEENPINASGVDAKAILSARLSKSRRLENLIAQLPGEKKNGLFGNLIALSLGLTPNFKSNFDLAEDAKLQLSKDTYDDDLDNLLAQIGDQYADLFLAAKNLSDAILLSDILRVNTEITKAPLSASMIKRYDEHHQDLTLLKALVRQQLPEKYKEIFFDQSKNGYAGYIDGGASQEEFYKFIKPILEKMDGTEELLVKLNREDLLRKQRTFDNGSIPHQIHLGELHAILRRQEDFYPFLKDNREKIEKILTFRIPYYVGPLARGNSRFAWMTRKSEETITPWNFEEVVDKGASAQSFIERMTNFDKNLPNEKVLPKHSLLYEYFTVYNELTKVKYVTEGMRKPAFLSGEQKKAIVDLLFKTNRKVTVKQLKEDYFKKIECFDSVEISGVEDRFNASLGTYHDLLKIIKDKDFLDNEENEDILEDIVLTLTLFEDREMIEERLKTYAHLFDDKVMKQLKRRRYTGWGRLSRKLINGIRDKQSGKTILDFLKSDGFANRNFMQLIHDDSLTFKEDIQKAQVSGQGDSLHEHIANLAGSPAIKKGILQTVKVVDELVKVMGRHKPENIVIEMARENQTTQKGQKNSRERMKRIEEGIKELGSQILKEHPVENTQLQNEKLYLYYLQNGRDMYVDQELDINRLSDYDVDHIVPQSFLKDDSIDNKVLTRSDKARGKSDNVPSEEVVKKMKNYWRQLLNAKLITQRKFDNLTKAERGGLSELDKAGFIKRQLVETRQITKHVAQILDSRMNTKYDENDKLIREVKVITLKSKLVSDFRKDFQFYKVREINNYHHAHDAYLNAVVGTALIKKYPKLESEFVYGDYKVYDVRKMIAKSEQEIGKATAKYFFYSNIMNFFKTEITLANGEIRKRPLIETNGETGEIVWDKGRDFATVRKVLSMPQVNIVKKTEVQTGGFSKESILPKRNSDKLIARKKDWDPKKYGGFDSPTVAYSVLVVAKVEKGKSKKLKSVKELLGITIMERSSFEKNPIDFLEAKGYKEVKKDLIIKLPKYSLFELENGRKRMLASAGELQKGNELALPSKYVNFLYLASHYEKLKGSPEDNEQKQLFVEQHKHYLDEIIEQISEFSKRVILADANLDKVLSAYNKHRDKPIREQAENIIHLFTLTNLGAPAAFKYFDTTIDRKRYTSTKEVLDATLIHQSITGLYETRIDLSQLGGDGGGSSPAPGGTLNIEDEYRLHETSKGPDVPLGSTWLSDFPQAWAETGGMGLAVRQAPLIIPLKATSTPVSIKQYPMSQEARLGIKPHIQRLLDQGILVPCQSPWNTPLLPVKKPGTNDYRPVQDLREVNKRVEDIHPTVPNPYNLLSGLPPSHQWYTVLDLKDAFFCLRLHPTSQSLFAFEWRDPEMGISGQLTWTRLPQGFKNSPTLFNEALHRDLADFRIQHPDLILLQYVDDLLLAATSELDCQQGTRALLQTLGDLGYRASAKKAQICQKQVKYLGYLLKEGQRWLTEARKETVMGQPTPKTPRQLREFLGKAGFCRLFIPGFAEMAAPLYPLTKPGTLFEWGPDQQKAYQEIKQALLTAPALGLPDLTKPFELFVDEKQGYAKGVLTQKLGPWRRPVAYLSKKLDPVAAGWPPCLRMVAAIAVLTKDAGKLTMGQPLVILAPHAVEALVKQPPDRWLSNARMTHYQALLLDTDRVQFGPIVALNPATLLPLPEEGLQHDCLDILAEAHGTRPDLTDQPLPDADHTWYTDGSSFLQEGQRKAGAAVTTETEVVWAKALPAGTSAQRAELIALTQALKMAEGKKLNVYTDSRYAFATAHIHGEIYRRRGWLTSEGKEIKNKDEILALLKALFLPKRLSIIHCPGHQKGNRAEARGNRMADQAAREVATRETPETSTLLAGKRTADGSEFEKRTADGSEFESPKKKAKVE

SEQ ID NO: 2573 - protein, 2094 aa, synthetic construct
MPAAKRVKLDGGDKKYSIGLDIGTNSVGWAVITDEYKVPSKKFKVLGNTDRHSIKKNLIGALLFDSGETAEATRLKRTARRRYTRRKNRICYLQEIFSNEMAKVDDSFFHRLEESFLVEEDKKHERHPIFGNIVDEVAYHEKYPTIYHLRKKLVDSTDKADLRLIYLALAHMIKFRGHFLIEGDLNPDNSDVDKLFIQLVQTYNQLFEENPINASGVDAKAILSARLSKSRRLENLIAQLPGEKKNGLFGNLIALSLGLTPNFKSNFDLAEDAKLQLSKDTYDDDLDNLLAQIGDQYADLFLAAKNLSDAILLSDILRVNTEITKAPLSASMIKRYDEHHQDLTLLKALVRQQLPEKYKEIFFDQSKNGYAGYIDGGASQEEFYKFIKPILEKMDGTEELLVKLNREDLLRKQRTFDNGSIPHQIHLGELHAILRRQEDFYPFLKDNREKIEKILTFRIPYYVGPLARGNSRFAWMTRKSEETITPWNFEEVVDKGASAQSFIERMTNFDKNLPNEKVLPKHSLLYEYFTVYNELTKVKYVTEGMRKPAFLSGEQKKAIVDLLFKTNRKVTVKQLKEDYFKKIECFDSVEISGVEDRFNASLGTYHDLLKIIKDKDFLDNEENEDILEDIVLTLTLFEDREMIEERLKTYAHLFDDKVMKQLKRRRYTGWGRLSRKLINGIRDKQSGKTILDFLKSDGFANRNFMQLIHDDSLTFKEDIQKAQVSGQGDSLHEHIANLAGSPAIKKGILQTVKVVDELVKVMGRHKPENIVIEMARENQTTQKGQKNSRERMKRIEEGIKELGSQILKEHPVENTQLQNEKLYLYYLQNGRDMYVDQELDINRLSDYDVDHIVPQSFLKDDSIDNKVLTRSDKARGKSDNVPSEEVVKKMKNYWRQLLNAKLITQRKFDNLTKAERGGLSELDKAGFIKRQLVETRQITKHVAQILDSRMNTKYDENDKLIREVKVITLKSKLVSDFRKDFQFYKVREINNYHHAHDAYLNAVVGTALIKKYPKLESEFVYGDYKVYDVRKMIAKSEQEIGKATAKYFFYSNIMNFFKTEITLANGEIRKRPLIETNGETGEIVWDKGRDFATVRKVLSMPQVNIVKKTEVQTGGFSKESILPKRNSDKLIARKKDWDPKKYGGFDSPTVAYSVLVVAKVEKGKSKKLKSVKELLGITIMERSSFEKNPIDFLEAKGYKEVKKDLIIKLPKYSLFELENGRKRMLASAGELQKGNELALPSKYVNFLYLASHYEKLKGSPEDNEQKQLFVEQHKHYLDEIIEQISEFSKRVILADANLDKVLSAYNKHRDKPIREQAENIIHLFTLTNLGAPAAFKYFDTTIDRKRYTSTKEVLDATLIHQSITGLYETRIDLSQLGGDGGGGSPAPGGGGGTLNIEDEYRLHETSKGPDVPLGSTWLSDFPQAWAETGGMGLAVRQAPLIIPLKATSTPVSIKQYPMSQEARLGIKPHIQRLLDQGILVPCQSPWNTPLLPVKKPGTNDYRPVQDLREVNKRVEDIHPTVPNPYNLLSGLPPSHQWYTVLDLKDAFFCLRLHPTSQSLFAFEWRDPEMGISGQLTWTRLPQGFKNSPTLFNEALHRDLADFRIQHPDLILLQYVDDLLLAATSELDCQQGTRALLQTLGDLGYRASAKKAQICQKQVKYLGYLLKEGQRWLTEARKETVMGQPTPKTPRQLREFLGKAGFCRLFIPGFAEMAAPLYPLTKPGTLFEWGPDQQKAYQEIKQALLTAPALGLPDLTKPFELFVDEKQGYAKGVLTQKLGPWRRPVAYLSKKLDPVAAGWPPCLRMVAAIAVLTKDAGKLTMGQPLVILAPHAVEALVKQPPDRWLSNARMTHYQALLLDTDRVQFGPIVALNPATLLPLPEEGLQHDCLDILAEAHGTRPDLTDQPLPDADHTWYTDGSSFLQEGQRKAGAAVTTETEVVWAKALPAGTSAQRAELIALTQALKMAEGKKLNVYTDSRYAFATAHIHGEIYRRRGWLTSEGKEIKNKDEILALLKALFLPKRLSIIHCPGHQKGNRAEARGNRMADQAAREVATRETPETSTLLAGKRTADGSEFEKRTADGSEFESPKKKAKVE

SEQ ID NO: 2574 - protein, 2094 aa, synthetic construct
MPAAKRVKLDGGDKKYSIGLDIGTNSVGWAVITDEYKVPSKKFKVLGNTDRHSIKKNLIGALLFDSGETAEATRLKRTARRRYTRRKNRICYLQEIFSNEMAKVDDSFFHRLEESFLVEEDKKHERHPIFGNIVDEVAYHEKYPTIYHLRKKLVDSTDKADLRLIYLALAHMIKFRGHFLIEGDLNPDNSDVDKLFIQLVQTYNQLFEENPINASGVDAKAILSARLSKSRRLENLIAQLPGEKKNGLFGNLIALSLGLTPNFKSNFDLAEDAKLQLSKDTYDDDLDNLLAQIGDQYADLFLAAKNLSDAILLSDILRVNTEITKAPLSASMIKRYDEHHQDLTLLKALVRQQLPEKYKEIFFDQSKNGYAGYIDGGASQEEFYKFIKPILEKMDGTEELLVKLNREDLLRKQRTFDNGSIPHQIHLGELHAILRRQEDFYPFLKDNREKIEKILTFRIPYYVGPLARGNSRFAWMTRKSEETITPWNFEEVVDKGASAQSFIERMTNFDKNLPNEKVLPKHSLLYEYFTVYNELTKVKYVTEGMRKPAFLSGEQKKAIVDLLFKTNRKVTVKQLKEDYFKKIECFDSVEISGVEDRFNASLGTYHDLLKIIKDKDFLDNEENEDILEDIVLTLTLFEDREMIEERLKTYAHLFDDKVMKQLKRRRYTGWGRLSRKLINGIRDKQSGKTILDFLKSDGFANRNFMQLIHDDSLTFKEDIQKAQVSGQGDSLHEHIANLAGSPAIKKGILQTVKVVDELVKVMGRHKPENIVIEMARENQTTQKGQKNSRERMKRIEEGIKELGSQILKEHPVENTQLQNEKLYLYYLQNGRDMYVDQELDINRLSDYDVDHIVPQSFLKDDSIDNKVLTRSDKARGKSDNVPSEEVVKKMKNYWRQLLNAKLITQRKFDNLTKAERGGLSELDKAGFIKRQLVETRQITKHVAQILDSRMNTKYDENDKLIREVKVITLKSKLVSDFRKDFQFYKVREINNYHHAHDAYLNAVVGTALIKKYPKLESEFVYGDYKVYDVRKMIAKSEQEIGKATAKYFFYSNIMNFFKTEITLANGEIRKRPLIETNGETGEIVWDKGRDFATVRKVLSMPQVNIVKKTEVQTGGFSKESILPKRNSDKLIARKKDWDPKKYGGFDSPTVAYSVLVVAKVEKGKSKKLKSVKELLGITIMERSSFEKNPIDFLEAKGYKEVKKDLIIKLPKYSLFELENGRKRMLASAGELQKGNELALPSKYVNFLYLASHYEKLKGSPEDNEQKQLFVEQHKHYLDEIIEQISEFSKRVILADANLDKVLSAYNKHRDKPIREQAENIIHLFTLTNLGAPAAFKYFDTTIDRKRYTSTKEVLDATLIHQSITGLYETRIDLSQLGGDGGPAPGGSGGGGGTLNIEDEYRLHETSKGPDVPLGSTWLSDFPQAWAETGGMGLAVRQAPLIIPLKATSTPVSIKQYPMSQEARLGIKPHIQRLLDQGILVPCQSPWNTPLLPVKKPGTNDYRPVQDLREVNKRVEDIHPTVPNPYNLLSGLPPSHQWYTVLDLKDAFFCLRLHPTSQSLFAFEWRDPEMGISGQLTWTRLPQGFKNSPTLFNEALHRDLADFRIQHPDLILLQYVDDLLLAATSELDCQQGTRALLQTLGDLGYRASAKKAQICQKQVKYLGYLLKEGQRWLTEARKETVMGQPTPKTPRQLREFLGKAGFCRLFIPGFAEMAAPLYPLTKPGTLFEWGPDQQKAYQEIKQALLTAPALGLPDLTKPFELFVDEKQGYAKGVLTQKLGPWRRPVAYLSKKLDPVAAGWPPCLRMVAAIAVLTKDAGKLTMGQPLVILAPHAVEALVKQPPDRWLSNARMTHYQALLLDTDRVQFGPIVALNPATLLPLPEEGLQHDCLDILAEAHGTRPDLTDQPLPDADHTWYTDGSSFLQEGQRKAGAAVTTETEVVWAKALPAGTSAQRAELIALTQALKMAEGKKLNVYTDSRYAFATAHIHGEIYRRRGWLTSEGKEIKNKDEILALLKALFLPKRLSIIHCPGHQKGNRAEARGNRMADQAAREVATRETPETSTLLAGKRTADGSEFEKRTADGSEFESPKKKAKVE

SEQ ID NO: 2575 - protein, 2096 aa, synthetic construct
MPAAKRVKLDGGDKKYSIGLDIGTNSVGWAVITDEYKVPSKKFKVLGNTDRHSIKKNLIGALLFDSGETAEATRLKRTARRRYTRRKNRICYLQEIFSNEMAKVDDSFFHRLEESFLVEEDKKHERHPIFGNIVDEVAYHEKYPTIYHLRKKLVDSTDKADLRLIYLALAHMIKFRGHFLIEGDLNPDNSDVDKLFIQLVQTYNQLFEENPINASGVDAKAILSARLSKSRRLENLIAQLPGEKKNGLFGNLIALSLGLTPNFKSNFDLAEDAKLQLSKDTYDDDLDNLLAQIGDQYADLFLAAKNLSDAILLSDILRVNTEITKAPLSASMIKRYDEHHQDLTLLKALVRQQLPEKYKEIFFDQSKNGYAGYIDGGASQEEFYKFIKPILEKMDGTEELLVKLNREDLLRKQRTFDNGSIPHQIHLGELHAILRRQEDFYPFLKDNREKIEKILTFRIPYYVGPLARGNSRFAWMTRKSEETITPWNFEEVVDKGASAQSFIERMTNFDKNLPNEKVLPKHSLLYEYFTVYNELTKVKYVTEGMRKPAFLSGEQKKAIVDLLFKTNRKVTVKQLKEDYFKKIECFDSVEISGVEDRFNASLGTYHDLLKIIKDKDFLDNEENEDILEDIVLTLTLFEDREMIEERLKTYAHLFDDKVMKQLKRRRYTGWGRLSRKLINGIRDKQSGKTILDFLKSDGFANRNFMQLIHDDSLTFKEDIQKAQVSGQGDSLHEHIANLAGSPAIKKGILQTVKVVDELVKVMGRHKPENIVIEMARENQTTQKGQKNSRERMKRIEEGIKELGSQILKEHPVENTQLQNEKLYLYYLQNGRDMYVDQELDINRLSDYDVDHIVPQSFLKDDSIDNKVLTRSDKARGKSDNVPSEEVVKKMKNYWRQLLNAKLITQRKFDNLTKAERGGLSELDKAGFIKRQLVETRQITKHVAQILDSRMNTKYDENDKLIREVKVITLKSKLVSDFRKDFQFYKVREINNYHHAHDAYLNAVVGTALIKKYPKLESEFVYGDYKVYDVRKMIAKSEQEIGKATAKYFFYSNIMNFFKTEITLANGEIRKRPLIETNGETGEIVWDKGRDFATVRKVLSMPQVNIVKKTEVQTGGFSKESILPKRNSDKLIARKKDWDPKKYGGFDSPTVAYSVLVVAKVEKGKSKKLKSVKELLGITIMERSSFEKNPIDFLEAKGYKEVKKDLIIKLPKYSLFELENGRKRMLASAGELQKGNELALPSKYVNFLYLASHYEKLKGSPEDNEQKQLFVEQHKHYLDEIIEQISEFSKRVILADANLDKVLSAYNKHRDKPIREQAENIIHLFTLTNLGAPAAFKYFDTTIDRKRYTSTKEVLDATLIHQSITGLYETRIDLSQLGGDGGGGGGSSEAAAKGGTLNIEDEYRLHETSKGPDVPLGSTWLSDFPQAWAETGGMGLAVRQAPLIIPLKATSTPVSIKQYPMSQEARLGIKPHIQRLLDQGILVPCQSPWNTPLLPVKKPGTNDYRPVQDLREVNKRVEDIHPTVPNPYNLLSGLPPSHQWYTVLDLKDAFFCLRLHPTSQSLFAFEWRDPEMGISGQLTWTRLPQGFKNSPTLFNEALHRDLADFRIQHPDLILLQYVDDLLLAATSELDCQQGTRALLQTLGDLGYRASAKKAQICQKQVKYLGYLLKEGQRWLTEARKETVMGQPTPKTPRQLREFLGKAGFCRLFIPGFAEMAAPLYPLTKPGTLFEWGPDQQKAYQEIKQALLTAPALGLPDLTKPFELFVDEKQGYAKGVLTQKLGPWRRPVAYLSKKLDPVAAGWPPCLRMVAAIAVLTKDAGKLTMGQPLVILAPHAVEALVKQPPDRWLSNARMTHYQALLLDTDRVQFGPIVALNPATLLPLPEEGLQHDCLDILAEAHGTRPDLTDQPLPDADHTWYTDGSSFLQEGQRKAGAAVTTETEVVWAKALPAGTSAQRAELIALTQALKMAEGKKLNVYTDSRYAFATAHIHGEIYRRRGWLTSEGKEIKNKDEILALLKALFLPKRLSIIHCPGHQKGNRAEARGNRMADQAAREVATRETPETSTLLAGKRTADGSEFEKRTADGSEFESPKKKAKVE

SEQ ID NO: 2576 - protein, 2096 aa, synthetic construct
MPAAKRVKLDGGDKKYSIGLDIGTNSVGWAVITDEYKVPSKKFKVLGNTDRHSIKKNLIGALLFDSGETAEATRLKRTARRRYTRRKNRICYLQEIFSNEMAKVDDSFFHRLEESFLVEEDKKHERHPIFGNIVDEVAYHEKYPTIYHLRKKLVDSTDKADLRLIYLALAHMIKFRGHFLIEGDLNPDNSDVDKLFIQLVQTYNQLFEENPINASGVDAKAILSARLSKSRRLENLIAQLPGEKKNGLFGNLIALSLGLTPNFKSNFDLAEDAKLQLSKDTYDDDLDNLLAQIGDQYADLFLAAKNLSDAILLSDILRVNTEITKAPLSASMIKRYDEHHQDLTLLKALVRQQLPEKYKEIFFDQSKNGYAGYIDGGASQEEFYKFIKPILEKMDGTEELLVKLNREDLLRKQRTFDNGSIPHQIHLGELHAILRRQEDFYPFLKDNREKIEKILTFRIPYYVGPLARGNSRFAWMTRKSEETITPWNFEEVVDKGASAQSFIERMTNFDKNLPNEKVLPKHSLLYEYFTVYNELTKVKYVTEGMRKPAFLSGEQKKAIVDLLFKTNRKVTVKQLKEDYFKKIECFDSVEISGVEDRFNASLGTYHDLLKIIKDKDFLDNEENEDILEDIVLTLTLFEDREMIEERLKTYAHLFDDKVMKQLKRRRYTGWGRLSRKLINGIRDKQSGKTILDFLKSDGFANRNFMQLIHDDSLTFKEDIQKAQVSGQGDSLHEHIANLAGSPAIKKGILQTVKVVDELVKVMGRHKPENIVIEMARENQTTQKGQKNSRERMKRIEEGIKELGSQILKEHPVENTQLQNEKLYLYYLQNGRDMYVDQELDINRLSDYDVDHIVPQSFLKDDSIDNKVLTRSDKARGKSDNVPSEEVVKKMKNYWRQLLNAKLITQRKFDNLTKAERGGLSELDKAGFIKRQLVETRQITKHVAQILDSRMNTKYDENDKLIREVKVITLKSKLVSDFRKDFQFYKVREINNYHHAHDAYLNAVVGTALIKKYPKLESEFVYGDYKVYDVRKMIAKSEQEIGKATAKYFFYSNIMNFFKTEITLANGEIRKRPLIETNGETGEIVWDKGRDFATVRKVLSMPQVNIVKKTEVQTGGFSKESILPKRNSDKLIARKKDWDPKKYGGFDSPTVAYSVLVVAKVEKGKSKKLKSVKELLGITIMERSSFEKNPIDFLEAKGYKEVKKDLIIKLPKYSLFELENGRKRMLASAGELQKGNELALPSKYVNFLYLASHYEKLKGSPEDNEQKQLFVEQHKHYLDEIIEQISEFSKRVILADANLDKVLSAYNKHRDKPIREQAENIIHLFTLTNLGAPAAFKYFDTTIDRKRYTSTKEVLDATLIHQSITGLYETRIDLSQLGGDGGGGGEAAAKGSSGGTLNIEDEYRLHETSKGPDVPLGSTWLSDFPQAWAETGGMGLAVRQAPLIIPLKATSTPVSIKQYPMSQEARLGIKPHIQRLLDQGILVPCQSPWNTPLLPVKKPGTNDYRPVQDLREVNKRVEDIHPTVPNPYNLLSGLPPSHQWYTVLDLKDAFFCLRLHPTSQSLFAFEWRDPEMGISGQLTWTRLPQGFKNSPTLFNEALHRDLADFRIQHPDLILLQYVDDLLLAATSELDCQQGTRALLQTLGDLGYRASAKKAQICQKQVKYLGYLLKEGQRWLTEARKETVMGQPTPKTPRQLREFLGKAGFCRLFIPGFAEMAAPLYPLTKPGTLFEWGPDQQKAYQEIKQALLTAPALGLPDLTKPFELFVDEKQGYAKGVLTQKLGPWRRPVAYLSKKLDPVAAGWPPCLRMVAAIAVLTKDAGKLTMGQPLVILAPHAVEALVKQPPDRWLSNARMTHYQALLLDTDRVQFGPIVALNPATLLPLPEEGLQHDCLDILAEAHGTRPDLTDQPLPDADHTWYTDGSSFLQEGQRKAGAAVTTETEVVWAKALPAGTSAQRAELIALTQALKMAEGKKLNVYTDSRYAFATAHIHGEIYRRRGWLTSEGKEIKNKDEILALLKALFLPKRLSIIHCPGHQKGNRAEARGNRMADQAAREVATRETPETSTLLAGKRTADGSEFEKRTADGSEFESPKKKAKVE

SEQ ID NO: 2577 - protein, 2096 aa, synthetic construct
MPAAKRVKLDGGDKKYSIGLDIGTNSVGWAVITDEYKVPSKKFKVLGNTDRHSIKKNLIGALLFDSGETAEATRLKRTARRRYTRRKNRICYLQEIFSNEMAKVDDSFFHRLEESFLVEEDKKHERHPIFGNIVDEVAYHEKYPTIYHLRKKLVDSTDKADLRLIYLALAHMIKFRGHFLIEGDLNPDNSDVDKLFIQLVQTYNQLFEENPINASGVDAKAILSARLSKSRRLENLIAQLPGEKKNGLFGNLIALSLGLTPNFKSNFDLAEDAKLQLSKDTYDDDLDNLLAQIGDQYADLFLAAKNLSDAILLSDILRVNTEITKAPLSASMIKRYDEHHQDLTLLKALVRQQLPEKYKEIFFDQSKNGYAGYIDGGASQEEFYKFIKPILEKMDGTEELLVKLNREDLLRKQRTFDNGSIPHQIHLGELHAILRRQEDFYPFLKDNREKIEKILTFRIPYYVGPLARGNSRFAWMTRKSEETITPWNFEEVVDKGASAQSFIERMTNFDKNLPNEKVLPKHSLLYEYFTVYNELTKVKYVTEGMRKPAFLSGEQKKAIVDLLFKTNRKVTVKQLKEDYFKKIECFDSVEISGVEDRFNASLGTYHDLLKIIKDKDFLDNEENEDILEDIVLTLTLFEDREMIEERLKTYAHLFDDKVMKQLKRRRYTGWGRLSRKLINGIRDKQSGKTILDFLKSDGFANRNFMQLIHDDSLTFKEDIQKAQVSGQGDSLHEHIANLAGSPAIKKGILQTVKVVDELVKVMGRHKPENIVIEMARENQTTQKGQKNSRERMKRIEEGIKELGSQILKEHPVENTQLQNEKLYLYYLQNGRDMYVDQELDINRLSDYDVDHIVPQSFLKDDSIDNKVLTRSDKARGKSDNVPSEEVVKKMKNYWRQLLNAKLITQRKFDNLTKAERGGLSELDKAGFIKRQLVETRQITKHVAQILDSRMNTKYDENDKLIREVKVITLKSKLVSDFRKDFQFYKVREINNYHHAHDAYLNAVVGTALIKKYPKLESEFVYGDYKVYDVRKMIAKSEQEIGKATAKYFFYSNIMNFFKTEITLANGEIRKRPLIETNGETGEIVWDKGRDFATVRKVLSMPQVNIVKKTEVQTGGFSKESILPKRNSDKLIARKKDWDPKKYGGFDSPTVAYSVLVVAKVEKGKSKKLKSVKELLGITIMERSSFEKNPIDFLEAKGYKEVKKDLIIKLPKYSLFELENGRKRMLASAGELQKGNELALPSKYVNFLYLASHYEKLKGSPEDNEQKQLFVEQHKHYLDEIIEQISEFSKRVILADANLDKVLSAYNKHRDKPIREQAENIIHLFTLTNLGAPAAFKYFDTTIDRKRYTSTKEVLDATLIHQSITGLYETRIDLSQLGGDGGPAPEAAAKGGSGGTLNIEDEYRLHETSKGPDVPLGSTWLSDFPQAWAETGGMGLAVRQAPLIIPLKATSTPVSIKQYPMSQEARLGIKPHIQRLLDQGILVPCQSPWNTPLLPVKKPGTNDYRPVQDLREVNKRVEDIHPTVPNPYNLLSGLPPSHQWYTVLDLKDAFFCLRLHPTSQSLFAFEWRDPEMGISGQLTWTRLPQGFKNSPTLFNEALHRDLADFRIQHPDLILLQYVDDLLLAATSELDCQQGTRALLQTLGDLGYRASAKKAQICQKQVKYLGYLLKEGQRWLTEARKETVMGQPTPKTPRQLREFLGKAGFCRLFIPGFAEMAAPLYPLTKPGTLFEWGPDQQKAYQEIKQALLTAPALGLPDLTKPFELFVDEKQGYAKGVLTQKLGPWRRPVAYLSKKLDPVAAGWPPCLRMVAAIAVLTKDAGKLTMGQPLVILAPHAVEALVKQPPDRWLSNARMTHYQALLLDTDRVQFGPIVALNPATLLPLPEEGLQHDCLDILAEAHGTRPDLTDQPLPDADHTWYTDGSSFLQEGQRKAGAAVTTETEVVWAKALPAGTSAQRAELIALTQALKMAEGKKLNVYTDSRYAFATAHIHGEIYRRRGWLTSEGKEIKNKDEILALLKALFLPKRLSIIHCPGHQKGNRAEARGNRMADQAAREVATRETPETSTLLAGKRTADGSEFEKRTADGSEFESPKKKAKVE

SEQ ID NO: 2578 - protein, 2096 aa, synthetic construct
MPAAKRVKLDGGDKKYSIGLDIGTNSVGWAVITDEYKVPSKKFKVLGNTDRHSIKKNLIGALLFDSGETAEATRLKRTARRRYTRRKNRICYLQEIFSNEMAKVDDSFFHRLEESFLVEEDKKHERHPIFGNIVDEVAYHEKYPTIYHLRKKLVDSTDKADLRLIYLALAHMIKFRGHFLIEGDLNPDNSDVDKLFIQLVQTYNQLFEENPINASGVDAKAILSARLSKSRRLENLIAQLPGEKKNGLFGNLIALSLGLTPNFKSNFDLAEDAKLQLSKDTYDDDLDNLLAQIGDQYADLFLAAKNLSDAILLSDILRVNTEITKAPLSASMIKRYDEHHQDLTLLKALVRQQLPEKYKEIFFDQSKNGYAGYIDGGASQEEFYKFIKPILEKMDGTEELLVKLNREDLLRKQRTFDNGSIPHQIHLGELHAILRRQEDFYPFLKDNREKIEKILTFRIPYYVGPLARGNSRFAWMTRKSEETITPWNFEEVVDKGASAQSFIERMTNFDKNLPNEKVLPKHSLLYEYFTVYNELTKVKYVTEGMRKPAFLSGEQKKAIVDLLFKTNRKVTVKQLKEDYFKKIECFDSVEISGVEDRFNASLGTYHDLLKIIKDKDFLDNEENEDILEDIVLTLTLFEDREMIEERLKTYAHLFDDKVMKQLKRRRYTGWGRLSRKLINGIRDKQSGKTILDFLKSDGFANRNFMQLIHDDSLTFKEDIQKAQVSGQGDSLHEHIANLAGSPAIKKGILQTVKVVDELVKVMGRHKPENIVIEMARENQTTQKGQKNSRERMKRIEEGIKELGSQILKEHPVENTQLQNEKLYLYYLQNGRDMYVDQELDINRLSDYDVDHIVPQSFLKDDSIDNKVLTRSDKARGKSDNVPSEEVVKKMKNYWRQLLNAKLITQRKFDNLTKAERGGLSELDKAGFIKRQLVETRQITKHVAQILDSRMNTKYDENDKLIREVKVITLKSKLVSDFRKDFQFYKVREINNYHHAHDAYLNAVVGTALIKKYPKLESEFVYGDYKVYDVRKMIAKSEQEIGKATAKYFFYSNIMNFFKTEITLANGEIRKRPLIETNGETGEIVWDKGRDFATVRKVLSMPQVNIVKKTEVQTGGFSKESILPKRNSDKLIARKKDWDPKKYGGFDSPTVAYSVLVVAKVEKGKSKKLKSVKELLGITIMERSSFEKNPIDFLEAKGYKEVKKDLIIKLPKYSLFELENGRKRMLASAGELQKGNELALPSKYVNFLYLASHYEKLKGSPEDNEQKQLFVEQHKHYLDEIIEQISEFSKRVILADANLDKVLSAYNKHRDKPIREQAENIIHLFTLTNLGAPAAFKYFDTTIDRKRYTSTKEVLDATLIHQSITGLYETRIDLSQLGGDGGGGSEAAAKGGGGGTLNIEDEYRLHETSKGPDVPLGSTWLSDFPQAWAETGGMGLAVRQAPLIIPLKATSTPVSIKQYPMSQEARLGIKPHIQRLLDQGILVPCQSPWNTPLLPVKKPGTNDYRPVQDLREVNKRVEDIHPTVPNPYNLLSGLPPSHQWYTVLDLKDAFFCLRLHPTSQSLFAFEWRDPEMGISGQLTWTRLPQGFKNSPTLFNEALHRDLADFRIQHPDLILLQYVDDLLLAATSELDCQQGTRALLQTLGDLGYRASAKKAQICQKQVKYLGYLLKEGQRWLTEARKETVMGQPTPKTPRQLREFLGKAGFCRLFIPGFAEMAAPLYPLTKPGTLFEWGPDQQKAYQEIKQALLTAPALGLPDLTKPFELFVDEKQGYAKGVLTQKLGPWRRPVAYLSKKLDPVAAGWPPCLRMVAAIAVLTKDAGKLTMGQPLVILAPHAVEALVKQPPDRWLSNARMTHYQALLLDTDRVQFGPIVALNPATLLPLPEEGLQHDCLDILAEAHGTRPDLTDQPLPDADHTWYTDGSSFLQEGQRKAGAAVTTETEVVWAKALPAGTSAQRAELIALTQALKMAEGKKLNVYTDSRYAFATAHIHGEIYRRRGWLTSEGKEIKNKDEILALLKALFLPKRLSIIHCPGHQKGNRAEARGNRMADQAAREVATRETPETSTLLAGKRTADGSEFEKRTADGSEFESPKKKAKVE

SEQ ID NO: 2579 - protein, 2090 aa, synthetic construct
MPAAKRVKLDGGDKKYSIGLDIGTNSVGWAVITDEYKVPSKKFKVLGNTDRHSIKKNLIGALLFDSGETAEATRLKRTARRRYTRRKNRICYLQEIFSNEMAKVDDSFFHRLEESFLVEEDKKHERHPIFGNIVDEVAYHEKYPTIYHLRKKLVDSTDKADLRLIYLALAHMIKFRGHFLIEGDLNPDNSDVDKLFIQLVQTYNQLFEENPINASGVDAKAILSARLSKSRRLENLIAQLPGEKKNGLFGNLIALSLGLTPNFKSNFDLAEDAKLQLSKDTYDDDLDNLLAQIGDQYADLFLAAKNLSDAILLSDILRVNTEITKAPLSASMIKRYDEHHQDLTLLKALVRQQLPEKYKEIFFDQSKNGYAGYIDGGASQEEFYKFIKPILEKMDGTEELLVKLNREDLLRKQRTFDNGSIPHQIHLGELHAILRRQEDFYPFLKDNREKIEKILTFRIPYYVGPLARGNSRFAWMTRKSEETITPWNFEEVVDKGASAQSFIERMTNFDKNLPNEKVLPKHSLLYEYFTVYNELTKVKYVTEGMRKPAFLSGEQKKAIVDLLFKTNRKVTVKQLKEDYFKKIECFDSVEISGVEDRFNASLGTYHDLLKIIKDKDFLDNEENEDILEDIVLTLTLFEDREMIEERLKTYAHLFDDKVMKQLKRRRYTGWGRLSRKLINGIRDKQSGKTILDFLKSDGFANRNFMQLIHDDSLTFKEDIQKAQVSGQGDSLHEHIANLAGSPAIKKGILQTVKVVDELVKVMGRHKPENIVIEMARENQTTQKGQKNSRERMKRIEEGIKELGSQILKEHPVENTQLQNEKLYLYYLQNGRDMYVDQELDINRLSDYDVDHIVPQSFLKDDSIDNKVLTRSDKARGKSDNVPSEEVVKKMKNYWRQLLNAKLITQRKFDNLTKAERGGLSELDKAGFIKRQLVETRQITKHVAQILDSRMNTKYDENDKLIREVKVITLKSKLVSDFRKDFQFYKVREINNYHHAHDAYLNAVVGTALIKKYPKLESEFVYGDYKVYDVRKMIAKSEQEIGKATAKYFFYSNIMNFFKTEITLANGEIRKRPLIETNGETGEIVWDKGRDFATVRKVLSMPQVNIVKKTEVQTGGFSKESILPKRNSDKLIARKKDWDPKKYGGFDSPTVAYSVLVVAKVEKGKSKKLKSVKELLGITIMERSSFEKNPIDFLEAKGYKEVKKDLIIKLPKYSLFELENGRKRMLASAGELQKGNELALPSKYVNFLYLASHYEKLKGSPEDNEQKQLFVEQHKHYLDEIIEQISEFSKRVILADANLDKVLSAYNKHRDKPIREQAENIIHLFTLTNLGAPAAFKYFDTTIDRKRYTSTKEVLDATLIHQSITGLYETRIDLSQLGGDGGGGGGGGGTLNIEDEYRLHETSKGPDVPLGSTWLSDFPQAWAETGGMGLAVRQAPLIIPLKATSTPVSIKQYPMSQEARLGIKPHIQRLLDQGILVPCQSPWNTPLLPVKKPGTNDYRPVQDLREVNKRVEDIHPTVPNPYNLLSGLPPSHQWYTVLDLKDAFFCLRLHPTSQSLFAFEWRDPEMGISGQLTWTRLPQGFKNSPTLFNEALHRDLADFRIQHPDLILLQYVDDLLLAATSELDCQQGTRALLQTLGDLGYRASAKKAQICQKQVKYLGYLLKEGQRWLTEARKETVMGQPTPKTPRQLREFLGKAGFCRLFIPGFAEMAAPLYPLTKPGTLFEWGPDQQKAYQEIKQALLTAPALGLPDLTKPFELFVDEKQGYAKGVLTQKLGPWRRPVAYLSKKLDPVAAGWPPCLRMVAAIAVLTKDAGKLTMGQPLVILAPHAVEALVKQPPDRWLSNARMTHYQALLLDTDRVQFGPIVALNPATLLPLPEEGLQHDCLDILAEAHGTRPDLTDQPLPDADHTWYTDGSSFLQEGQRKAGAAVTTETEVVWAKALPAGTSAQRAELIALTQALKMAEGKKLNVYTDSRYAFATAHIHGEIYRRRGWLTSEGKEIKNKDEILALLKALFLPKRLSIIHCPGHQKGNRAEARGNRMADQAAREVATRETPETSTLLAGKRTADGSEFEKRTADGSEFESPKKKAKVE

SEQ ID NO: 2580 - protein, 2094 aa, synthetic construct
MPAAKRVKLDGGDKKYSIGLDIGTNSVGWAVITDEYKVPSKKFKVLGNTDRHSIKKNLIGALLFDSGETAEATRLKRTARRRYTRRKNRICYLQEIFSNEMAKVDDSFFHRLEESFLVEEDKKHERHPIFGNIVDEVAYHEKYPTIYHLRKKLVDSTDKADLRLIYLALAHMIKFRGHFLIEGDLNPDNSDVDKLFIQLVQTYNQLFEENPINASGVDAKAILSARLSKSRRLENLIAQLPGEKKNGLFGNLIALSLGLTPNFKSNFDLAEDAKLQLSKDTYDDDLDNLLAQIGDQYADLFLAAKNLSDAILLSDILRVNTEITKAPLSASMIKRYDEHHQDLTLLKALVRQQLPEKYKEIFFDQSKNGYAGYIDGGASQEEFYKFIKPILEKMDGTEELLVKLNREDLLRKQRTFDNGSIPHQIHLGELHAILRRQEDFYPFLKDNREKIEKILTFRIPYYVGPLARGNSRFAWMTRKSEETITPWNFEEVVDKGASAQSFIERMTNFDKNLPNEKVLPKHSLLYEYFTVYNELTKVKYVTEGMRKPAFLSGEQKKAIVDLLFKTNRKVTVKQLKEDYFKKIECFDSVEISGVEDRFNASLGTYHDLLKIIKDKDFLDNEENEDILEDIVLTLTLFEDREMIEERLKTYAHLFDDKVMKQLKRRRYTGWGRLSRKLINGIRDKQSGKTILDFLKSDGFANRNFMQLIHDDSLTFKEDIQKAQVSGQGDSLHEHIANLAGSPAIKKGILQTVKVVDELVKVMGRHKPENIVIEMARENQTTQKGQKNSRERMKRIEEGIKELGSQILKEHPVENTQLQNEKLYLYYLQNGRDMYVDQELDINRLSDYDVDHIVPQSFLKDDSIDNKVLTRSDKARGKSDNVPSEEVVKKMKNYWRQLLNAKLITQRKFDNLTKAERGGLSELDKAGFIKRQLVETRQITKHVAQILDSRMNTKYDENDKLIREVKVITLKSKLVSDFRKDFQFYKVREINNYHHAHDAYLNAVVGTALIKKYPKLESEFVYGDYKVYDVRKMIAKSEQEIGKATAKYFFYSNIMNFFKTEITLANGEIRKRPLIETNGETGEIVWDKGRDFATVRKVLSMPQVNIVKKTEVQTGGFSKESILPKRNSDKLIARKKDWDPKKYGGFDSPTVAYSVLVVAKVEKGKSKKLKSVKELLGITIMERSSFEKNPIDFLEAKGYKEVKKDLIIKLPKYSLFELENGRKRMLASAGELQKGNELALPSKYVNFLYLASHYEKLKGSPEDNEQKQLFVEQHKHYLDEIIEQISEFSKRVILADANLDKVLSAYNKHRDKPIREQAENIIHLFTLTNLGAPAAFKYFDTTIDRKRYTSTKEVLDATLIHQSITGLYETRIDLSQLGGDGGGSSPAPGGGGGTLNIEDEYRLHETSKGPDVPLGSTWLSDFPQAWAETGGMGLAVRQAPLIIPLKATSTPVSIKQYPMSQEARLGIKPHIQRLLDQGILVPCQSPWNTPLLPVKKPGTNDYRPVQDLREVNKRVEDIHPTVPNPYNLLSGLPPSHQWYTVLDLKDAFFCLRLHPTSQSLFAFEWRDPEMGISGQLTWTRLPQGFKNSPTLFNEALHRDLADFRIQHPDLILLQYVDDLLLAATSELDCQQGTRALLQTLGDLGYRASAKKAQICQKQVKYLGYLLKEGQRWLTEARKETVMGQPTPKTPRQLREFLGKAGFCRLFIPGFAEMAAPLYPLTKPGTLFEWGPDQQKAYQEIKQALLTAPALGLPDLTKPFELFVDEKQGYAKGVLTQKLGPWRRPVAYLSKKLDPVAAGWPPCLRMVAAIAVLTKDAGKLTMGQPLVILAPHAVEALVKQPPDRWLSNARMTHYQALLLDTDRVQFGPIVALNPATLLPLPEEGLQHDCLDILAEAHGTRPDLTDQPLPDADHTWYTDGSSFLQEGQRKAGAAVTTETEVVWAKALPAGTSAQRAELIALTQALKMAEGKKLNVYTDSRYAFATAHIHGEIYRRRGWLTSEGKEIKNKDEILALLKALFLPKRLSIIHCPGHQKGNRAEARGNRMADQAAREVATRETPETSTLLAGKRTADGSEFEKRTADGSEFESPKKKAKVE

SEQ ID NO: 2581 - protein, 2094 aa, synthetic construct
MPAAKRVKLDGGDKKYSIGLDIGTNSVGWAVITDEYKVPSKKFKVLGNTDRHSIKKNLIGALLFDSGETAEATRLKRTARRRYTRRKNRICYLQEIFSNEMAKVDDSFFHRLEESFLVEEDKKHERHPIFGNIVDEVAYHEKYPTIYHLRKKLVDSTDKADLRLIYLALAHMIKFRGHFLIEGDLNPDNSDVDKLFIQLVQTYNQLFEENPINASGVDAKAILSARLSKSRRLENLIAQLPGEKKNGLFGNLIALSLGLTPNFKSNFDLAEDAKLQLSKDTYDDDLDNLLAQIGDQYADLFLAAKNLSDAILLSDILRVNTEITKAPLSASMIKRYDEHHQDLTLLKALVRQQLPEKYKEIFFDQSKNGYAGYIDGGASQEEFYKFIKPILEKMDGTEELLVKLNREDLLRKQRTFDNGSIPHQIHLGELHAILRRQEDFYPFLKDNREKIEKILTFRIPYYVGPLARGNSRFAWMTRKSEETITPWNFEEVVDKGASAQSFIERMTNFDKNLPNEKVLPKHSLLYEYFTVYNELTKVKYVTEGMRKPAFLSGEQKKAIVDLLFKTNRKVTVKQLKEDYFKKIECFDSVEISGVEDRFNASLGTYHDLLKIIKDKDFLDNEENEDILEDIVLTLTLFEDREMIEERLKTYAHLFDDKVMKQLKRRRYTGWGRLSRKLINGIRDKQSGKTILDFLKSDGFANRNFMQLIHDDSLTFKEDIQKAQVSGQGDSLHEHIANLAGSPAIKKGILQTVKVVDELVKVMGRHKPENIVIEMARENQTTQKGQKNSRERMKRIEEGIKELGSQILKEHPVENTQLQNEKLYLYYLQNGRDMYVDQELDINRLSDYDVDHIVPQSFLKDDSIDNKVLTRSDKARGKSDNVPSEEVVKKMKNYWRQLLNAKLITQRKFDNLTKAERGGLSELDKAGFIKRQLVETRQITKHVAQILDSRMNTKYDENDKLIREVKVITLKSKLVSDFRKDFQFYKVREINNYHHAHDAYLNAVVGTALIKKYPKLESEFVYGDYKVYDVRKMIAKSEQEIGKATAKYFFYSNIMNFFKTEITLANGEIRKRPLIETNGETGEIVWDKGRDFATVRKVLSMPQVNIVKKTEVQTGGFSKESILPKRNSDKLIARKKDWDPKKYGGFDSPTVAYSVLVVAKVEKGKSKKLKSVKELLGITIMERSSFEKNPIDFLEAKGYKEVKKDLIIKLPKYSLFELENGRKRMLASAGELQKGNELALPSKYVNFLYLASHYEKLKGSPEDNEQKQLFVEQHKHYLDEIIEQISEFSKRVILADANLDKVLSAYNKHRDKPIREQAENIIHLFTLTNLGAPAAFKYFDTTIDRKRYTSTKEVLDATLIHQSITGLYETRIDLSQLGGDGGPAPGSSGGSGGTLNIEDEYRLHETSKGPDVPLGSTWLSDFPQAWAETGGMGLAVRQAPLIIPLKATSTPVSIKQYPMSQEARLGIKPHIQRLLDQGILVPCQSPWNTPLLPVKKPGTNDYRPVQDLREVNKRVEDIHPTVPNPYNLLSGLPPSHQWYTVLDLKDAFFCLRLHPTSQSLFAFEWRDPEMGISGQLTWTRLPQGFKNSPTLFNEALHRDLADFRIQHPDLILLQYVDDLLLAATSELDCQQGTRALLQTLGDLGYRASAKKAQICQKQVKYLGYLLKEGQRWLTEARKETVMGQPTPKTPRQLREFLGKAGFCRLFIPGFAEMAAPLYPLTKPGTLFEWGPDQQKAYQEIKQALLTAPALGLPDLTKPFELFVDEKQGYAKGVLTQKLGPWRRPVAYLSKKLDPVAAGWPPCLRMVAAIAVLTKDAGKLTMGQPLVILAPHAVEALVKQPPDRWLSNARMTHYQALLLDTDRVQFGPIVALNPATLLPLPEEGLQHDCLDILAEAHGTRPDLTDQPLPDADHTWYTDGSSFLQEGQRKAGAAVTTETEVVWAKALPAGTSAQRAELIALTQALKMAEGKKLNVYTDSRYAFATAHIHGEIYRRRGWLTSEGKEIKNKDEILALLKALFLPKRLSIIHCPGHQKGNRAEARGNRMADQAAREVATRETPETSTLLAGKRTADGSEFEKRTADGSEFESPKKKAKVE

SEQ ID NO: 2582 - protein, 2096 aa, synthetic construct
MPAAKRVKLDGGDKKYSIGLDIGTNSVGWAVITDEYKVPSKKFKVLGNTDRHSIKKNLIGALLFDSGETAEATRLKRTARRRYTRRKNRICYLQEIFSNEMAKVDDSFFHRLEESFLVEEDKKHERHPIFGNIVDEVAYHEKYPTIYHLRKKLVDSTDKADLRLIYLALAHMIKFRGHFLIEGDLNPDNSDVDKLFIQLVQTYNQLFEENPINASGVDAKAILSARLSKSRRLENLIAQLPGEKKNGLFGNLIALSLGLTPNFKSNFDLAEDAKLQLSKDTYDDDLDNLLAQIGDQYADLFLAAKNLSDAILLSDILRVNTEITKAPLSASMIKRYDEHHQDLTLLKALVRQQLPEKYKEIFFDQSKNGYAGYIDGGASQEEFYKFIKPILEKMDGTEELLVKLNREDLLRKQRTFDNGSIPHQIHLGELHAILRRQEDFYPFLKDNREKIEKILTFRIPYYVGPLARGNSRFAWMTRKSEETITPWNFEEVVDKGASAQSFIERMTNFDKNLPNEKVLPKHSLLYEYFTVYNELTKVKYVTEGMRKPAFLSGEQKKAIVDLLFKTNRKVTVKQLKEDYFKKIECFDSVEISGVEDRFNASLGTYHDLLKIIKDKDFLDNEENEDILEDIVLTLTLFEDREMIEERLKTYAHLFDDKVMKQLKRRRYTGWGRLSRKLINGIRDKQSGKTILDFLKSDGFANRNFMQLIHDDSLTFKEDIQKAQVSGQGDSLHEHIANLAGSPAIKKGILQTVKVVDELVKVMGRHKPENIVIEMARENQTTQKGQKNSRERMKRIEEGIKELGSQILKEHPVENTQLQNEKLYLYYLQNGRDMYVDQELDINRLSDYDVDHIVPQSFLKDDSIDNKVLTRSDKARGKSDNVPSEEVVKKMKNYWRQLLNAKLITQRKFDNLTKAERGGLSELDKAGFIKRQLVETRQITKHVAQILDSRMNTKYDENDKLIREVKVITLKSKLVSDFRKDFQFYKVREINNYHHAHDAYLNAVVGTALIKKYPKLESEFVYGDYKVYDVRKMIAKSEQEIGKATAKYFFYSNIMNFFKTEITLANGEIRKRPLIETNGETGEIVWDKGRDFATVRKVLSMPQVNIVKKTEVQTGGFSKESILPKRNSDKLIARKKDWDPKKYGGFDSPTVAYSVLVVAKVEKGKSKKLKSVKELLGITIMERSSFEKNPIDFLEAKGYKEVKKDLIIKLPKYSLFELENGRKRMLASAGELQKGNELALPSKYVNFLYLASHYEKLKGSPEDNEQKQLFVEQHKHYLDEIIEQISEFSKRVILADANLDKVLSAYNKHRDKPIREQAENIIHLFTLTNLGAPAAFKYFDTTIDRKRYTSTKEVLDATLIHQSITGLYETRIDLSQLGGDGGEAAAKGGGGGSGGTLNIEDEYRLHETSKGPDVPLGSTWLSDFPQAWAETGGMGLAVRQAPLIIPLKATSTPVSIKQYPMSQEARLGIKPHIQRLLDQGILVPCQSPWNTPLLPVKKPGTNDYRPVQDLREVNKRVEDIHPTVPNPYNLLSGLPPSHQWYTVLDLKDAFFCLRLHPTSQSLFAFEWRDPEMGISGQLTWTRLPQGFKNSPTLFNEALHRDLADFRIQHPDLILLQYVDDLLLAATSELDCQQGTRALLQTLGDLGYRASAKKAQICQKQVKYLGYLLKEGQRWLTEARKETVMGQPTPKTPRQLREFLGKAGFCRLFIPGFAEMAAPLYPLTKPGTLFEWGPDQQKAYQEIKQALLTAPALGLPDLTKPFELFVDEKQGYAKGVLTQKLGPWRRPVAYLSKKLDPVAAGWPPCLRMVAAIAVLTKDAGKLTMGQPLVILAPHAVEALVKQPPDRWLSNARMTHYQALLLDTDRVQFGPIVALNPATLLPLPEEGLQHDCLDILAEAHGTRPDLTDQPLPDADHTWYTDGSSFLQEGQRKAGAAVTTETEVVWAKALPAGTSAQRAELIALTQALKMAEGKKLNVYTDSRYAFATAHIHGEIYRRRGWLTSEGKEIKNKDEILALLKALFLPKRLSIIHCPGHQKGNRAEARGNRMADQAAREVATRETPETSTLLAGKRTADGSEFEKRTADGSEFESPKKKAKVE

SEQ ID NO: 2583 - protein, 2097 aa, synthetic construct
MPAAKRVKLDGGDKKYSIGLDIGTNSVGWAVITDEYKVPSKKFKVLGNTDRHSIKKNLIGALLFDSGETAEATRLKRTARRRYTRRKNRICYLQEIFSNEMAKVDDSFFHRLEESFLVEEDKKHERHPIFGNIVDEVAYHEKYPTIYHLRKKLVDSTDKADLRLIYLALAHMIKFRGHFLIEGDLNPDNSDVDKLFIQLVQTYNQLFEENPINASGVDAKAILSARLSKSRRLENLIAQLPGEKKNGLFGNLIALSLGLTPNFKSNFDLAEDAKLQLSKDTYDDDLDNLLAQIGDQYADLFLAAKNLSDAILLSDILRVNTEITKAPLSASMIKRYDEHHQDLTLLKALVRQQLPEKYKEIFFDQSKNGYAGYIDGGASQEEFYKFIKPILEKMDGTEELLVKLNREDLLRKQRTFDNGSIPHQIHLGELHAILRRQEDFYPFLKDNREKIEKILTFRIPYYVGPLARGNSRFAWMTRKSEETITPWNFEEVVDKGASAQSFIERMTNFDKNLPNEKVLPKHSLLYEYFTVYNELTKVKYVTEGMRKPAFLSGEQKKAIVDLLFKTNRKVTVKQLKEDYFKKIECFDSVEISGVEDRFNASLGTYHDLLKIIKDKDFLDNEENEDILEDIVLTLTLFEDREMIEERLKTYAHLFDDKVMKQLKRRRYTGWGRLSRKLINGIRDKQSGKTILDFLKSDGFANRNFMQLIHDDSLTFKEDIQKAQVSGQGDSLHEHIANLAGSPAIKKGILQTVKVVDELVKVMGRHKPENIVIEMARENQTTQKGQKNSRERMKRIEEGIKELGSQILKEHPVENTQLQNEKLYLYYLQNGRDMYVDQELDINRLSDYDVDHIVPQSFLKDDSIDNKVLTRSDKARGKSDNVPSEEVVKKMKNYWRQLLNAKLITQRKFDNLTKAERGGLSELDKAGFIKRQLVETRQITKHVAQILDSRMNTKYDENDKLIREVKVITLKSKLVSDFRKDFQFYKVREINNYHHAHDAYLNAVVGTALIKKYPKLESEFVYGDYKVYDVRKMIAKSEQEIGKATAKYFFYSNIMNFFKTEITLANGEIRKRPLIETNGETGEIVWDKGRDFATVRKVLSMPQVNIVKKTEVQTGGFSKESILPKRNSDKLIARKKDWDPKKYGGFDSPTVAYSVLVVAKVEKGKSKKLKSVKELLGITIMERSSFEKNPIDFLEAKGYKEVKKDLIIKLPKYSLFELENGRKRMLASAGELQKGNELALPSKYVNFLYLASHYEKLKGSPEDNEQKQLFVEQHKHYLDEIIEQISEFSKRVILADANLDKVLSAYNKHRDKPIREQAENIIHLFTLTNLGAPAAFKYFDTTIDRKRYTSTKEVLDATLIHQSITGLYETRIDLSQLGGDGGGSAGSAAGSGEFGGTLNIEDEYRLHETSKGPDVPLGSTWLSDFPQAWAETGGMGLAVRQAPLIIPLKATSTPVSIKQYPMSQEARLGIKPHIQRLLDQGILVPCQSPWNTPLLPVKKPGTNDYRPVQDLREVNKRVEDIHPTVPNPYNLLSGLPPSHQWYTVLDLKDAFFCLRLHPTSQSLFAFEWRDPEMGISGQLTWTRLPQGFKNSPTLFNEALHRDLADFRIQHPDLILLQYVDDLLLAATSELDCQQGTRALLQTLGDLGYRASAKKAQICQKQVKYLGYLLKEGQRWLTEARKETVMGQPTPKTPRQLREFLGKAGFCRLFIPGFAEMAAPLYPLTKPGTLFEWGPDQQKAYQEIKQALLTAPALGLPDLTKPFELFVDEKQGYAKGVLTQKLGPWRRPVAYLSKKLDPVAAGWPPCLRMVAAIAVLTKDAGKLTMGQPLVILAPHAVEALVKQPPDRWLSNARMTHYQALLLDTDRVQFGPIVALNPATLLPLPEEGLQHDCLDILAEAHGTRPDLTDQPLPDADHTWYTDGSSFLQEGQRKAGAAVTTETEVVWAKALPAGTSAQRAELIALTQALKMAEGKKLNVYTDSRYAFATAHIHGEIYRRRGWLTSEGKEIKNKDEILALLKALFLPKRLSIIHCPGHQKGNRAEARGNRMADQAAREVATRETPETSTLLAGKRTADGSEFEKRTADGSEFESPKKKAKVE

SEQ ID NO: 2584 - protein, 2093 aa, synthetic construct
MPAAKRVKLDGGDKKYSIGLDIGTNSVGWAVITDEYKVPSKKFKVLGNTDRHSIKKNLIGALLFDSGETAEATRLKRTARRRYTRRKNRICYLQEIFSNEMAKVDDSFFHRLEESFLVEEDKKHERHPIFGNIVDEVAYHEKYPTIYHLRKKLVDSTDKADLRLIYLALAHMIKFRGHFLIEGDLNPDNSDVDKLFIQLVQTYNQLFEENPINASGVDAKAILSARLSKSRRLENLIAQLPGEKKNGLFGNLIALSLGLTPNFKSNFDLAEDAKLQLSKDTYDDDLDNLLAQIGDQYADLFLAAKNLSDAILLSDILRVNTEITKAPLSASMIKRYDEHHQDLTLLKALVRQQLPEKYKEIFFDQSKNGYAGYIDGGASQEEFYKFIKPILEKMDGTEELLVKLNREDLLRKQRTFDNGSIPHQIHLGELHAILRRQEDFYPFLKDNREKIEKILTFRIPYYVGPLARGNSRFAWMTRKSEETITPWNFEEVVDKGASAQSFIERMTNFDKNLPNEKVLPKHSLLYEYFTVYNELTKVKYVTEGMRKPAFLSGEQKKAIVDLLFKTNRKVTVKQLKEDYFKKIECFDSVEISGVEDRFNASLGTYHDLLKIIKDKDFLDNEENEDILEDIVLTLTLFEDREMIEERLKTYAHLFDDKVMKQLKRRRYTGWGRLSRKLINGIRDKQSGKTILDFLKSDGFANRNFMQLIHDDSLTFKEDIQKAQVSGQGDSLHEHIANLAGSPAIKKGILQTVKVVDELVKVMGRHKPENIVIEMARENQTTQKGQKNSRERMKRIEEGIKELGSQILKEHPVENTQLQNEKLYLYYLQNGRDMYVDQELDINRLSDYDVDHIVPQSFLKDDSIDNKVLTRSDKARGKSDNVPSEEVVKKMKNYWRQLLNAKLITQRKFDNLTKAERGGLSELDKAGFIKRQLVETRQITKHVAQILDSRMNTKYDENDKLIREVKVITLKSKLVSDFRKDFQFYKVREINNYHHAHDAYLNAVVGTALIKKYPKLESEFVYGDYKVYDVRKMIAKSEQEIGKATAKYFFYSNIMNFFKTEITLANGEIRKRPLIETNGETGEIVWDKGRDFATVRKVLSMPQVNIVKKTEVQTGGFSKESILPKRNSDKLIARKKDWDPKKYGGFDSPTVAYSVLVVAKVEKGKSKKLKSVKELLGITIMERSSFEKNPIDFLEAKGYKEVKKDLIIKLPKYSLFELENGRKRMLASAGELQKGNELALPSKYVNFLYLASHYEKLKGSPEDNEQKQLFVEQHKHYLDEIIEQISEFSKRVILADANLDKVLSAYNKHRDKPIREQAENIIHLFTLTNLGAPAAFKYFDTTIDRKRYTSTKEVLDATLIHQSITGLYETRIDLSQLGGDGGEAAAKGGSGGTLNIEDEYRLHETSKGPDVPLGSTWLSDFPQAWAETGGMGLAVRQAPLIIPLKATSTPVSIKQYPMSQEARLGIKPHIQRLLDQGILVPCQSPWNTPLLPVKKPGTNDYRPVQDLREVNKRVEDIHPTVPNPYNLLSGLPPSHQWYTVLDLKDAFFCLRLHPTSQSLFAFEWRDPEMGISGQLTWTRLPQGFKNSPTLFNEALHRDLADFRIQHPDLILLQYVDDLLLAATSELDCQQGTRALLQTLGDLGYRASAKKAQICQKQVKYLGYLLKEGQRWLTEARKETVMGQPTPKTPRQLREFLGKAGFCRLFIPGFAEMAAPLYPLTKPGTLFEWGPDQQKAYQEIKQALLTAPALGLPDLTKPFELFVDEKQGYAKGVLTQKLGPWRRPVAYLSKKLDPVAAGWPPCLRMVAAIAVLTKDAGKLTMGQPLVILAPHAVEALVKQPPDRWLSNARMTHYQALLLDTDRVQFGPIVALNPATLLPLPEEGLQHDCLDILAEAHGTRPDLTDQPLPDADHTWYTDGSSFLQEGQRKAGAAVTTETEVVWAKALPAGTSAQRAELIALTQALKMAEGKKLNVYTDSRYAFATAHIHGEIYRRRGWLTSEGKEIKNKDEILALLKALFLPKRLSIIHCPGHQKGNRAEARGNRMADQAAREVATRETPETSTLLAGKRTADGSEFEKRTADGSEFESPKKKAKVE

SEQ ID NO: 2585 - protein, 2093 aa, synthetic construct
MPAAKRVKLDGGDKKYSIGLDIGTNSVGWAVITDEYKVPSKKFKVLGNTDRHSIKKNLIGALLFDSGETAEATRLKRTARRRYTRRKNRICYLQEIFSNEMAKVDDSFFHRLEESFLVEEDKKHERHPIFGNIVDEVAYHEKYPTIYHLRKKLVDSTDKADLRLIYLALAHMIKFRGHFLIEGDLNPDNSDVDKLFIQLVQTYNQLFEENPINASGVDAKAILSARLSKSRRLENLIAQLPGEKKNGLFGNLIALSLGLTPNFKSNFDLAEDAKLQLSKDTYDDDLDNLLAQIGDQYADLFLAAKNLSDAILLSDILRVNTEITKAPLSASMIKRYDEHHQDLTLLKALVRQQLPEKYKEIFFDQSKNGYAGYIDGGASQEEFYKFIKPILEKMDGTEELLVKLNREDLLRKQRTFDNGSIPHQIHLGELHAILRRQEDFYPFLKDNREKIEKILTFRIPYYVGPLARGNSRFAWMTRKSEETITPWNFEEVVDKGASAQSFIERMTNFDKNLPNEKVLPKHSLLYEYFTVYNELTKVKYVTEGMRKPAFLSGEQKKAIVDLLFKTNRKVTVKQLKEDYFKKIECFDSVEISGVEDRFNASLGTYHDLLKIIKDKDFLDNEENEDILEDIVLTLTLFEDREMIEERLKTYAHLFDDKVMKQLKRRRYTGWGRLSRKLINGIRDKQSGKTILDFLKSDGFANRNFMQLIHDDSLTFKEDIQKAQVSGQGDSLHEHIANLAGSPAIKKGILQTVKVVDELVKVMGRHKPENIVIEMARENQTTQKGQKNSRERMKRIEEGIKELGSQILKEHPVENTQLQNEKLYLYYLQNGRDMYVDQELDINRLSDYDVDHIVPQSFLKDDSIDNKVLTRSDKARGKSDNVPSEEVVKKMKNYWRQLLNAKLITQRKFDNLTKAERGGLSELDKAGFIKRQLVETRQITKHVAQILDSRMNTKYDENDKLIREVKVITLKSKLVSDFRKDFQFYKVREINNYHHAHDAYLNAVVGTALIKKYPKLESEFVYGDYKVYDVRKMIAKSEQEIGKATAKYFFYSNIMNFFKTEITLANGEIRKRPLIETNGETGEIVWDKGRDFATVRKVLSMPQVNIVKKTEVQTGGFSKESILPKRNSDKLIARKKDWDPKKYGGFDSPTVAYSVLVVAKVEKGKSKKLKSVKELLGITIMERSSFEKNPIDFLEAKGYKEVKKDLIIKLPKYSLFELENGRKRMLASAGELQKGNELALPSKYVNFLYLASHYEKLKGSPEDNEQKQLFVEQHKHYLDEIIEQISEFSKRVILADANLDKVLSAYNKHRDKPIREQAENIIHLFTLTNLGAPAAFKYFDTTIDRKRYTSTKEVLDATLIHQSITGLYETRIDLSQLGGDGGEAAAKGSSGGTLNIEDEYRLHETSKGPDVPLGSTWLSDFPQAWAETGGMGLAVRQAPLIIPLKATSTPVSIKQYPMSQEARLGIKPHIQRLLDQGILVPCQSPWNTPLLPVKKPGTNDYRPVQDLREVNKRVEDIHPTVPNPYNLLSGLPPSHQWYTVLDLKDAFFCLRLHPTSQSLFAFEWRDPEMGISGQLTWTRLPQGFKNSPTLFNEALHRDLADFRIQHPDLILLQYVDDLLLAATSELDCQQGTRALLQTLGDLGYRASAKKAQICQKQVKYLGYLLKEGQRWLTEARKETVMGQPTPKTPRQLREFLGKAGFCRLFIPGFAEMAAPLYPLTKPGTLFEWGPDQQKAYQEIKQALLTAPALGLPDLTKPFELFVDEKQGYAKGVLTQKLGPWRRPVAYLSKKLDPVAAGWPPCLRMVAAIAVLTKDAGKLTMGQPLVILAPHAVEALVKQPPDRWLSNARMTHYQALLLDTDRVQFGPIVALNPATLLPLPEEGLQHDCLDILAEAHGTRPDLTDQPLPDADHTWYTDGSSFLQEGQRKAGAAVTTETEVVWAKALPAGTSAQRAELIALTQALKMAEGKKLNVYTDSRYAFATAHIHGEIYRRRGWLTSEGKEIKNKDEILALLKALFLPKRLSIIHCPGHQKGNRAEARGNRMADQAAREVATRETPETSTLLAGKRTADGSEFEKRTADGSEFESPKKKAKVE

SEQ ID NO: 2586 - protein, 2091 aa, synthetic construct
MPAAKRVKLDGGDKKYSIGLDIGTNSVGWAVITDEYKVPSKKFKVLGNTDRHSIKKNLIGALLFDSGETAEATRLKRTARRRYTRRKNRICYLQEIFSNEMAKVDDSFFHRLEESFLVEEDKKHERHPIFGNIVDEVAYHEKYPTIYHLRKKLVDSTDKADLRLIYLALAHMIKFRGHFLIEGDLNPDNSDVDKLFIQLVQTYNQLFEENPINASGVDAKAILSARLSKSRRLENLIAQLPGEKKNGLFGNLIALSLGLTPNFKSNFDLAEDAKLQLSKDTYDDDLDNLLAQIGDQYADLFLAAKNLSDAILLSDILRVNTEITKAPLSASMIKRYDEHHQDLTLLKALVRQQLPEKYKEIFFDQSKNGYAGYIDGGASQEEFYKFIKPILEKMDGTEELLVKLNREDLLRKQRTFDNGSIPHQIHLGELHAILRRQEDFYPFLKDNREKIEKILTFRIPYYVGPLARGNSRFAWMTRKSEETITPWNFEEVVDKGASAQSFIERMTNFDKNLPNEKVLPKHSLLYEYFTVYNELTKVKYVTEGMRKPAFLSGEQKKAIVDLLFKTNRKVTVKQLKEDYFKKIECFDSVEISGVEDRFNASLGTYHDLLKIIKDKDFLDNEENEDILEDIVLTLTLFEDREMIEERLKTYAHLFDDKVMKQLKRRRYTGWGRLSRKLINGIRDKQSGKTILDFLKSDGFANRNFMQLIHDDSLTFKEDIQKAQVSGQGDSLHEHIANLAGSPAIKKGILQTVKVVDELVKVMGRHKPENIVIEMARENQTTQKGQKNSRERMKRIEEGIKELGSQILKEHPVENTQLQNEKLYLYYLQNGRDMYVDQELDINRLSDYDVDHIVPQSFLKDDSIDNKVLTRSDKARGKSDNVPSEEVVKKMKNYWRQLLNAKLITQRKFDNLTKAERGGLSELDKAGFIKRQLVETRQITKHVAQILDSRMNTKYDENDKLIREVKVITLKSKLVSDFRKDFQFYKVREINNYHHAHDAYLNAVVGTALIKKYPKLESEFVYGDYKVYDVRKMIAKSEQEIGKATAKYFFYSNIMNFFKTEITLANGEIRKRPLIETNGETGEIVWDKGRDFATVRKVLSMPQVNIVKKTEVQTGGFSKESILPKRNSDKLIARKKDWDPKKYGGFDSPTVAYSVLVVAKVEKGKSKKLKSVKELLGITIMERSSFEKNPIDFLEAKGYKEVKKDLIIKLPKYSLFELENGRKRMLASAGELQKGNELALPSKYVNFLYLASHYEKLKGSPEDNEQKQLFVEQHKHYLDEIIEQISEFSKRVILADANLDKVLSAYNKHRDKPIREQAENIIHLFTLTNLGAPAAFKYFDTTIDRKRYTSTKEVLDATLIHQSITGLYETRIDLSQLGGDGGGGGGSSGGTLNIEDEYRLHETSKGPDVPLGSTWLSDFPQAWAETGGMGLAVRQAPLIIPLKATSTPVSIKQYPMSQEARLGIKPHIQRLLDQGILVPCQSPWNTPLLPVKKPGTNDYRPVQDLREVNKRVEDIHPTVPNPYNLLSGLPPSHQWYTVLDLKDAFFCLRLHPTSQSLFAFEWRDPEMGISGQLTWTRLPQGFKNSPTLFNEALHRDLADFRIQHPDLILLQYVDDLLLAATSELDCQQGTRALLQTLGDLGYRASAKKAQICQKQVKYLGYLLKEGQRWLTEARKETVMGQPTPKTPRQLREFLGKAGFCRLFIPGFAEMAAPLYPLTKPGTLFEWGPDQQKAYQEIKQALLTAPALGLPDLTKPFELFVDEKQGYAKGVLTQKLGPWRRPVAYLSKKLDPVAAGWPPCLRMVAAIAVLTKDAGKLTMGQPLVILAPHAVEALVKQPPDRWLSNARMTHYQALLLDTDRVQFGPIVALNPATLLPLPEEGLQHDCLDILAEAHGTRPDLTDQPLPDADHTWYTDGSSFLQEGQRKAGAAVTTETEVVWAKALPAGTSAQRAELIALTQALKMAEGKKLNVYTDSRYAFATAHIHGEIYRRRGWLTSEGKEIKNKDEILALLKALFLPKRLSIIHCPGHQKGNRAEARGNRMADQAAREVATRETPETSTLLAGKRTADGSEFEKRTADGSEFESPKKKAKVE

SEQ ID NO: 2587 - protein, 2093 aa, synthetic construct
MPAAKRVKLDGGDKKYSIGLDIGTNSVGWAVITDEYKVPSKKFKVLGNTDRHSIKKNLIGALLFDSGETAEATRLKRTARRRYTRRKNRICYLQEIFSNEMAKVDDSFFHRLEESFLVEEDKKHERHPIFGNIVDEVAYHEKYPTIYHLRKKLVDSTDKADLRLIYLALAHMIKFRGHFLIEGDLNPDNSDVDKLFIQLVQTYNQLFEENPINASGVDAKAILSARLSKSRRLENLIAQLPGEKKNGLFGNLIALSLGLTPNFKSNFDLAEDAKLQLSKDTYDDDLDNLLAQIGDQYADLFLAAKNLSDAILLSDILRVNTEITKAPLSASMIKRYDEHHQDLTLLKALVRQQLPEKYKEIFFDQSKNGYAGYIDGGASQEEFYKFIKPILEKMDGTEELLVKLNREDLLRKQRTFDNGSIPHQIHLGELHAILRRQEDFYPFLKDNREKIEKILTFRIPYYVGPLARGNSRFAWMTRKSEETITPWNFEEVVDKGASAQSFIERMTNFDKNLPNEKVLPKHSLLYEYFTVYNELTKVKYVTEGMRKPAFLSGEQKKAIVDLLFKTNRKVTVKQLKEDYFKKIECFDSVEISGVEDRFNASLGTYHDLLKIIKDKDFLDNEENEDILEDIVLTLTLFEDREMIEERLKTYAHLFDDKVMKQLKRRRYTGWGRLSRKLINGIRDKQSGKTILDFLKSDGFANRNFMQLIHDDSLTFKEDIQKAQVSGQGDSLHEHIANLAGSPAIKKGILQTVKVVDELVKVMGRHKPENIVIEMARENQTTQKGQKNSRERMKRIEEGIKELGSQILKEHPVENTQLQNEKLYLYYLQNGRDMYVDQELDINRLSDYDVDHIVPQSFLKDDSIDNKVLTRSDKARGKSDNVPSEEVVKKMKNYWRQLLNAKLITQRKFDNLTKAERGGLSELDKAGFIKRQLVETRQITKHVAQILDSRMNTKYDENDKLIREVKVITLKSKLVSDFRKDFQFYKVREINNYHHAHDAYLNAVVGTALIKKYPKLESEFVYGDYKVYDVRKMIAKSEQEIGKATAKYFFYSNIMNFFKTEITLANGEIRKRPLIETNGETGEIVWDKGRDFATVRKVLSMPQVNIVKKTEVQTGGFSKESILPKRNSDKLIARKKDWDPKKYGGFDSPTVAYSVLVVAKVEKGKSKKLKSVKELLGITIMERSSFEKNPIDFLEAKGYKEVKKDLIIKLPKYSLFELENGRKRMLASAGELQKGNELALPSKYVNFLYLASHYEKLKGSPEDNEQKQLFVEQHKHYLDEIIEQISEFSKRVILADANLDKVLSAYNKHRDKPIREQAENIIHLFTLTNLGAPAAFKYFDTTIDRKRYTSTKEVLDATLIHQSITGLYETRIDLSQLGGDGGEAAAKPAPGGTLNIEDEYRLHETSKGPDVPLGSTWLSDFPQAWAETGGMGLAVRQAPLIIPLKATSTPVSIKQYPMSQEARLGIKPHIQRLLDQGILVPCQSPWNTPLLPVKKPGTNDYRPVQDLREVNKRVEDIHPTVPNPYNLLSGLPPSHQWYTVLDLKDAFFCLRLHPTSQSLFAFEWRDPEMGISGQLTWTRLPQGFKNSPTLFNEALHRDLADFRIQHPDLILLQYVDDLLLAATSELDCQQGTRALLQTLGDLGYRASAKKAQICQKQVKYLGYLLKEGQRWLTEARKETVMGQPTPKTPRQLREFLGKAGFCRLFIPGFAEMAAPLYPLTKPGTLFEWGPDQQKAYQEIKQALLTAPALGLPDLTKPFELFVDEKQGYAKGVLTQKLGPWRRPVAYLSKKLDPVAAGWPPCLRMVAAIAVLTKDAGKLTMGQPLVILAPHAVEALVKQPPDRWLSNARMTHYQALLLDTDRVQFGPIVALNPATLLPLPEEGLQHDCLDILAEAHGTRPDLTDQPLPDADHTWYTDGSSFLQEGQRKAGAAVTTETEVVWAKALPAGTSAQRAELIALTQALKMAEGKKLNVYTDSRYAFATAHIHGEIYRRRGWLTSEGKEIKNKDEILALLKALFLPKRLSIIHCPGHQKGNRAEARGNRMADQAAREVATRETPETSTLLAGKRTADGSEFEKRTADGSEFESPKKKAKVE

SEQ ID NO: 2588 - protein, 2094 aa, synthetic construct
MPAAKRVKLDGGDKKYSIGLDIGTNSVGWAVITDEYKVPSKKFKVLGNTDRHSIKKNLIGALLFDSGETAEATRLKRTARRRYTRRKNRICYLQEIFSNEMAKVDDSFFHRLEESFLVEEDKKHERHPIFGNIVDEVAYHEKYPTIYHLRKKLVDSTDKADLRLIYLALAHMIKFRGHFLIEGDLNPDNSDVDKLFIQLVQTYNQLFEENPINASGVDAKAILSARLSKSRRLENLIAQLPGEKKNGLFGNLIALSLGLTPNFKSNFDLAEDAKLQLSKDTYDDDLDNLLAQIGDQYADLFLAAKNLSDAILLSDILRVNTEITKAPLSASMIKRYDEHHQDLTLLKALVRQQLPEKYKEIFFDQSKNGYAGYIDGGASQEEFYKFIKPILEKMDGTEELLVKLNREDLLRKQRTFDNGSIPHQIHLGELHAILRRQEDFYPFLKDNREKIEKILTFRIPYYVGPLARGNSRFAWMTRKSEETITPWNFEEVVDKGASAQSFIERMTNFDKNLPNEKVLPKHSLLYEYFTVYNELTKVKYVTEGMRKPAFLSGEQKKAIVDLLFKTNRKVTVKQLKEDYFKKIECFDSVEISGVEDRFNASLGTYHDLLKIIKDKDFLDNEENEDILEDIVLTLTLFEDREMIEERLKTYAHLFDDKVMKQLKRRRYTGWGRLSRKLINGIRDKQSGKTILDFLKSDGFANRNFMQLIHDDSLTFKEDIQKAQVSGQGDSLHEHIANLAGSPAIKKGILQTVKVVDELVKVMGRHKPENIVIEMARENQTTQKGQKNSRERMKRIEEGIKELGSQILKEHPVENTQLQNEKLYLYYLQNGRDMYVDQELDINRLSDYDVDHIVPQSFLKDDSIDNKVLTRSDKARGKSDNVPSEEVVKKMKNYWRQLLNAKLITQRKFDNLTKAERGGLSELDKAGFIKRQLVETRQITKHVAQILDSRMNTKYDENDKLIREVKVITLKSKLVSDFRKDFQFYKVREINNYHHAHDAYLNAVVGTALIKKYPKLESEFVYGDYKVYDVRKMIAKSEQEIGKATAKYFFYSNIMNFFKTEITLANGEIRKRPLIETNGETGEIVWDKGRDFATVRKVLSMPQVNIVKKTEVQTGGFSKESILPKRNSDKLIARKKDWDPKKYGGFDSPTVAYSVLVVAKVEKGKSKKLKSVKELLGITIMERSSFEKNPIDFLEAKGYKEVKKDLIIKLPKYSLFELENGRKRMLASAGELQKGNELALPSKYVNFLYLASHYEKLKGSPEDNEQKQLFVEQHKHYLDEIIEQISEFSKRVILADANLDKVLSAYNKHRDKPIREQAENIIHLFTLTNLGAPAAFKYFDTTIDRKRYTSTKEVLDATLIHQSITGLYETRIDLSQLGGDGGGGGGGSPAPGGTLNIEDEYRLHETSKGPDVPLGSTWLSDFPQAWAETGGMGLAVRQAPLIIPLKATSTPVSIKQYPMSQEARLGIKPHIQRLLDQGILVPCQSPWNTPLLPVKKPGTNDYRPVQDLREVNKRVEDIHPTVPNPYNLLSGLPPSHQWYTVLDLKDAFFCLRLHPTSQSLFAFEWRDPEMGISGQLTWTRLPQGFKNSPTLFNEALHRDLADFRIQHPDLILLQYVDDLLLAATSELDCQQGTRALLQTLGDLGYRASAKKAQICQKQVKYLGYLLKEGQRWLTEARKETVMGQPTPKTPRQLREFLGKAGFCRLFIPGFAEMAAPLYPLTKPGTLFEWGPDQQKAYQEIKQALLTAPALGLPDLTKPFELFVDEKQGYAKGVLTQKLGPWRRPVAYLSKKLDPVAAGWPPCLRMVAAIAVLTKDAGKLTMGQPLVILAPHAVEALVKQPPDRWLSNARMTHYQALLLDTDRVQFGPIVALNPATLLPLPEEGLQHDCLDILAEAHGTRPDLTDQPLPDADHTWYTDGSSFLQEGQRKAGAAVTTETEVVWAKALPAGTSAQRAELIALTQALKMAEGKKLNVYTDSRYAFATAHIHGEIYRRRGWLTSEGKEIKNKDEILALLKALFLPKRLSIIHCPGHQKGNRAEARGNRMADQAAREVATRETPETSTLLAGKRTADGSEFEKRTADGSEFESPKKKAKVE

SEQ ID NO: 2589 - protein, 2094 aa, synthetic construct
MPAAKRVKLDGGDKKYSIGLDIGTNSVGWAVITDEYKVPSKKFKVLGNTDRHSIKKNLIGALLFDSGETAEATRLKRTARRRYTRRKNRICYLQEIFSNEMAKVDDSFFHRLEESFLVEEDKKHERHPIFGNIVDEVAYHEKYPTIYHLRKKLVDSTDKADLRLIYLALAHMIKFRGHFLIEGDLNPDNSDVDKLFIQLVQTYNQLFEENPINASGVDAKAILSARLSKSRRLENLIAQLPGEKKNGLFGNLIALSLGLTPNFKSNFDLAEDAKLQLSKDTYDDDLDNLLAQIGDQYADLFLAAKNLSDAILLSDILRVNTEITKAPLSASMIKRYDEHHQDLTLLKALVRQQLPEKYKEIFFDQSKNGYAGYIDGGASQEEFYKFIKPILEKMDGTEELLVKLNREDLLRKQRTFDNGSIPHQIHLGELHAILRRQEDFYPFLKDNREKIEKILTFRIPYYVGPLARGNSRFAWMTRKSEETITPWNFEEVVDKGASAQSFIERMTNFDKNLPNEKVLPKHSLLYEYFTVYNELTKVKYVTEGMRKPAFLSGEQKKAIVDLLFKTNRKVTVKQLKEDYFKKIECFDSVEISGVEDRFNASLGTYHDLLKIIKDKDFLDNEENEDILEDIVLTLTLFEDREMIEERLKTYAHLFDDKVMKQLKRRRYTGWGRLSRKLINGIRDKQSGKTILDFLKSDGFANRNFMQLIHDDSLTFKEDIQKAQVSGQGDSLHEHIANLAGSPAIKKGILQTVKVVDELVKVMGRHKPENIVIEMARENQTTQKGQKNSRERMKRIEEGIKELGSQILKEHPVENTQLQNEKLYLYYLQNGRDMYVDQELDINRLSDYDVDHIVPQSFLKDDSIDNKVLTRSDKARGKSDNVPSEEVVKKMKNYWRQLLNAKLITQRKFDNLTKAERGGLSELDKAGFIKRQLVETRQITKHVAQILDSRMNTKYDENDKLIREVKVITLKSKLVSDFRKDFQFYKVREINNYHHAHDAYLNAVVGTALIKKYPKLESEFVYGDYKVYDVRKMIAKSEQEIGKATAKYFFYSNIMNFFKTEITLANGEIRKRPLIETNGETGEIVWDKGRDFATVRKVLSMPQVNIVKKTEVQTGGFSKESILPKRNSDKLIARKKDWDPKKYGGFDSPTVAYSVLVVAKVEKGKSKKLKSVKELLGITIMERSSFEKNPIDFLEAKGYKEVKKDLIIKLPKYSLFELENGRKRMLASAGELQKGNELALPSKYVNFLYLASHYEKLKGSPEDNEQKQLFVEQHKHYLDEIIEQISEFSKRVILADANLDKVLSAYNKHRDKPIREQAENIIHLFTLTNLGAPAAFKYFDTTIDRKRYTSTKEVLDATLIHQSITGLYETRIDLSQLGGDGGGGGGSSPAPGGTLNIEDEYRLHETSKGPDVPLGSTWLSDFPQAWAETGGMGLAVRQAPLIIPLKATSTPVSIKQYPMSQEARLGIKPHIQRLLDQGILVPCQSPWNTPLLPVKKPGTNDYRPVQDLREVNKRVEDIHPTVPNPYNLLSGLPPSHQWYTVLDLKDAFFCLRLHPTSQSLFAFEWRDPEMGISGQLTWTRLPQGFKNSPTLFNEALHRDLADFRIQHPDLILLQYVDDLLLAATSELDCQQGTRALLQTLGDLGYRASAKKAQICQKQVKYLGYLLKEGQRWLTEARKETVMGQPTPKTPRQLREFLGKAGFCRLFIPGFAEMAAPLYPLTKPGTLFEWGPDQQKAYQEIKQALLTAPALGLPDLTKPFELFVDEKQGYAKGVLTQKLGPWRRPVAYLSKKLDPVAAGWPPCLRMVAAIAVLTKDAGKLTMGQPLVILAPHAVEALVKQPPDRWLSNARMTHYQALLLDTDRVQFGPIVALNPATLLPLPEEGLQHDCLDILAEAHGTRPDLTDQPLPDADHTWYTDGSSFLQEGQRKAGAAVTTETEVVWAKALPAGTSAQRAELIALTQALKMAEGKKLNVYTDSRYAFATAHIHGEIYRRRGWLTSEGKEIKNKDEILALLKALFLPKRLSIIHCPGHQKGNRAEARGNRMADQAAREVATRETPETSTLLAGKRTADGSEFEKRTADGSEFESPKKKAKVE

SEQ ID NO: 2590 - protein, 2091 aa, synthetic construct
MPAAKRVKLDGGDKKYSIGLDIGTNSVGWAVITDEYKVPSKKFKVLGNTDRHSIKKNLIGALLFDSGETAEATRLKRTARRRYTRRKNRICYLQEIFSNEMAKVDDSFFHRLEESFLVEEDKKHERHPIFGNIVDEVAYHEKYPTIYHLRKKLVDSTDKADLRLIYLALAHMIKFRGHFLIEGDLNPDNSDVDKLFIQLVQTYNQLFEENPINASGVDAKAILSARLSKSRRLENLIAQLPGEKKNGLFGNLIALSLGLTPNFKSNFDLAEDAKLQLSKDTYDDDLDNLLAQIGDQYADLFLAAKNLSDAILLSDILRVNTEITKAPLSASMIKRYDEHHQDLTLLKALVRQQLPEKYKEIFFDQSKNGYAGYIDGGASQEEFYKFIKPILEKMDGTEELLVKLNREDLLRKQRTFDNGSIPHQIHLGELHAILRRQEDFYPFLKDNREKIEKILTFRIPYYVGPLARGNSRFAWMTRKSEETITPWNFEEVVDKGASAQSFIERMTNFDKNLPNEKVLPKHSLLYEYFTVYNELTKVKYVTEGMRKPAFLSGEQKKAIVDLLFKTNRKVTVKQLKEDYFKKIECFDSVEISGVEDRFNASLGTYHDLLKIIKDKDFLDNEENEDILEDIVLTLTLFEDREMIEERLKTYAHLFDDKVMKQLKRRRYTGWGRLSRKLINGIRDKQSGKTILDFLKSDGFANRNFMQLIHDDSLTFKEDIQKAQVSGQGDSLHEHIANLAGSPAIKKGILQTVKVVDELVKVMGRHKPENIVIEMARENQTTQKGQKNSRERMKRIEEGIKELGSQILKEHPVENTQLQNEKLYLYYLQNGRDMYVDQELDINRLSDYDVDHIVPQSFLKDDSIDNKVLTRSDKARGKSDNVPSEEVVKKMKNYWRQLLNAKLITQRKFDNLTKAERGGLSELDKAGFIKRQLVETRQITKHVAQILDSRMNTKYDENDKLIREVKVITLKSKLVSDFRKDFQFYKVREINNYHHAHDAYLNAVVGTALIKKYPKLESEFVYGDYKVYDVRKMIAKSEQEIGKATAKYFFYSNIMNFFKTEITLANGEIRKRPLIETNGETGEIVWDKGRDFATVRKVLSMPQVNIVKKTEVQTGGFSKESILPKRNSDKLIARKKDWDPKKYGGFDSPTVAYSVLVVAKVEKGKSKKLKSVKELLGITIMERSSFEKNPIDFLEAKGYKEVKKDLIIKLPKYSLFELENGRKRMLASAGELQKGNELALPSKYVNFLYLASHYEKLKGSPEDNEQKQLFVEQHKHYLDEIIEQISEFSKRVILADANLDKVLSAYNKHRDKPIREQAENIIHLFTLTNLGAPAAFKYFDTTIDRKRYTSTKEVLDATLIHQSITGLYETRIDLSQLGGDGGGSSGGSGGTLNIEDEYRLHETSKGPDVPLGSTWLSDFPQAWAETGGMGLAVRQAPLIIPLKATSTPVSIKQYPMSQEARLGIKPHIQRLLDQGILVPCQSPWNTPLLPVKKPGTNDYRPVQDLREVNKRVEDIHPTVPNPYNLLSGLPPSHQWYTVLDLKDAFFCLRLHPTSQSLFAFEWRDPEMGISGQLTWTRLPQGFKNSPTLFNEALHRDLADFRIQHPDLILLQYVDDLLLAATSELDCQQGTRALLQTLGDLGYRASAKKAQICQKQVKYLGYLLKEGQRWLTEARKETVMGQPTPKTPRQLREFLGKAGFCRLFIPGFAEMAAPLYPLTKPGTLFEWGPDQQKAYQEIKQALLTAPALGLPDLTKPFELFVDEKQGYAKGVLTQKLGPWRRPVAYLSKKLDPVAAGWPPCLRMVAAIAVLTKDAGKLTMGQPLVILAPHAVEALVKQPPDRWLSNARMTHYQALLLDTDRVQFGPIVALNPATLLPLPEEGLQHDCLDILAEAHGTRPDLTDQPLPDADHTWYTDGSSFLQEGQRKAGAAVTTETEVVWAKALPAGTSAQRAELIALTQALKMAEGKKLNVYTDSRYAFATAHIHGEIYRRRGWLTSEGKEIKNKDEILALLKALFLPKRLSIIHCPGHQKGNRAEARGNRMADQAAREVATRETPETSTLLAGKRTADGSEFEKRTADGSEFESPKKKAKVE

SEQ ID NO: 2591 - protein, 2094 aa, synthetic construct
MPAAKRVKLDGGDKKYSIGLDIGTNSVGWAVITDEYKVPSKKFKVLGNTDRHSIKKNLIGALLFDSGETAEATRLKRTARRRYTRRKNRICYLQEIFSNEMAKVDDSFFHRLEESFLVEEDKKHERHPIFGNIVDEVAYHEKYPTIYHLRKKLVDSTDKADLRLIYLALAHMIKFRGHFLIEGDLNPDNSDVDKLFIQLVQTYNQLFEENPINASGVDAKAILSARLSKSRRLENLIAQLPGEKKNGLFGNLIALSLGLTPNFKSNFDLAEDAKLQLSKDTYDDDLDNLLAQIGDQYADLFLAAKNLSDAILLSDILRVNTEITKAPLSASMIKRYDEHHQDLTLLKALVRQQLPEKYKEIFFDQSKNGYAGYIDGGASQEEFYKFIKPILEKMDGTEELLVKLNREDLLRKQRTFDNGSIPHQIHLGELHAILRRQEDFYPFLKDNREKIEKILTFRIPYYVGPLARGNSRFAWMTRKSEETITPWNFEEVVDKGASAQSFIERMTNFDKNLPNEKVLPKHSLLYEYFTVYNELTKVKYVTEGMRKPAFLSGEQKKAIVDLLFKTNRKVTVKQLKEDYFKKIECFDSVEISGVEDRFNASLGTYHDLLKIIKDKDFLDNEENEDILEDIVLTLTLFEDREMIEERLKTYAHLFDDKVMKQLKRRRYTGWGRLSRKLINGIRDKQSGKTILDFLKSDGFANRNFMQLIHDDSLTFKEDIQKAQVSGQGDSLHEHIANLAGSPAIKKGILQTVKVVDELVKVMGRHKPENIVIEMARENQTTQKGQKNSRERMKRIEEGIKELGSQILKEHPVENTQLQNEKLYLYYLQNGRDMYVDQELDINRLSDYDVDHIVPQSFLKDDSIDNKVLTRSDKARGKSDNVPSEEVVKKMKNYWRQLLNAKLITQRKFDNLTKAERGGLSELDKAGFIKRQLVETRQITKHVAQILDSRMNTKYDENDKLIREVKVITLKSKLVSDFRKDFQFYKVREINNYHHAHDAYLNAVVGTALIKKYPKLESEFVYGDYKVYDVRKMIAKSEQEIGKATAKYFFYSNIMNFFKTEITLANGEIRKRPLIETNGETGEIVWDKGRDFATVRKVLSMPQVNIVKKTEVQTGGFSKESILPKRNSDKLIARKKDWDPKKYGGFDSPTVAYSVLVVAKVEKGKSKKLKSVKELLGITIMERSSFEKNPIDFLEAKGYKEVKKDLIIKLPKYSLFELENGRKRMLASAGELQKGNELALPSKYVNFLYLASHYEKLKGSPEDNEQKQLFVEQHKHYLDEIIEQISEFSKRVILADANLDKVLSAYNKHRDKPIREQAENIIHLFTLTNLGAPAAFKYFDTTIDRKRYTSTKEVLDATLIHQSITGLYETRIDLSQLGGDGGGSSGGSPAPGGTLNIEDEYRLHETSKGPDVPLGSTWLSDFPQAWAETGGMGLAVRQAPLIIPLKATSTPVSIKQYPMSQEARLGIKPHIQRLLDQGILVPCQSPWNTPLLPVKKPGTNDYRPVQDLREVNKRVEDIHPTVPNPYNLLSGLPPSHQWYTVLDLKDAFFCLRLHPTSQSLFAFEWRDPEMGISGQLTWTRLPQGFKNSPTLFNEALHRDLADFRIQHPDLILLQYVDDLLLAATSELDCQQGTRALLQTLGDLGYRASAKKAQICQKQVKYLGYLLKEGQRWLTEARKETVMGQPTPKTPRQLREFLGKAGFCRLFIPGFAEMAAPLYPLTKPGTLFEWGPDQQKAYQEIKQALLTAPALGLPDLTKPFELFVDEKQGYAKGVLTQKLGPWRRPVAYLSKKLDPVAAGWPPCLRMVAAIAVLTKDAGKLTMGQPLVILAPHAVEALVKQPPDRWLSNARMTHYQALLLDTDRVQFGPIVALNPATLLPLPEEGLQHDCLDILAEAHGTRPDLTDQPLPDADHTWYTDGSSFLQEGQRKAGAAVTTETEVVWAKALPAGTSAQRAELIALTQALKMAEGKKLNVYTDSRYAFATAHIHGEIYRRRGWLTSEGKEIKNKDEILALLKALFLPKRLSIIHCPGHQKGNRAEARGNRMADQAAREVATRETPETSTLLAGKRTADGSEFEKRTADGSEFESPKKKAKVE

SEQ ID NO: 2592 - protein, 2096 aa, synthetic construct
MPAAKRVKLDGGDKKYSIGLDIGTNSVGWAVITDEYKVPSKKFKVLGNTDRHSIKKNLIGALLFDSGETAEATRLKRTARRRYTRRKNRICYLQEIFSNEMAKVDDSFFHRLEESFLVEEDKKHERHPIFGNIVDEVAYHEKYPTIYHLRKKLVDSTDKADLRLIYLALAHMIKFRGHFLIEGDLNPDNSDVDKLFIQLVQTYNQLFEENPINASGVDAKAILSARLSKSRRLENLIAQLPGEKKNGLFGNLIALSLGLTPNFKSNFDLAEDAKLQLSKDTYDDDLDNLLAQIGDQYADLFLAAKNLSDAILLSDILRVNTEITKAPLSASMIKRYDEHHQDLTLLKALVRQQLPEKYKEIFFDQSKNGYAGYIDGGASQEEFYKFIKPILEKMDGTEELLVKLNREDLLRKQRTFDNGSIPHQIHLGELHAILRRQEDFYPFLKDNREKIEKILTFRIPYYVGPLARGNSRFAWMTRKSEETITPWNFEEVVDKGASAQSFIERMTNFDKNLPNEKVLPKHSLLYEYFTVYNELTKVKYVTEGMRKPAFLSGEQKKAIVDLLFKTNRKVTVKQLKEDYFKKIECFDSVEISGVEDRFNASLGTYHDLLKIIKDKDFLDNEENEDILEDIVLTLTLFEDREMIEERLKTYAHLFDDKVMKQLKRRRYTGWGRLSRKLINGIRDKQSGKTILDFLKSDGFANRNFMQLIHDDSLTFKEDIQKAQVSGQGDSLHEHIANLAGSPAIKKGILQTVKVVDELVKVMGRHKPENIVIEMARENQTTQKGQKNSRERMKRIEEGIKELGSQILKEHPVENTQLQNEKLYLYYLQNGRDMYVDQELDINRLSDYDVDHIVPQSFLKDDSIDNKVLTRSDKARGKSDNVPSEEVVKKMKNYWRQLLNAKLITQRKFDNLTKAERGGLSELDKAGFIKRQLVETRQITKHVAQILDSRMNTKYDENDKLIREVKVITLKSKLVSDFRKDFQFYKVREINNYHHAHDAYLNAVVGTALIKKYPKLESEFVYGDYKVYDVRKMIAKSEQEIGKATAKYFFYSNIMNFFKTEITLANGEIRKRPLIETNGETGEIVWDKGRDFATVRKVLSMPQVNIVKKTEVQTGGFSKESILPKRNSDKLIARKKDWDPKKYGGFDSPTVAYSVLVVAKVEKGKSKKLKSVKELLGITIMERSSFEKNPIDFLEAKGYKEVKKDLIIKLPKYSLFELENGRKRMLASAGELQKGNELALPSKYVNFLYLASHYEKLKGSPEDNEQKQLFVEQHKHYLDEIIEQISEFSKRVILADANLDKVLSAYNKHRDKPIREQAENIIHLFTLTNLGAPAAFKYFDTTIDRKRYTSTKEVLDATLIHQSITGLYETRIDLSQLGGDGGGGGPAPEAAAKGGTLNIEDEYRLHETSKGPDVPLGSTWLSDFPQAWAETGGMGLAVRQAPLIIPLKATSTPVSIKQYPMSQEARLGIKPHIQRLLDQGILVPCQSPWNTPLLPVKKPGTNDYRPVQDLREVNKRVEDIHPTVPNPYNLLSGLPPSHQWYTVLDLKDAFFCLRLHPTSQSLFAFEWRDPEMGISGQLTWTRLPQGFKNSPTLFNEALHRDLADFRIQHPDLILLQYVDDLLLAATSELDCQQGTRALLQTLGDLGYRASAKKAQICQKQVKYLGYLLKEGQRWLTEARKETVMGQPTPKTPRQLREFLGKAGFCRLFIPGFAEMAAPLYPLTKPGTLFEWGPDQQKAYQEIKQALLTAPALGLPDLTKPFELFVDEKQGYAKGVLTQKLGPWRRPVAYLSKKLDPVAAGWPPCLRMVAAIAVLTKDAGKLTMGQPLVILAPHAVEALVKQPPDRWLSNARMTHYQALLLDTDRVQFGPIVALNPATLLPLPEEGLQHDCLDILAEAHGTRPDLTDQPLPDADHTWYTDGSSFLQEGQRKAGAAVTTETEVVWAKALPAGTSAQRAELIALTQALKMAEGKKLNVYTDSRYAFATAHIHGEIYRRRGWLTSEGKEIKNKDEILALLKALFLPKRLSIIHCPGHQKGNRAEARGNRMADQAAREVATRETPETSTLLAGKRTADGSEFEKRTADGSEFESPKKKAKVE

SEQ ID NO: 2593 - protein, 2094 aa, synthetic construct
MPAAKRVKLDGGDKKYSIGLDIGTNSVGWAVITDEYKVPSKKFKVLGNTDRHSIKKNLIGALLFDSGETAEATRLKRTARRRYTRRKNRICYLQEIFSNEMAKVDDSFFHRLEESFLVEEDKKHERHPIFGNIVDEVAYHEKYPTIYHLRKKLVDSTDKADLRLIYLALAHMIKFRGHFLIEGDLNPDNSDVDKLFIQLVQTYNQLFEENPINASGVDAKAILSARLSKSRRLENLIAQLPGEKKNGLFGNLIALSLGLTPNFKSNFDLAEDAKLQLSKDTYDDDLDNLLAQIGDQYADLFLAAKNLSDAILLSDILRVNTEITKAPLSASMIKRYDEHHQDLTLLKALVRQQLPEKYKEIFFDQSKNGYAGYIDGGASQEEFYKFIKPILEKMDGTEELLVKLNREDLLRKQRTFDNGSIPHQIHLGELHAILRRQEDFYPFLKDNREKIEKILTFRIPYYVGPLARGNSRFAWMTRKSEETITPWNFEEVVDKGASAQSFIERMTNFDKNLPNEKVLPKHSLLYEYFTVYNELTKVKYVTEGMRKPAFLSGEQKKAIVDLLFKTNRKVTVKQLKEDYFKKIECFDSVEISGVEDRFNASLGTYHDLLKIIKDKDFLDNEENEDILEDIVLTLTLFEDREMIEERLKTYAHLFDDKVMKQLKRRRYTGWGRLSRKLINGIRDKQSGKTILDFLKSDGFANRNFMQLIHDDSLTFKEDIQKAQVSGQGDSLHEHIANLAGSPAIKKGILQTVKVVDELVKVMGRHKPENIVIEMARENQTTQKGQKNSRERMKRIEEGIKELGSQILKEHPVENTQLQNEKLYLYYLQNGRDMYVDQELDINRLSDYDVDHIVPQSFLKDDSIDNKVLTRSDKARGKSDNVPSEEVVKKMKNYWRQLLNAKLITQRKFDNLTKAERGGLSELDKAGFIKRQLVETRQITKHVAQILDSRMNTKYDENDKLIREVKVITLKSKLVSDFRKDFQFYKVREINNYHHAHDAYLNAVVGTALIKKYPKLESEFVYGDYKVYDVRKMIAKSEQEIGKATAKYFFYSNIMNFFKTEITLANGEIRKRPLIETNGETGEIVWDKGRDFATVRKVLSMPQVNIVKKTEVQTGGFSKESILPKRNSDKLIARKKDWDPKKYGGFDSPTVAYSVLVVAKVEKGKSKKLKSVKELLGITIMERSSFEKNPIDFLEAKGYKEVKKDLIIKLPKYSLFELENGRKRMLASAGELQKGNELALPSKYVNFLYLASHYEKLKGSPEDNEQKQLFVEQHKHYLDEIIEQISEFSKRVILADANLDKVLSAYNKHRDKPIREQAENIIHLFTLTNLGAPAAFKYFDTTIDRKRYTSTKEVLDATLIHQSITGLYETRIDLSQLGGDGGGGGPAPGSSGGTLNIEDEYRLHETSKGPDVPLGSTWLSDFPQAWAETGGMGLAVRQAPLIIPLKATSTPVSIKQYPMSQEARLGIKPHIQRLLDQGILVPCQSPWNTPLLPVKKPGTNDYRPVQDLREVNKRVEDIHPTVPNPYNLLSGLPPSHQWYTVLDLKDAFFCLRLHPTSQSLFAFEWRDPEMGISGQLTWTRLPQGFKNSPTLFNEALHRDLADFRIQHPDLILLQYVDDLLLAATSELDCQQGTRALLQTLGDLGYRASAKKAQICQKQVKYLGYLLKEGQRWLTEARKETVMGQPTPKTPRQLREFLGKAGFCRLFIPGFAEMAAPLYPLTKPGTLFEWGPDQQKAYQEIKQALLTAPALGLPDLTKPFELFVDEKQGYAKGVLTQKLGPWRRPVAYLSKKLDPVAAGWPPCLRMVAAIAVLTKDAGKLTMGQPLVILAPHAVEALVKQPPDRWLSNARMTHYQALLLDTDRVQFGPIVALNPATLLPLPEEGLQHDCLDILAEAHGTRPDLTDQPLPDADHTWYTDGSSFLQEGQRKAGAAVTTETEVVWAKALPAGTSAQRAELIALTQALKMAEGKKLNVYTDSRYAFATAHIHGEIYRRRGWLTSEGKEIKNKDEILALLKALFLPKRLSIIHCPGHQKGNRAEARGNRMADQAAREVATRETPETSTLLAGKRTADGSEFEKRTADGSEFESPKKKAKVE

SEQ ID NO: 2594 - protein, 2091 aa, synthetic construct
MPAAKRVKLDGGDKKYSIGLDIGTNSVGWAVITDEYKVPSKKFKVLGNTDRHSIKKNLIGALLFDSGETAEATRLKRTARRRYTRRKNRICYLQEIFSNEMAKVDDSFFHRLEESFLVEEDKKHERHPIFGNIVDEVAYHEKYPTIYHLRKKLVDSTDKADLRLIYLALAHMIKFRGHFLIEGDLNPDNSDVDKLFIQLVQTYNQLFEENPINASGVDAKAILSARLSKSRRLENLIAQLPGEKKNGLFGNLIALSLGLTPNFKSNFDLAEDAKLQLSKDTYDDDLDNLLAQIGDQYADLFLAAKNLSDAILLSDILRVNTEITKAPLSASMIKRYDEHHQDLTLLKALVRQQLPEKYKEIFFDQSKNGYAGYIDGGASQEEFYKFIKPILEKMDGTEELLVKLNREDLLRKQRTFDNGSIPHQIHLGELHAILRRQEDFYPFLKDNREKIEKILTFRIPYYVGPLARGNSRFAWMTRKSEETITPWNFEEVVDKGASAQSFIERMTNFDKNLPNEKVLPKHSLLYEYFTVYNELTKVKYVTEGMRKPAFLSGEQKKAIVDLLFKTNRKVTVKQLKEDYFKKIECFDSVEISGVEDRFNASLGTYHDLLKIIKDKDFLDNEENEDILEDIVLTLTLFEDREMIEERLKTYAHLFDDKVMKQLKRRRYTGWGRLSRKLINGIRDKQSGKTILDFLKSDGFANRNFMQLIHDDSLTFKEDIQKAQVSGQGDSLHEHIANLAGSPAIKKGILQTVKVVDELVKVMGRHKPENIVIEMARENQTTQKGQKNSRERMKRIEEGIKELGSQILKEHPVENTQLQNEKLYLYYLQNGRDMYVDQELDINRLSDYDVDHIVPQSFLKDDSIDNKVLTRSDKARGKSDNVPSEEVVKKMKNYWRQLLNAKLITQRKFDNLTKAERGGLSELDKAGFIKRQLVETRQITKHVAQILDSRMNTKYDENDKLIREVKVITLKSKLVSDFRKDFQFYKVREINNYHHAHDAYLNAVVGTALIKKYPKLESEFVYGDYKVYDVRKMIAKSEQEIGKATAKYFFYSNIMNFFKTEITLANGEIRKRPLIETNGETGEIVWDKGRDFATVRKVLSMPQVNIVKKTEVQTGGFSKESILPKRNSDKLIARKKDWDPKKYGGFDSPTVAYSVLVVAKVEKGKSKKLKSVKELLGITIMERSSFEKNPIDFLEAKGYKEVKKDLIIKLPKYSLFELENGRKRMLASAGELQKGNELALPSKYVNFLYLASHYEKLKGSPEDNEQKQLFVEQHKHYLDEIIEQISEFSKRVILADANLDKVLSAYNKHRDKPIREQAENIIHLFTLTNLGAPAAFKYFDTTIDRKRYTSTKEVLDATLIHQSITGLYETRIDLSQLGGDGGGSSGGGGGTLNIEDEYRLHETSKGPDVPLGSTWLSDFPQAWAETGGMGLAVRQAPLIIPLKATSTPVSIKQYPMSQEARLGIKPHIQRLLDQGILVPCQSPWNTPLLPVKKPGTNDYRPVQDLREVNKRVEDIHPTVPNPYNLLSGLPPSHQWYTVLDLKDAFFCLRLHPTSQSLFAFEWRDPEMGISGQLTWTRLPQGFKNSPTLFNEALHRDLADFRIQHPDLILLQYVDDLLLAATSELDCQQGTRALLQTLGDLGYRASAKKAQICQKQVKYLGYLLKEGQRWLTEARKETVMGQPTPKTPRQLREFLGKAGFCRLFIPGFAEMAAPLYPLTKPGTLFEWGPDQQKAYQEIKQALLTAPALGLPDLTKPFELFVDEKQGYAKGVLTQKLGPWRRPVAYLSKKLDPVAAGWPPCLRMVAAIAVLTKDAGKLTMGQPLVILAPHAVEALVKQPPDRWLSNARMTHYQALLLDTDRVQFGPIVALNPATLLPLPEEGLQHDCLDILAEAHGTRPDLTDQPLPDADHTWYTDGSSFLQEGQRKAGAAVTTETEVVWAKALPAGTSAQRAELIALTQALKMAEGKKLNVYTDSRYAFATAHIHGEIYRRRGWLTSEGKEIKNKDEILALLKALFLPKRLSIIHCPGHQKGNRAEARGNRMADQAAREVATRETPETSTLLAGKRTADGSEFEKRTADGSEFESPKKKAKVE

SEQ ID NO: 2595 - protein, 2103 aa, synthetic construct
MPAAKRVKLDGGDKKYSIGLDIGTNSVGWAVITDEYKVPSKKFKVLGNTDRHSIKKNLIGALLFDSGETAEATRLKRTARRRYTRRKNRICYLQEIFSNEMAKVDDSFFHRLEESFLVEEDKKHERHPIFGNIVDEVAYHEKYPTIYHLRKKLVDSTDKADLRLIYLALAHMIKFRGHFLIEGDLNPDNSDVDKLFIQLVQTYNQLFEENPINASGVDAKAILSARLSKSRRLENLIAQLPGEKKNGLFGNLIALSLGLTPNFKSNFDLAEDAKLQLSKDTYDDDLDNLLAQIGDQYADLFLAAKNLSDAILLSDILRVNTEITKAPLSASMIKRYDEHHQDLTLLKALVRQQLPEKYKEIFFDQSKNGYAGYIDGGASQEEFYKFIKPILEKMDGTEELLVKLNREDLLRKQRTFDNGSIPHQIHLGELHAILRRQEDFYPFLKDNREKIEKILTFRIPYYVGPLARGNSRFAWMTRKSEETITPWNFEEVVDKGASAQSFIERMTNFDKNLPNEKVLPKHSLLYEYFTVYNELTKVKYVTEGMRKPAFLSGEQKKAIVDLLFKTNRKVTVKQLKEDYFKKIECFDSVEISGVEDRFNASLGTYHDLLKIIKDKDFLDNEENEDILEDIVLTLTLFEDREMIEERLKTYAHLFDDKVMKQLKRRRYTGWGRLSRKLINGIRDKQSGKTILDFLKSDGFANRNFMQLIHDDSLTFKEDIQKAQVSGQGDSLHEHIANLAGSPAIKKGILQTVKVVDELVKVMGRHKPENIVIEMARENQTTQKGQKNSRERMKRIEEGIKELGSQILKEHPVENTQLQNEKLYLYYLQNGRDMYVDQELDINRLSDYDVDHIVPQSFLKDDSIDNKVLTRSDKARGKSDNVPSEEVVKKMKNYWRQLLNAKLITQRKFDNLTKAERGGLSELDKAGFIKRQLVETRQITKHVAQILDSRMNTKYDENDKLIREVKVITLKSKLVSDFRKDFQFYKVREINNYHHAHDAYLNAVVGTALIKKYPKLESEFVYGDYKVYDVRKMIAKSEQEIGKATAKYFFYSNIMNFFKTEITLANGEIRKRPLIETNGETGEIVWDKGRDFATVRKVLSMPQVNIVKKTEVQTGGFSKESILPKRNSDKLIARKKDWDPKKYGGFDSPTVAYSVLVVAKVEKGKSKKLKSVKELLGITIMERSSFEKNPIDFLEAKGYKEVKKDLIIKLPKYSLFELENGRKRMLASAGELQKGNELALPSKYVNFLYLASHYEKLKGSPEDNEQKQLFVEQHKHYLDEIIEQISEFSKRVILADANLDKVLSAYNKHRDKPIREQAENIIHLFTLTNLGAPAAFKYFDTTIDRKRYTSTKEVLDATLIHQSITGLYETRIDLSQLGGDGGGSSGSSGSSGSSGSSGSSGGTLNIEDEYRLHETSKGPDVPLGSTWLSDFPQAWAETGGMGLAVRQAPLIIPLKATSTPVSIKQYPMSQEARLGIKPHIQRLLDQGILVPCQSPWNTPLLPVKKPGTNDYRPVQDLREVNKRVEDIHPTVPNPYNLLSGLPPSHQWYTVLDLKDAFFCLRLHPTSQSLFAFEWRDPEMGISGQLTWTRLPQGFKNSPTLFNEALHRDLADFRIQHPDLILLQYVDDLLLAATSELDCQQGTRALLQTLGDLGYRASAKKAQICQKQVKYLGYLLKEGQRWLTEARKETVMGQPTPKTPRQLREFLGKAGFCRLFIPGFAEMAAPLYPLTKPGTLFEWGPDQQKAYQEIKQALLTAPALGLPDLTKPFELFVDEKQGYAKGVLTQKLGPWRRPVAYLSKKLDPVAAGWPPCLRMVAAIAVLTKDAGKLTMGQPLVILAPHAVEALVKQPPDRWLSNARMTHYQALLLDTDRVQFGPIVALNPATLLPLPEEGLQHDCLDILAEAHGTRPDLTDQPLPDADHTWYTDGSSFLQEGQRKAGAAVTTETEVVWAKALPAGTSAQRAELIALTQALKMAEGKKLNVYTDSRYAFATAHIHGEIYRRRGWLTSEGKEIKNKDEILALLKALFLPKRLSIIHCPGHQKGNRAEARGNRMADQAAREVATRETPETSTLLAGKRTADGSEFEKRTADGSEFESPKKKAKVE

SEQ ID NO: 2596 - protein, 2088 aa, synthetic construct
MPAAKRVKLDGGDKKYSIGLDIGTNSVGWAVITDEYKVPSKKFKVLGNTDRHSIKKNLIGALLFDSGETAEATRLKRTARRRYTRRKNRICYLQEIFSNEMAKVDDSFFHRLEESFLVEEDKKHERHPIFGNIVDEVAYHEKYPTIYHLRKKLVDSTDKADLRLIYLALAHMIKFRGHFLIEGDLNPDNSDVDKLFIQLVQTYNQLFEENPINASGVDAKAILSARLSKSRRLENLIAQLPGEKKNGLFGNLIALSLGLTPNFKSNFDLAEDAKLQLSKDTYDDDLDNLLAQIGDQYADLFLAAKNLSDAILLSDILRVNTEITKAPLSASMIKRYDEHHQDLTLLKALVRQQLPEKYKEIFFDQSKNGYAGYIDGGASQEEFYKFIKPILEKMDGTEELLVKLNREDLLRKQRTFDNGSIPHQIHLGELHAILRRQEDFYPFLKDNREKIEKILTFRIPYYVGPLARGNSRFAWMTRKSEETITPWNFEEVVDKGASAQSFIERMTNFDKNLPNEKVLPKHSLLYEYFTVYNELTKVKYVTEGMRKPAFLSGEQKKAIVDLLFKTNRKVTVKQLKEDYFKKIECFDSVEISGVEDRFNASLGTYHDLLKIIKDKDFLDNEENEDILEDIVLTLTLFEDREMIEERLKTYAHLFDDKVMKQLKRRRYTGWGRLSRKLINGIRDKQSGKTILDFLKSDGFANRNFMQLIHDDSLTFKEDIQKAQVSGQGDSLHEHIANLAGSPAIKKGILQTVKVVDELVKVMGRHKPENIVIEMARENQTTQKGQKNSRERMKRIEEGIKELGSQILKEHPVENTQLQNEKLYLYYLQNGRDMYVDQELDINRLSDYDVDHIVPQSFLKDDSIDNKVLTRSDKARGKSDNVPSEEVVKKMKNYWRQLLNAKLITQRKFDNLTKAERGGLSELDKAGFIKRQLVETRQITKHVAQILDSRMNTKYDENDKLIREVKVITLKSKLVSDFRKDFQFYKVREINNYHHAHDAYLNAVVGTALIKKYPKLESEFVYGDYKVYDVRKMIAKSEQEIGKATAKYFFYSNIMNFFKTEITLANGEIRKRPLIETNGETGEIVWDKGRDFATVRKVLSMPQVNIVKKTEVQTGGFSKESILPKRNSDKLIARKKDWDPKKYGGFDSPTVAYSVLVVAKVEKGKSKKLKSVKELLGITIMERSSFEKNPIDFLEAKGYKEVKKDLIIKLPKYSLFELENGRKRMLASAGELQKGNELALPSKYVNFLYLASHYEKLKGSPEDNEQKQLFVEQHKHYLDEIIEQISEFSKRVILADANLDKVLSAYNKHRDKPIREQAENIIHLFTLTNLGAPAAFKYFDTTIDRKRYTSTKEVLDATLIHQSITGLYETRIDLSQLGGDGGGGGGGTLNIEDEYRLHETSKGPDVPLGSTWLSDFPQAWAETGGMGLAVRQAPLIIPLKATSTPVSIKQYPMSQEARLGIKPHIQRLLDQGILVPCQSPWNTPLLPVKKPGTNDYRPVQDLREVNKRVEDIHPTVPNPYNLLSGLPPSHQWYTVLDLKDAFFCLRLHPTSQSLFAFEWRDPEMGISGQLTWTRLPQGFKNSPTLFNEALHRDLADFRIQHPDLILLQYVDDLLLAATSELDCQQGTRALLQTLGDLGYRASAKKAQICQKQVKYLGYLLKEGQRWLTEARKETVMGQPTPKTPRQLREFLGKAGFCRLFIPGFAEMAAPLYPLTKPGTLFEWGPDQQKAYQEIKQALLTAPALGLPDLTKPFELFVDEKQGYAKGVLTQKLGPWRRPVAYLSKKLDPVAAGWPPCLRMVAAIAVLTKDAGKLTMGQPLVILAPHAVEALVKQPPDRWLSNARMTHYQALLLDTDRVQFGPIVALNPATLLPLPEEGLQHDCLDILAEAHGTRPDLTDQPLPDADHTWYTDGSSFLQEGQRKAGAAVTTETEVVWAKALPAGTSAQRAELIALTQALKMAEGKKLNVYTDSRYAFATAHIHGEIYRRRGWLTSEGKEIKNKDEILALLKALFLPKRLSIIHCPGHQKGNRAEARGNRMADQAAREVATRETPETSTLLAGKRTADGSEFEKRTADGSEFESPKKKAKVE

SEQ ID NO: 2597 - protein, 2096 aa, synthetic construct
MPAAKRVKLDGGDKKYSIGLDIGTNSVGWAVITDEYKVPSKKFKVLGNTDRHSIKKNLIGALLFDSGETAEATRLKRTARRRYTRRKNRICYLQEIFSNEMAKVDDSFFHRLEESFLVEEDKKHERHPIFGNIVDEVAYHEKYPTIYHLRKKLVDSTDKADLRLIYLALAHMIKFRGHFLIEGDLNPDNSDVDKLFIQLVQTYNQLFEENPINASGVDAKAILSARLSKSRRLENLIAQLPGEKKNGLFGNLIALSLGLTPNFKSNFDLAEDAKLQLSKDTYDDDLDNLLAQIGDQYADLFLAAKNLSDAILLSDILRVNTEITKAPLSASMIKRYDEHHQDLTLLKALVRQQLPEKYKEIFFDQSKNGYAGYIDGGASQEEFYKFIKPILEKMDGTEELLVKLNREDLLRKQRTFDNGSIPHQIHLGELHAILRRQEDFYPFLKDNREKIEKILTFRIPYYVGPLARGNSRFAWMTRKSEETITPWNFEEVVDKGASAQSFIERMTNFDKNLPNEKVLPKHSLLYEYFTVYNELTKVKYVTEGMRKPAFLSGEQKKAIVDLLFKTNRKVTVKQLKEDYFKKIECFDSVEISGVEDRFNASLGTYHDLLKIIKDKDFLDNEENEDILEDIVLTLTLFEDREMIEERLKTYAHLFDDKVMKQLKRRRYTGWGRLSRKLINGIRDKQSGKTILDFLKSDGFANRNFMQLIHDDSLTFKEDIQKAQVSGQGDSLHEHIANLAGSPAIKKGILQTVKVVDELVKVMGRHKPENIVIEMARENQTTQKGQKNSRERMKRIEEGIKELGSQILKEHPVENTQLQNEKLYLYYLQNGRDMYVDQELDINRLSDYDVDHIVPQSFLKDDSIDNKVLTRSDKARGKSDNVPSEEVVKKMKNYWRQLLNAKLITQRKFDNLTKAERGGLSELDKAGFIKRQLVETRQITKHVAQILDSRMNTKYDENDKLIREVKVITLKSKLVSDFRKDFQFYKVREINNYHHAHDAYLNAVVGTALIKKYPKLESEFVYGDYKVYDVRKMIAKSEQEIGKATAKYFFYSNIMNFFKTEITLANGEIRKRPLIETNGETGEIVWDKGRDFATVRKVLSMPQVNIVKKTEVQTGGFSKESILPKRNSDKLIARKKDWDPKKYGGFDSPTVAYSVLVVAKVEKGKSKKLKSVKELLGITIMERSSFEKNPIDFLEAKGYKEVKKDLIIKLPKYSLFELENGRKRMLASAGELQKGNELALPSKYVNFLYLASHYEKLKGSPEDNEQKQLFVEQHKHYLDEIIEQISEFSKRVILADANLDKVLSAYNKHRDKPIREQAENIIHLFTLTNLGAPAAFKYFDTTIDRKRYTSTKEVLDATLIHQSITGLYETRIDLSQLGGDGGGGGGGSEAAAKGGTLNIEDEYRLHETSKGPDVPLGSTWLSDFPQAWAETGGMGLAVRQAPLIIPLKATSTPVSIKQYPMSQEARLGIKPHIQRLLDQGILVPCQSPWNTPLLPVKKPGTNDYRPVQDLREVNKRVEDIHPTVPNPYNLLSGLPPSHQWYTVLDLKDAFFCLRLHPTSQSLFAFEWRDPEMGISGQLTWTRLPQGFKNSPTLFNEALHRDLADFRIQHPDLILLQYVDDLLLAATSELDCQQGTRALLQTLGDLGYRASAKKAQICQKQVKYLGYLLKEGQRWLTEARKETVMGQPTPKTPRQLREFLGKAGFCRLFIPGFAEMAAPLYPLTKPGTLFEWGPDQQKAYQEIKQALLTAPALGLPDLTKPFELFVDEKQGYAKGVLTQKLGPWRRPVAYLSKKLDPVAAGWPPCLRMVAAIAVLTKDAGKLTMGQPLVILAPHAVEALVKQPPDRWLSNARMTHYQALLLDTDRVQFGPIVALNPATLLPLPEEGLQHDCLDILAEAHGTRPDLTDQPLPDADHTWYTDGSSFLQEGQRKAGAAVTTETEVVWAKALPAGTSAQRAELIALTQALKMAEGKKLNVYTDSRYAFATAHIHGEIYRRRGWLTSEGKEIKNKDEILALLKALFLPKRLSIIHCPGHQKGNRAEARGNRMADQAAREVATRETPETSTLLAGKRTADGSEFEKRTADGSEFESPKKKAKVE

SEQ ID NO: 2598 - protein, 2110 aa, synthetic construct
MPAAKRVKLDGGDKKYSIGLDIGTNSVGWAVITDEYKVPSKKFKVLGNTDRHSIKKNLIGALLFDSGETAEATRLKRTARRRYTRRKNRICYLQEIFSNEMAKVDDSFFHRLEESFLVEEDKKHERHPIFGNIVDEVAYHEKYPTIYHLRKKLVDSTDKADLRLIYLALAHMIKFRGHFLIEGDLNPDNSDVDKLFIQLVQTYNQLFEENPINASGVDAKAILSARLSKSRRLENLIAQLPGEKKNGLFGNLIALSLGLTPNFKSNFDLAEDAKLQLSKDTYDDDLDNLLAQIGDQYADLFLAAKNLSDAILLSDILRVNTEITKAPLSASMIKRYDEHHQDLTLLKALVRQQLPEKYKEIFFDQSKNGYAGYIDGGASQEEFYKFIKPILEKMDGTEELLVKLNREDLLRKQRTFDNGSIPHQIHLGELHAILRRQEDFYPFLKDNREKIEKILTFRIPYYVGPLARGNSRFAWMTRKSEETITPWNFEEVVDKGASAQSFIERMTNFDKNLPNEKVLPKHSLLYEYFTVYNELTKVKYVTEGMRKPAFLSGEQKKAIVDLLFKTNRKVTVKQLKEDYFKKIECFDSVEISGVEDRFNASLGTYHDLLKIIKDKDFLDNEENEDILEDIVLTLTLFEDREMIEERLKTYAHLFDDKVMKQLKRRRYTGWGRLSRKLINGIRDKQSGKTILDFLKSDGFANRNFMQLIHDDSLTFKEDIQKAQVSGQGDSLHEHIANLAGSPAIKKGILQTVKVVDELVKVMGRHKPENIVIEMARENQTTQKGQKNSRERMKRIEEGIKELGSQILKEHPVENTQLQNEKLYLYYLQNGRDMYVDQELDINRLSDYDVDHIVPQSFLKDDSIDNKVLTRSDKARGKSDNVPSEEVVKKMKNYWRQLLNAKLITQRKFDNLTKAERGGLSELDKAGFIKRQLVETRQITKHVAQILDSRMNTKYDENDKLIREVKVITLKSKLVSDFRKDFQFYKVREINNYHHAHDAYLNAVVGTALIKKYPKLESEFVYGDYKVYDVRKMIAKSEQEIGKATAKYFFYSNIMNFFKTEITLANGEIRKRPLIETNGETGEIVWDKGRDFATVRKVLSMPQVNIVKKTEVQTGGFSKESILPKRNSDKLIARKKDWDPKKYGGFDSPTVAYSVLVVAKVEKGKSKKLKSVKELLGITIMERSSFEKNPIDFLEAKGYKEVKKDLIIKLPKYSLFELENGRKRMLASAGELQKGNELALPSKYVNFLYLASHYEKLKGSPEDNEQKQLFVEQHKHYLDEIIEQISEFSKRVILADANLDKVLSAYNKHRDKPIREQAENIIHLFTLTNLGAPAAFKYFDTTIDRKRYTSTKEVLDATLIHQSITGLYETRIDLSQLGGDGGGGGGSGGGGSGGGGSGGGGSGGGGSGGTLNIEDEYRLHETSKGPDVPLGSTWLSDFPQAWAETGGMGLAVRQAPLIIPLKATSTPVSIKQYPMSQEARLGIKPHIQRLLDQGILVPCQSPWNTPLLPVKKPGTNDYRPVQDLREVNKRVEDIHPTVPNPYNLLSGLPPSHQWYTVLDLKDAFFCLRLHPTSQSLFAFEWRDPEMGISGQLTWTRLPQGFKNSPTLFNEALHRDLADFRIQHPDLILLQYVDDLLLAATSELDCQQGTRALLQTLGDLGYRASAKKAQICQKQVKYLGYLLKEGQRWLTEARKETVMGQPTPKTPRQLREFLGKAGFCRLFIPGFAEMAAPLYPLTKPGTLFEWGPDQQKAYQEIKQALLTAPALGLPDLTKPFELFVDEKQGYAKGVLTQKLGPWRRPVAYLSKKLDPVAAGWPPCLRMVAAIAVLTKDAGKLTMGQPLVILAPHAVEALVKQPPDRWLSNARMTHYQALLLDTDRVQFGPIVALNPATLLPLPEEGLQHDCLDILAEAHGTRPDLTDQPLPDADHTWYTDGSSFLQEGQRKAGAAVTTETEVVWAKALPAGTSAQRAELIALTQALKMAEGKKLNVYTDSRYAFATAHIHGEIYRRRGWLTSEGKEIKNKDEILALLKALFLPKRLSIIHCPGHQKGNRAEARGNRMADQAAREVATRETPETSTLLAGKRTADGSEFEKRTADGSEFESPKKKAKVE

SEQ ID NO: 2599 - protein, 2096 aa, synthetic construct
MPAAKRVKLDGGDKKYSIGLDIGTNSVGWAVITDEYKVPSKKFKVLGNTDRHSIKKNLIGALLFDSGETAEATRLKRTARRRYTRRKNRICYLQEIFSNEMAKVDDSFFHRLEESFLVEEDKKHERHPIFGNIVDEVAYHEKYPTIYHLRKKLVDSTDKADLRLIYLALAHMIKFRGHFLIEGDLNPDNSDVDKLFIQLVQTYNQLFEENPINASGVDAKAILSARLSKSRRLENLIAQLPGEKKNGLFGNLIALSLGLTPNFKSNFDLAEDAKLQLSKDTYDDDLDNLLAQIGDQYADLFLAAKNLSDAILLSDILRVNTEITKAPLSASMIKRYDEHHQDLTLLKALVRQQLPEKYKEIFFDQSKNGYAGYIDGGASQEEFYKFIKPILEKMDGTEELLVKLNREDLLRKQRTFDNGSIPHQIHLGELHAILRRQEDFYPFLKDNREKIEKILTFRIPYYVGPLARGNSRFAWMTRKSEETITPWNFEEVVDKGASAQSFIERMTNFDKNLPNEKVLPKHSLLYEYFTVYNELTKVKYVTEGMRKPAFLSGEQKKAIVDLLFKTNRKVTVKQLKEDYFKKIECFDSVEISGVEDRFNASLGTYHDLLKIIKDKDFLDNEENEDILEDIVLTLTLFEDREMIEERLKTYAHLFDDKVMKQLKRRRYTGWGRLSRKLINGIRDKQSGKTILDFLKSDGFANRNFMQLIHDDSLTFKEDIQKAQVSGQGDSLHEHIANLAGSPAIKKGILQTVKVVDELVKVMGRHKPENIVIEMARENQTTQKGQKNSRERMKRIEEGIKELGSQILKEHPVENTQLQNEKLYLYYLQNGRDMYVDQELDINRLSDYDVDHIVPQSFLKDDSIDNKVLTRSDKARGKSDNVPSEEVVKKMKNYWRQLLNAKLITQRKFDNLTKAERGGLSELDKAGFIKRQLVETRQITKHVAQILDSRMNTKYDENDKLIREVKVITLKSKLVSDFRKDFQFYKVREINNYHHAHDAYLNAVVGTALIKKYPKLESEFVYGDYKVYDVRKMIAKSEQEIGKATAKYFFYSNIMNFFKTEITLANGEIRKRPLIETNGETGEIVWDKGRDFATVRKVLSMPQVNIVKKTEVQTGGFSKESILPKRNSDKLIARKKDWDPKKYGGFDSPTVAYSVLVVAKVEKGKSKKLKSVKELLGITIMERSSFEKNPIDFLEAKGYKEVKKDLIIKLPKYSLFELENGRKRMLASAGELQKGNELALPSKYVNFLYLASHYEKLKGSPEDNEQKQLFVEQHKHYLDEIIEQISEFSKRVILADANLDKVLSAYNKHRDKPIREQAENIIHLFTLTNLGAPAAFKYFDTTIDRKRYTSTKEVLDATLIHQSITGLYETRIDLSQLGGDGGGSSPAPEAAAKGGTLNIEDEYRLHETSKGPDVPLGSTWLSDFPQAWAETGGMGLAVRQAPLIIPLKATSTPVSIKQYPMSQEARLGIKPHIQRLLDQGILVPCQSPWNTPLLPVKKPGTNDYRPVQDLREVNKRVEDIHPTVPNPYNLLSGLPPSHQWYTVLDLKDAFFCLRLHPTSQSLFAFEWRDPEMGISGQLTWTRLPQGFKNSPTLFNEALHRDLADFRIQHPDLILLQYVDDLLLAATSELDCQQGTRALLQTLGDLGYRASAKKAQICQKQVKYLGYLLKEGQRWLTEARKETVMGQPTPKTPRQLREFLGKAGFCRLFIPGFAEMAAPLYPLTKPGTLFEWGPDQQKAYQEIKQALLTAPALGLPDLTKPFELFVDEKQGYAKGVLTQKLGPWRRPVAYLSKKLDPVAAGWPPCLRMVAAIAVLTKDAGKLTMGQPLVILAPHAVEALVKQPPDRWLSNARMTHYQALLLDTDRVQFGPIVALNPATLLPLPEEGLQHDCLDILAEAHGTRPDLTDQPLPDADHTWYTDGSSFLQEGQRKAGAAVTTETEVVWAKALPAGTSAQRAELIALTQALKMAEGKKLNVYTDSRYAFATAHIHGEIYRRRGWLTSEGKEIKNKDEILALLKALFLPKRLSIIHCPGHQKGNRAEARGNRMADQAAREVATRETPETSTLLAGKRTADGSEFEKRTADGSEFESPKKKAKVE

SEQ ID NO: 2600 - protein, 2093 aa, synthetic construct
MPAAKRVKLDGGDKKYSIGLDIGTNSVGWAVITDEYKVPSKKFKVLGNTDRHSIKKNLIGALLFDSGETAEATRLKRTARRRYTRRKNRICYLQEIFSNEMAKVDDSFFHRLEESFLVEEDKKHERHPIFGNIVDEVAYHEKYPTIYHLRKKLVDSTDKADLRLIYLALAHMIKFRGHFLIEGDLNPDNSDVDKLFIQLVQTYNQLFEENPINASGVDAKAILSARLSKSRRLENLIAQLPGEKKNGLFGNLIALSLGLTPNFKSNFDLAEDAKLQLSKDTYDDDLDNLLAQIGDQYADLFLAAKNLSDAILLSDILRVNTEITKAPLSASMIKRYDEHHQDLTLLKALVRQQLPEKYKEIFFDQSKNGYAGYIDGGASQEEFYKFIKPILEKMDGTEELLVKLNREDLLRKQRTFDNGSIPHQIHLGELHAILRRQEDFYPFLKDNREKIEKILTFRIPYYVGPLARGNSRFAWMTRKSEETITPWNFEEVVDKGASAQSFIERMTNFDKNLPNEKVLPKHSLLYEYFTVYNELTKVKYVTEGMRKPAFLSGEQKKAIVDLLFKTNRKVTVKQLKEDYFKKIECFDSVEISGVEDRFNASLGTYHDLLKIIKDKDFLDNEENEDILEDIVLTLTLFEDREMIEERLKTYAHLFDDKVMKQLKRRRYTGWGRLSRKLINGIRDKQSGKTILDFLKSDGFANRNFMQLIHDDSLTFKEDIQKAQVSGQGDSLHEHIANLAGSPAIKKGILQTVKVVDELVKVMGRHKPENIVIEMARENQTTQKGQKNSRERMKRIEEGIKELGSQILKEHPVENTQLQNEKLYLYYLQNGRDMYVDQELDINRLSDYDVDHIVPQSFLKDDSIDNKVLTRSDKARGKSDNVPSEEVVKKMKNYWRQLLNAKLITQRKFDNLTKAERGGLSELDKAGFIKRQLVETRQITKHVAQILDSRMNTKYDENDKLIREVKVITLKSKLVSDFRKDFQFYKVREINNYHHAHDAYLNAVVGTALIKKYPKLESEFVYGDYKVYDVRKMIAKSEQEIGKATAKYFFYSNIMNFFKTEITLANGEIRKRPLIETNGETGEIVWDKGRDFATVRKVLSMPQVNIVKKTEVQTGGFSKESILPKRNSDKLIARKKDWDPKKYGGFDSPTVAYSVLVVAKVEKGKSKKLKSVKELLGITIMERSSFEKNPIDFLEAKGYKEVKKDLIIKLPKYSLFELENGRKRMLASAGELQKGNELALPSKYVNFLYLASHYEKLKGSPEDNEQKQLFVEQHKHYLDEIIEQISEFSKRVILADANLDKVLSAYNKHRDKPIREQAENIIHLFTLTNLGAPAAFKYFDTTIDRKRYTSTKEVLDATLIHQSITGLYETRIDLSQLGGDGGGGSEAAAKGGTLNIEDEYRLHETSKGPDVPLGSTWLSDFPQAWAETGGMGLAVRQAPLIIPLKATSTPVSIKQYPMSQEARLGIKPHIQRLLDQGILVPCQSPWNTPLLPVKKPGTNDYRPVQDLREVNKRVEDIHPTVPNPYNLLSGLPPSHQWYTVLDLKDAFFCLRLHPTSQSLFAFEWRDPEMGISGQLTWTRLPQGFKNSPTLFNEALHRDLADFRIQHPDLILLQYVDDLLLAATSELDCQQGTRALLQTLGDLGYRASAKKAQICQKQVKYLGYLLKEGQRWLTEARKETVMGQPTPKTPRQLREFLGKAGFCRLFIPGFAEMAAPLYPLTKPGTLFEWGPDQQKAYQEIKQALLTAPALGLPDLTKPFELFVDEKQGYAKGVLTQKLGPWRRPVAYLSKKLDPVAAGWPPCLRMVAAIAVLTKDAGKLTMGQPLVILAPHAVEALVKQPPDRWLSNARMTHYQALLLDTDRVQFGPIVALNPATLLPLPEEGLQHDCLDILAEAHGTRPDLTDQPLPDADHTWYTDGSSFLQEGQRKAGAAVTTETEVVWAKALPAGTSAQRAELIALTQALKMAEGKKLNVYTDSRYAFATAHIHGEIYRRRGWLTSEGKEIKNKDEILALLKALFLPKRLSIIHCPGHQKGNRAEARGNRMADQAAREVATRETPETSTLLAGKRTADGSEFEKRTADGSEFESPKKKAKVE

SEQ ID NO: 2601 - protein, 2094 aa, synthetic construct
MPAAKRVKLDGGDKKYSIGLDIGTNSVGWAVITDEYKVPSKKFKVLGNTDRHSIKKNLIGALLFDSGETAEATRLKRTARRRYTRRKNRICYLQEIFSNEMAKVDDSFFHRLEESFLVEEDKKHERHPIFGNIVDEVAYHEKYPTIYHLRKKLVDSTDKADLRLIYLALAHMIKFRGHFLIEGDLNPDNSDVDKLFIQLVQTYNQLFEENPINASGVDAKAILSARLSKSRRLENLIAQLPGEKKNGLFGNLIALSLGLTPNFKSNFDLAEDAKLQLSKDTYDDDLDNLLAQIGDQYADLFLAAKNLSDAILLSDILRVNTEITKAPLSASMIKRYDEHHQDLTLLKALVRQQLPEKYKEIFFDQSKNGYAGYIDGGASQEEFYKFIKPILEKMDGTEELLVKLNREDLLRKQRTFDNGSIPHQIHLGELHAILRRQEDFYPFLKDNREKIEKILTFRIPYYVGPLARGNSRFAWMTRKSEETITPWNFEEVVDKGASAQSFIERMTNFDKNLPNEKVLPKHSLLYEYFTVYNELTKVKYVTEGMRKPAFLSGEQKKAIVDLLFKTNRKVTVKQLKEDYFKKIECFDSVEISGVEDRFNASLGTYHDLLKIIKDKDFLDNEENEDILEDIVLTLTLFEDREMIEERLKTYAHLFDDKVMKQLKRRRYTGWGRLSRKLINGIRDKQSGKTILDFLKSDGFANRNFMQLIHDDSLTFKEDIQKAQVSGQGDSLHEHIANLAGSPAIKKGILQTVKVVDELVKVMGRHKPENIVIEMARENQTTQKGQKNSRERMKRIEEGIKELGSQILKEHPVENTQLQNEKLYLYYLQNGRDMYVDQELDINRLSDYDVDHIVPQSFLKDDSIDNKVLTRSDKARGKSDNVPSEEVVKKMKNYWRQLLNAKLITQRKFDNLTKAERGGLSELDKAGFIKRQLVETRQITKHVAQILDSRMNTKYDENDKLIREVKVITLKSKLVSDFRKDFQFYKVREINNYHHAHDAYLNAVVGTALIKKYPKLESEFVYGDYKVYDVRKMIAKSEQEIGKATAKYFFYSNIMNFFKTEITLANGEIRKRPLIETNGETGEIVWDKGRDFATVRKVLSMPQVNIVKKTEVQTGGFSKESILPKRNSDKLIARKKDWDPKKYGGFDSPTVAYSVLVVAKVEKGKSKKLKSVKELLGITIMERSSFEKNPIDFLEAKGYKEVKKDLIIKLPKYSLFELENGRKRMLASAGELQKGNELALPSKYVNFLYLASHYEKLKGSPEDNEQKQLFVEQHKHYLDEIIEQISEFSKRVILADANLDKVLSAYNKHRDKPIREQAENIIHLFTLTNLGAPAAFKYFDTTIDRKRYTSTKEVLDATLIHQSITGLYETRIDLSQLGGDGGGGSGGGGSSGGTLNIEDEYRLHETSKGPDVPLGSTWLSDFPQAWAETGGMGLAVRQAPLIIPLKATSTPVSIKQYPMSQEARLGIKPHIQRLLDQGILVPCQSPWNTPLLPVKKPGTNDYRPVQDLREVNKRVEDIHPTVPNPYNLLSGLPPSHQWYTVLDLKDAFFCLRLHPTSQSLFAFEWRDPEMGISGQLTWTRLPQGFKNSPTLFNEALHRDLADFRIQHPDLILLQYVDDLLLAATSELDCQQGTRALLQTLGDLGYRASAKKAQICQKQVKYLGYLLKEGQRWLTEARKETVMGQPTPKTPRQLREFLGKAGFCRLFIPGFAEMAAPLYPLTKPGTLFEWGPDQQKAYQEIKQALLTAPALGLPDLTKPFELFVDEKQGYAKGVLTQKLGPWRRPVAYLSKKLDPVAAGWPPCLRMVAAIAVLTKDAGKLTMGQPLVILAPHAVEALVKQPPDRWLSNARMTHYQALLLDTDRVQFGPIVALNPATLLPLPEEGLQHDCLDILAEAHGTRPDLTDQPLPDADHTWYTDGSSFLQEGQRKAGAAVTTETEVVWAKALPAGTSAQRAELIALTQALKMAEGKKLNVYTDSRYAFATAHIHGEIYRRRGWLTSEGKEIKNKDEILALLKALFLPKRLSIIHCPGHQKGNRAEARGNRMADQAAREVATRETPETSTLLAGKRTADGSEFEKRTADGSEFESPKKKAKVE

SEQ ID NO: 2602 - protein, 2089 aa, synthetic construct
MPAAKRVKLDGGDKKYSIGLDIGTNSVGWAVITDEYKVPSKKFKVLGNTDRHSIKKNLIGALLFDSGETAEATRLKRTARRRYTRRKNRICYLQEIFSNEMAKVDDSFFHRLEESFLVEEDKKHERHPIFGNIVDEVAYHEKYPTIYHLRKKLVDSTDKADLRLIYLALAHMIKFRGHFLIEGDLNPDNSDVDKLFIQLVQTYNQLFEENPINASGVDAKAILSARLSKSRRLENLIAQLPGEKKNGLFGNLIALSLGLTPNFKSNFDLAEDAKLQLSKDTYDDDLDNLLAQIGDQYADLFLAAKNLSDAILLSDILRVNTEITKAPLSASMIKRYDEHHQDLTLLKALVRQQLPEKYKEIFFDQSKNGYAGYIDGGASQEEFYKFIKPILEKMDGTEELLVKLNREDLLRKQRTFDNGSIPHQIHLGELHAILRRQEDFYPFLKDNREKIEKILTFRIPYYVGPLARGNSRFAWMTRKSEETITPWNFEEVVDKGASAQSFIERMTNFDKNLPNEKVLPKHSLLYEYFTVYNELTKVKYVTEGMRKPAFLSGEQKKAIVDLLFKTNRKVTVKQLKEDYFKKIECFDSVEISGVEDRFNASLGTYHDLLKIIKDKDFLDNEENEDILEDIVLTLTLFEDREMIEERLKTYAHLFDDKVMKQLKRRRYTGWGRLSRKLINGIRDKQSGKTILDFLKSDGFANRNFMQLIHDDSLTFKEDIQKAQVSGQGDSLHEHIANLAGSPAIKKGILQTVKVVDELVKVMGRHKPENIVIEMARENQTTQKGQKNSRERMKRIEEGIKELGSQILKEHPVENTQLQNEKLYLYYLQNGRDMYVDQELDINRLSDYDVDHIVPQSFLKDDSIDNKVLTRSDKARGKSDNVPSEEVVKKMKNYWRQLLNAKLITQRKFDNLTKAERGGLSELDKAGFIKRQLVETRQITKHVAQILDSRMNTKYDENDKLIREVKVITLKSKLVSDFRKDFQFYKVREINNYHHAHDAYLNAVVGTALIKKYPKLESEFVYGDYKVYDVRKMIAKSEQEIGKATAKYFFYSNIMNFFKTEITLANGEIRKRPLIETNGETGEIVWDKGRDFATVRKVLSMPQVNIVKKTEVQTGGFSKESILPKRNSDKLIARKKDWDPKKYGGFDSPTVAYSVLVVAKVEKGKSKKLKSVKELLGITIMERSSFEKNPIDFLEAKGYKEVKKDLIIKLPKYSLFELENGRKRMLASAGELQKGNELALPSKYVNFLYLASHYEKLKGSPEDNEQKQLFVEQHKHYLDEIIEQISEFSKRVILADANLDKVLSAYNKHRDKPIREQAENIIHLFTLTNLGAPAAFKYFDTTIDRKRYTSTKEVLDATLIHQSITGLYETRIDLSQLGGDGGGGGGGGTLNIEDEYRLHETSKGPDVPLGSTWLSDFPQAWAETGGMGLAVRQAPLIIPLKATSTPVSIKQYPMSQEARLGIKPHIQRLLDQGILVPCQSPWNTPLLPVKKPGTNDYRPVQDLREVNKRVEDIHPTVPNPYNLLSGLPPSHQWYTVLDLKDAFFCLRLHPTSQSLFAFEWRDPEMGISGQLTWTRLPQGFKNSPTLFNEALHRDLADFRIQHPDLILLQYVDDLLLAATSELDCQQGTRALLQTLGDLGYRASAKKAQICQKQVKYLGYLLKEGQRWLTEARKETVMGQPTPKTPRQLREFLGKAGFCRLFIPGFAEMAAPLYPLTKPGTLFEWGPDQQKAYQEIKQALLTAPALGLPDLTKPFELFVDEKQGYAKGVLTQKLGPWRRPVAYLSKKLDPVAAGWPPCLRMVAAIAVLTKDAGKLTMGQPLVILAPHAVEALVKQPPDRWLSNARMTHYQALLLDTDRVQFGPIVALNPATLLPLPEEGLQHDCLDILAEAHGTRPDLTDQPLPDADHTWYTDGSSFLQEGQRKAGAAVTTETEVVWAKALPAGTSAQRAELIALTQALKMAEGKKLNVYTDSRYAFATAHIHGEIYRRRGWLTSEGKEIKNKDEILALLKALFLPKRLSIIHCPGHQKGNRAEARGNRMADQAAREVATRETPETSTLLAGKRTADGSEFEKRTADGSEFESPKKKAKVE

SEQ ID NO: 2603 - protein, 2096 aa, synthetic construct
MPAAKRVKLDGGDKKYSIGLDIGTNSVGWAVITDEYKVPSKKFKVLGNTDRHSIKKNLIGALLFDSGETAEATRLKRTARRRYTRRKNRICYLQEIFSNEMAKVDDSFFHRLEESFLVEEDKKHERHPIFGNIVDEVAYHEKYPTIYHLRKKLVDSTDKADLRLIYLALAHMIKFRGHFLIEGDLNPDNSDVDKLFIQLVQTYNQLFEENPINASGVDAKAILSARLSKSRRLENLIAQLPGEKKNGLFGNLIALSLGLTPNFKSNFDLAEDAKLQLSKDTYDDDLDNLLAQIGDQYADLFLAAKNLSDAILLSDILRVNTEITKAPLSASMIKRYDEHHQDLTLLKALVRQQLPEKYKEIFFDQSKNGYAGYIDGGASQEEFYKFIKPILEKMDGTEELLVKLNREDLLRKQRTFDNGSIPHQIHLGELHAILRRQEDFYPFLKDNREKIEKILTFRIPYYVGPLARGNSRFAWMTRKSEETITPWNFEEVVDKGASAQSFIERMTNFDKNLPNEKVLPKHSLLYEYFTVYNELTKVKYVTEGMRKPAFLSGEQKKAIVDLLFKTNRKVTVKQLKEDYFKKIECFDSVEISGVEDRFNASLGTYHDLLKIIKDKDFLDNEENEDILEDIVLTLTLFEDREMIEERLKTYAHLFDDKVMKQLKRRRYTGWGRLSRKLINGIRDKQSGKTILDFLKSDGFANRNFMQLIHDDSLTFKEDIQKAQVSGQGDSLHEHIANLAGSPAIKKGILQTVKVVDELVKVMGRHKPENIVIEMARENQTTQKGQKNSRERMKRIEEGIKELGSQILKEHPVENTQLQNEKLYLYYLQNGRDMYVDQELDINRLSDYDVDHIVPQSFLKDDSIDNKVLTRSDKARGKSDNVPSEEVVKKMKNYWRQLLNAKLITQRKFDNLTKAERGGLSELDKAGFIKRQLVETRQITKHVAQILDSRMNTKYDENDKLIREVKVITLKSKLVSDFRKDFQFYKVREINNYHHAHDAYLNAVVGTALIKKYPKLESEFVYGDYKVYDVRKMIAKSEQEIGKATAKYFFYSNIMNFFKTEITLANGEIRKRPLIETNGETGEIVWDKGRDFATVRKVLSMPQVNIVKKTEVQTGGFSKESILPKRNSDKLIARKKDWDPKKYGGFDSPTVAYSVLVVAKVEKGKSKKLKSVKELLGITIMERSSFEKNPIDFLEAKGYKEVKKDLIIKLPKYSLFELENGRKRMLASAGELQKGNELALPSKYVNFLYLASHYEKLKGSPEDNEQKQLFVEQHKHYLDEIIEQISEFSKRVILADANLDKVLSAYNKHRDKPIREQAENIIHLFTLTNLGAPAAFKYFDTTIDRKRYTSTKEVLDATLIHQSITGLYETRIDLSQLGGDGGGGSGGGEAAAKGGTLNIEDEYRLHETSKGPDVPLGSTWLSDFPQAWAETGGMGLAVRQAPLIIPLKATSTPVSIKQYPMSQEARLGIKPHIQRLLDQGILVPCQSPWNTPLLPVKKPGTNDYRPVQDLREVNKRVEDIHPTVPNPYNLLSGLPPSHQWYTVLDLKDAFFCLRLHPTSQSLFAFEWRDPEMGISGQLTWTRLPQGFKNSPTLFNEALHRDLADFRIQHPDLILLQYVDDLLLAATSELDCQQGTRALLQTLGDLGYRASAKKAQICQKQVKYLGYLLKEGQRWLTEARKETVMGQPTPKTPRQLREFLGKAGFCRLFIPGFAEMAAPLYPLTKPGTLFEWGPDQQKAYQEIKQALLTAPALGLPDLTKPFELFVDEKQGYAKGVLTQKLGPWRRPVAYLSKKLDPVAAGWPPCLRMVAAIAVLTKDAGKLTMGQPLVILAPHAVEALVKQPPDRWLSNARMTHYQALLLDTDRVQFGPIVALNPATLLPLPEEGLQHDCLDILAEAHGTRPDLTDQPLPDADHTWYTDGSSFLQEGQRKAGAAVTTETEVVWAKALPAGTSAQRAELIALTQALKMAEGKKLNVYTDSRYAFATAHIHGEIYRRRGWLTSEGKEIKNKDEILALLKALFLPKRLSIIHCPGHQKGNRAEARGNRMADQAAREVATRETPETSTLLAGKRTADGSEFEKRTADGSEFESPKKKAKVE

SEQ ID NO: 2604 - protein, 2091 aa, synthetic construct
MPAAKRVKLDGGDKKYSIGLDIGTNSVGWAVITDEYKVPSKKFKVLGNTDRHSIKKNLIGALLFDSGETAEATRLKRTARRRYTRRKNRICYLQEIFSNEMAKVDDSFFHRLEESFLVEEDKKHERHPIFGNIVDEVAYHEKYPTIYHLRKKLVDSTDKADLRLIYLALAHMIKFRGHFLIEGDLNPDNSDVDKLFIQLVQTYNQLFEENPINASGVDAKAILSARLSKSRRLENLIAQLPGEKKNGLFGNLIALSLGLTPNFKSNFDLAEDAKLQLSKDTYDDDLDNLLAQIGDQYADLFLAAKNLSDAILLSDILRVNTEITKAPLSASMIKRYDEHHQDLTLLKALVRQQLPEKYKEIFFDQSKNGYAGYIDGGASQEEFYKFIKPILEKMDGTEELLVKLNREDLLRKQRTFDNGSIPHQIHLGELHAILRRQEDFYPFLKDNREKIEKILTFRIPYYVGPLARGNSRFAWMTRKSEETITPWNFEEVVDKGASAQSFIERMTNFDKNLPNEKVLPKHSLLYEYFTVYNELTKVKYVTEGMRKPAFLSGEQKKAIVDLLFKTNRKVTVKQLKEDYFKKIECFDSVEISGVEDRFNASLGTYHDLLKIIKDKDFLDNEENEDILEDIVLTLTLFEDREMIEERLKTYAHLFDDKVMKQLKRRRYTGWGRLSRKLINGIRDKQSGKTILDFLKSDGFANRNFMQLIHDDSLTFKEDIQKAQVSGQGDSLHEHIANLAGSPAIKKGILQTVKVVDELVKVMGRHKPENIVIEMARENQTTQKGQKNSRERMKRIEEGIKELGSQILKEHPVENTQLQNEKLYLYYLQNGRDMYVDQELDINRLSDYDVDHIVPQSFLKDDSIDNKVLTRSDKARGKSDNVPSEEVVKKMKNYWRQLLNAKLITQRKFDNLTKAERGGLSELDKAGFIKRQLVETRQITKHVAQILDSRMNTKYDENDKLIREVKVITLKSKLVSDFRKDFQFYKVREINNYHHAHDAYLNAVVGTALIKKYPKLESEFVYGDYKVYDVRKMIAKSEQEIGKATAKYFFYSNIMNFFKTEITLANGEIRKRPLIETNGETGEIVWDKGRDFATVRKVLSMPQVNIVKKTEVQTGGFSKESILPKRNSDKLIARKKDWDPKKYGGFDSPTVAYSVLVVAKVEKGKSKKLKSVKELLGITIMERSSFEKNPIDFLEAKGYKEVKKDLIIKLPKYSLFELENGRKRMLASAGELQKGNELALPSKYVNFLYLASHYEKLKGSPEDNEQKQLFVEQHKHYLDEIIEQISEFSKRVILADANLDKVLSAYNKHRDKPIREQAENIIHLFTLTNLGAPAAFKYFDTTIDRKRYTSTKEVLDATLIHQSITGLYETRIDLSQLGGDGGGGSGGSGGTLNIEDEYRLHETSKGPDVPLGSTWLSDFPQAWAETGGMGLAVRQAPLIIPLKATSTPVSIKQYPMSQEARLGIKPHIQRLLDQGILVPCQSPWNTPLLPVKKPGTNDYRPVQDLREVNKRVEDIHPTVPNPYNLLSGLPPSHQWYTVLDLKDAFFCLRLHPTSQSLFAFEWRDPEMGISGQLTWTRLPQGFKNSPTLFNEALHRDLADFRIQHPDLILLQYVDDLLLAATSELDCQQGTRALLQTLGDLGYRASAKKAQICQKQVKYLGYLLKEGQRWLTEARKETVMGQPTPKTPRQLREFLGKAGFCRLFIPGFAEMAAPLYPLTKPGTLFEWGPDQQKAYQEIKQALLTAPALGLPDLTKPFELFVDEKQGYAKGVLTQKLGPWRRPVAYLSKKLDPVAAGWPPCLRMVAAIAVLTKDAGKLTMGQPLVILAPHAVEALVKQPPDRWLSNARMTHYQALLLDTDRVQFGPIVALNPATLLPLPEEGLQHDCLDILAEAHGTRPDLTDQPLPDADHTWYTDGSSFLQEGQRKAGAAVTTETEVVWAKALPAGTSAQRAELIALTQALKMAEGKKLNVYTDSRYAFATAHIHGEIYRRRGWLTSEGKEIKNKDEILALLKALFLPKRLSIIHCPGHQKGNRAEARGNRMADQAAREVATRETPETSTLLAGKRTADGSEFEKRTADGSEFESPKKKAKVE

SEQ ID NO: 2605 - protein, 2094 aa, synthetic construct
MPAAKRVKLDGGDKKYSIGLDIGTNSVGWAVITDEYKVPSKKFKVLGNTDRHSIKKNLIGALLFDSGETAEATRLKRTARRRYTRRKNRICYLQEIFSNEMAKVDDSFFHRLEESFLVEEDKKHERHPIFGNIVDEVAYHEKYPTIYHLRKKLVDSTDKADLRLIYLALAHMIKFRGHFLIEGDLNPDNSDVDKLFIQLVQTYNQLFEENPINASGVDAKAILSARLSKSRRLENLIAQLPGEKKNGLFGNLIALSLGLTPNFKSNFDLAEDAKLQLSKDTYDDDLDNLLAQIGDQYADLFLAAKNLSDAILLSDILRVNTEITKAPLSASMIKRYDEHHQDLTLLKALVRQQLPEKYKEIFFDQSKNGYAGYIDGGASQEEFYKFIKPILEKMDGTEELLVKLNREDLLRKQRTFDNGSIPHQIHLGELHAILRRQEDFYPFLKDNREKIEKILTFRIPYYVGPLARGNSRFAWMTRKSEETITPWNFEEVVDKGASAQSFIERMTNFDKNLPNEKVLPKHSLLYEYFTVYNELTKVKYVTEGMRKPAFLSGEQKKAIVDLLFKTNRKVTVKQLKEDYFKKIECFDSVEISGVEDRFNASLGTYHDLLKIIKDKDFLDNEENEDILEDIVLTLTLFEDREMIEERLKTYAHLFDDKVMKQLKRRRYTGWGRLSRKLINGIRDKQSGKTILDFLKSDGFANRNFMQLIHDDSLTFKEDIQKAQVSGQGDSLHEHIANLAGSPAIKKGILQTVKVVDELVKVMGRHKPENIVIEMARENQTTQKGQKNSRERMKRIEEGIKELGSQILKEHPVENTQLQNEKLYLYYLQNGRDMYVDQELDINRLSDYDVDHIVPQSFLKDDSIDNKVLTRSDKARGKSDNVPSEEVVKKMKNYWRQLLNAKLITQRKFDNLTKAERGGLSELDKAGFIKRQLVETRQITKHVAQILDSRMNTKYDENDKLIREVKVITLKSKLVSDFRKDFQFYKVREINNYHHAHDAYLNAVVGTALIKKYPKLESEFVYGDYKVYDVRKMIAKSEQEIGKATAKYFFYSNIMNFFKTEITLANGEIRKRPLIETNGETGEIVWDKGRDFATVRKVLSMPQVNIVKKTEVQTGGFSKESILPKRNSDKLIARKKDWDPKKYGGFDSPTVAYSVLVVAKVEKGKSKKLKSVKELLGITIMERSSFEKNPIDFLEAKGYKEVKKDLIIKLPKYSLFELENGRKRMLASAGELQKGNELALPSKYVNFLYLASHYEKLKGSPEDNEQKQLFVEQHKHYLDEIIEQISEFSKRVILADANLDKVLSAYNKHRDKPIREQAENIIHLFTLTNLGAPAAFKYFDTTIDRKRYTSTKEVLDATLIHQSITGLYETRIDLSQLGGDGGGGGGGSGSSGGTLNIEDEYRLHETSKGPDVPLGSTWLSDFPQAWAETGGMGLAVRQAPLIIPLKATSTPVSIKQYPMSQEARLGIKPHIQRLLDQGILVPCQSPWNTPLLPVKKPGTNDYRPVQDLREVNKRVEDIHPTVPNPYNLLSGLPPSHQWYTVLDLKDAFFCLRLHPTSQSLFAFEWRDPEMGISGQLTWTRLPQGFKNSPTLFNEALHRDLADFRIQHPDLILLQYVDDLLLAATSELDCQQGTRALLQTLGDLGYRASAKKAQICQKQVKYLGYLLKEGQRWLTEARKETVMGQPTPKTPRQLREFLGKAGFCRLFIPGFAEMAAPLYPLTKPGTLFEWGPDQQKAYQEIKQALLTAPALGLPDLTKPFELFVDEKQGYAKGVLTQKLGPWRRPVAYLSKKLDPVAAGWPPCLRMVAAIAVLTKDAGKLTMGQPLVILAPHAVEALVKQPPDRWLSNARMTHYQALLLDTDRVQFGPIVALNPATLLPLPEEGLQHDCLDILAEAHGTRPDLTDQPLPDADHTWYTDGSSFLQEGQRKAGAAVTTETEVVWAKALPAGTSAQRAELIALTQALKMAEGKKLNVYTDSRYAFATAHIHGEIYRRRGWLTSEGKEIKNKDEILALLKALFLPKRLSIIHCPGHQKGNRAEARGNRMADQAAREVATRETPETSTLLAGKRTADGSEFEKRTADGSEFESPKKKAKVE

SEQ ID NO: 2606 - protein, 2091 aa, synthetic construct
MPAAKRVKLDGGDKKYSIGLDIGTNSVGWAVITDEYKVPSKKFKVLGNTDRHSIKKNLIGALLFDSGETAEATRLKRTARRRYTRRKNRICYLQEIFSNEMAKVDDSFFHRLEESFLVEEDKKHERHPIFGNIVDEVAYHEKYPTIYHLRKKLVDSTDKADLRLIYLALAHMIKFRGHFLIEGDLNPDNSDVDKLFIQLVQTYNQLFEENPINASGVDAKAILSARLSKSRRLENLIAQLPGEKKNGLFGNLIALSLGLTPNFKSNFDLAEDAKLQLSKDTYDDDLDNLLAQIGDQYADLFLAAKNLSDAILLSDILRVNTEITKAPLSASMIKRYDEHHQDLTLLKALVRQQLPEKYKEIFFDQSKNGYAGYIDGGASQEEFYKFIKPILEKMDGTEELLVKLNREDLLRKQRTFDNGSIPHQIHLGELHAILRRQEDFYPFLKDNREKIEKILTFRIPYYVGPLARGNSRFAWMTRKSEETITPWNFEEVVDKGASAQSFIERMTNFDKNLPNEKVLPKHSLLYEYFTVYNELTKVKYVTEGMRKPAFLSGEQKKAIVDLLFKTNRKVTVKQLKEDYFKKIECFDSVEISGVEDRFNASLGTYHDLLKIIKDKDFLDNEENEDILEDIVLTLTLFEDREMIEERLKTYAHLFDDKVMKQLKRRRYTGWGRLSRKLINGIRDKQSGKTILDFLKSDGFANRNFMQLIHDDSLTFKEDIQKAQVSGQGDSLHEHIANLAGSPAIKKGILQTVKVVDELVKVMGRHKPENIVIEMARENQTTQKGQKNSRERMKRIEEGIKELGSQILKEHPVENTQLQNEKLYLYYLQNGRDMYVDQELDINRLSDYDVDHIVPQSFLKDDSIDNKVLTRSDKARGKSDNVPSEEVVKKMKNYWRQLLNAKLITQRKFDNLTKAERGGLSELDKAGFIKRQLVETRQITKHVAQILDSRMNTKYDENDKLIREVKVITLKSKLVSDFRKDFQFYKVREINNYHHAHDAYLNAVVGTALIKKYPKLESEFVYGDYKVYDVRKMIAKSEQEIGKATAKYFFYSNIMNFFKTEITLANGEIRKRPLIETNGETGEIVWDKGRDFATVRKVLSMPQVNIVKKTEVQTGGFSKESILPKRNSDKLIARKKDWDPKKYGGFDSPTVAYSVLVVAKVEKGKSKKLKSVKELLGITIMERSSFEKNPIDFLEAKGYKEVKKDLIIKLPKYSLFELENGRKRMLASAGELQKGNELALPSKYVNFLYLASHYEKLKGSPEDNEQKQLFVEQHKHYLDEIIEQISEFSKRVILADANLDKVLSAYNKHRDKPIREQAENIIHLFTLTNLGAPAAFKYFDTTIDRKRYTSTKEVLDATLIHQSITGLYETRIDLSQLGGDGGPAPGSSGGTLNIEDEYRLHETSKGPDVPLGSTWLSDFPQAWAETGGMGLAVRQAPLIIPLKATSTPVSIKQYPMSQEARLGIKPHIQRLLDQGILVPCQSPWNTPLLPVKKPGTNDYRPVQDLREVNKRVEDIHPTVPNPYNLLSGLPPSHQWYTVLDLKDAFFCLRLHPTSQSLFAFEWRDPEMGISGQLTWTRLPQGFKNSPTLFNEALHRDLADFRIQHPDLILLQYVDDLLLAATSELDCQQGTRALLQTLGDLGYRASAKKAQICQKQVKYLGYLLKEGQRWLTEARKETVMGQPTPKTPRQLREFLGKAGFCRLFIPGFAEMAAPLYPLTKPGTLFEWGPDQQKAYQEIKQALLTAPALGLPDLTKPFELFVDEKQGYAKGVLTQKLGPWRRPVAYLSKKLDPVAAGWPPCLRMVAAIAVLTKDAGKLTMGQPLVILAPHAVEALVKQPPDRWLSNARMTHYQALLLDTDRVQFGPIVALNPATLLPLPEEGLQHDCLDILAEAHGTRPDLTDQPLPDADHTWYTDGSSFLQEGQRKAGAAVTTETEVVWAKALPAGTSAQRAELIALTQALKMAEGKKLNVYTDSRYAFATAHIHGEIYRRRGWLTSEGKEIKNKDEILALLKALFLPKRLSIIHCPGHQKGNRAEARGNRMADQAAREVATRETPETSTLLAGKRTADGSEFEKRTADGSEFESPKKKAKVE

SEQ ID NO: 2607 - protein, 2093 aa, synthetic construct
MPAAKRVKLDGGDKKYSIGLDIGTNSVGWAVITDEYKVPSKKFKVLGNTDRHSIKKNLIGALLFDSGETAEATRLKRTARRRYTRRKNRICYLQEIFSNEMAKVDDSFFHRLEESFLVEEDKKHERHPIFGNIVDEVAYHEKYPTIYHLRKKLVDSTDKADLRLIYLALAHMIKFRGHFLIEGDLNPDNSDVDKLFIQLVQTYNQLFEENPINASGVDAKAILSARLSKSRRLENLIAQLPGEKKNGLFGNLIALSLGLTPNFKSNFDLAEDAKLQLSKDTYDDDLDNLLAQIGDQYADLFLAAKNLSDAILLSDILRVNTEITKAPLSASMIKRYDEHHQDLTLLKALVRQQLPEKYKEIFFDQSKNGYAGYIDGGASQEEFYKFIKPILEKMDGTEELLVKLNREDLLRKQRTFDNGSIPHQIHLGELHAILRRQEDFYPFLKDNREKIEKILTFRIPYYVGPLARGNSRFAWMTRKSEETITPWNFEEVVDKGASAQSFIERMTNFDKNLPNEKVLPKHSLLYEYFTVYNELTKVKYVTEGMRKPAFLSGEQKKAIVDLLFKTNRKVTVKQLKEDYFKKIECFDSVEISGVEDRFNASLGTYHDLLKIIKDKDFLDNEENEDILEDIVLTLTLFEDREMIEERLKTYAHLFDDKVMKQLKRRRYTGWGRLSRKLINGIRDKQSGKTILDFLKSDGFANRNFMQLIHDDSLTFKEDIQKAQVSGQGDSLHEHIANLAGSPAIKKGILQTVKVVDELVKVMGRHKPENIVIEMARENQTTQKGQKNSRERMKRIEEGIKELGSQILKEHPVENTQLQNEKLYLYYLQNGRDMYVDQELDINRLSDYDVDHIVPQSFLKDDSIDNKVLTRSDKARGKSDNVPSEEVVKKMKNYWRQLLNAKLITQRKFDNLTKAERGGLSELDKAGFIKRQLVETRQITKHVAQILDSRMNTKYDENDKLIREVKVITLKSKLVSDFRKDFQFYKVREINNYHHAHDAYLNAVVGTALIKKYPKLESEFVYGDYKVYDVRKMIAKSEQEIGKATAKYFFYSNIMNFFKTEITLANGEIRKRPLIETNGETGEIVWDKGRDFATVRKVLSMPQVNIVKKTEVQTGGFSKESILPKRNSDKLIARKKDWDPKKYGGFDSPTVAYSVLVVAKVEKGKSKKLKSVKELLGITIMERSSFEKNPIDFLEAKGYKEVKKDLIIKLPKYSLFELENGRKRMLASAGELQKGNELALPSKYVNFLYLASHYEKLKGSPEDNEQKQLFVEQHKHYLDEIIEQISEFSKRVILADANLDKVLSAYNKHRDKPIREQAENIIHLFTLTNLGAPAAFKYFDTTIDRKRYTSTKEVLDATLIHQSITGLYETRIDLSQLGGDGGGGGEAAAKGGTLNIEDEYRLHETSKGPDVPLGSTWLSDFPQAWAETGGMGLAVRQAPLIIPLKATSTPVSIKQYPMSQEARLGIKPHIQRLLDQGILVPCQSPWNTPLLPVKKPGTNDYRPVQDLREVNKRVEDIHPTVPNPYNLLSGLPPSHQWYTVLDLKDAFFCLRLHPTSQSLFAFEWRDPEMGISGQLTWTRLPQGFKNSPTLFNEALHRDLADFRIQHPDLILLQYVDDLLLAATSELDCQQGTRALLQTLGDLGYRASAKKAQICQKQVKYLGYLLKEGQRWLTEARKETVMGQPTPKTPRQLREFLGKAGFCRLFIPGFAEMAAPLYPLTKPGTLFEWGPDQQKAYQEIKQALLTAPALGLPDLTKPFELFVDEKQGYAKGVLTQKLGPWRRPVAYLSKKLDPVAAGWPPCLRMVAAIAVLTKDAGKLTMGQPLVILAPHAVEALVKQPPDRWLSNARMTHYQALLLDTDRVQFGPIVALNPATLLPLPEEGLQHDCLDILAEAHGTRPDLTDQPLPDADHTWYTDGSSFLQEGQRKAGAAVTTETEVVWAKALPAGTSAQRAELIALTQALKMAEGKKLNVYTDSRYAFATAHIHGEIYRRRGWLTSEGKEIKNKDEILALLKALFLPKRLSIIHCPGHQKGNRAEARGNRMADQAAREVATRETPETSTLLAGKRTADGSEFEKRTADGSEFESPKKKAKVE

SEQ ID NO: 2608 - protein, 2096 aa, synthetic construct
MPAAKRVKLDGGDKKYSIGLDIGTNSVGWAVITDEYKVPSKKFKVLGNTDRHSIKKNLIGALLFDSGETAEATRLKRTARRRYTRRKNRICYLQEIFSNEMAKVDDSFFHRLEESFLVEEDKKHERHPIFGNIVDEVAYHEKYPTIYHLRKKLVDSTDKADLRLIYLALAHMIKFRGHFLIEGDLNPDNSDVDKLFIQLVQTYNQLFEENPINASGVDAKAILSARLSKSRRLENLIAQLPGEKKNGLFGNLIALSLGLTPNFKSNFDLAEDAKLQLSKDTYDDDLDNLLAQIGDQYADLFLAAKNLSDAILLSDILRVNTEITKAPLSASMIKRYDEHHQDLTLLKALVRQQLPEKYKEIFFDQSKNGYAGYIDGGASQEEFYKFIKPILEKMDGTEELLVKLNREDLLRKQRTFDNGSIPHQIHLGELHAILRRQEDFYPFLKDNREKIEKILTFRIPYYVGPLARGNSRFAWMTRKSEETITPWNFEEVVDKGASAQSFIERMTNFDKNLPNEKVLPKHSLLYEYFTVYNELTKVKYVTEGMRKPAFLSGEQKKAIVDLLFKTNRKVTVKQLKEDYFKKIECFDSVEISGVEDRFNASLGTYHDLLKIIKDKDFLDNEENEDILEDIVLTLTLFEDREMIEERLKTYAHLFDDKVMKQLKRRRYTGWGRLSRKLINGIRDKQSGKTILDFLKSDGFANRNFMQLIHDDSLTFKEDIQKAQVSGQGDSLHEHIANLAGSPAIKKGILQTVKVVDELVKVMGRHKPENIVIEMARENQTTQKGQKNSRERMKRIEEGIKELGSQILKEHPVENTQLQNEKLYLYYLQNGRDMYVDQELDINRLSDYDVDHIVPQSFLKDDSIDNKVLTRSDKARGKSDNVPSEEVVKKMKNYWRQLLNAKLITQRKFDNLTKAERGGLSELDKAGFIKRQLVETRQITKHVAQILDSRMNTKYDENDKLIREVKVITLKSKLVSDFRKDFQFYKVREINNYHHAHDAYLNAVVGTALIKKYPKLESEFVYGDYKVYDVRKMIAKSEQEIGKATAKYFFYSNIMNFFKTEITLANGEIRKRPLIETNGETGEIVWDKGRDFATVRKVLSMPQVNIVKKTEVQTGGFSKESILPKRNSDKLIARKKDWDPKKYGGFDSPTVAYSVLVVAKVEKGKSKKLKSVKELLGITIMERSSFEKNPIDFLEAKGYKEVKKDLIIKLPKYSLFELENGRKRMLASAGELQKGNELALPSKYVNFLYLASHYEKLKGSPEDNEQKQLFVEQHKHYLDEIIEQISEFSKRVILADANLDKVLSAYNKHRDKPIREQAENIIHLFTLTNLGAPAAFKYFDTTIDRKRYTSTKEVLDATLIHQSITGLYETRIDLSQLGGDGGGGSEAAAKGSSGGTLNIEDEYRLHETSKGPDVPLGSTWLSDFPQAWAETGGMGLAVRQAPLIIPLKATSTPVSIKQYPMSQEARLGIKPHIQRLLDQGILVPCQSPWNTPLLPVKKPGTNDYRPVQDLREVNKRVEDIHPTVPNPYNLLSGLPPSHQWYTVLDLKDAFFCLRLHPTSQSLFAFEWRDPEMGISGQLTWTRLPQGFKNSPTLFNEALHRDLADFRIQHPDLILLQYVDDLLLAATSELDCQQGTRALLQTLGDLGYRASAKKAQICQKQVKYLGYLLKEGQRWLTEARKETVMGQPTPKTPRQLREFLGKAGFCRLFIPGFAEMAAPLYPLTKPGTLFEWGPDQQKAYQEIKQALLTAPALGLPDLTKPFELFVDEKQGYAKGVLTQKLGPWRRPVAYLSKKLDPVAAGWPPCLRMVAAIAVLTKDAGKLTMGQPLVILAPHAVEALVKQPPDRWLSNARMTHYQALLLDTDRVQFGPIVALNPATLLPLPEEGLQHDCLDILAEAHGTRPDLTDQPLPDADHTWYTDGSSFLQEGQRKAGAAVTTETEVVWAKALPAGTSAQRAELIALTQALKMAEGKKLNVYTDSRYAFATAHIHGEIYRRRGWLTSEGKEIKNKDEILALLKALFLPKRLSIIHCPGHQKGNRAEARGNRMADQAAREVATRETPETSTLLAGKRTADGSEFEKRTADGSEFESPKKKAKVE

SEQ ID NO: 2609 - protein, 2118 aa, synthetic construct
MPAAKRVKLDGGDKKYSIGLDIGTNSVGWAVITDEYKVPSKKFKVLGNTDRHSIKKNLIGALLFDSGETAEATRLKRTARRRYTRRKNRICYLQEIFSNEMAKVDDSFFHRLEESFLVEEDKKHERHPIFGNIVDEVAYHEKYPTIYHLRKKLVDSTDKADLRLIYLALAHMIKFRGHFLIEGDLNPDNSDVDKLFIQLVQTYNQLFEENPINASGVDAKAILSARLSKSRRLENLIAQLPGEKKNGLFGNLIALSLGLTPNFKSNFDLAEDAKLQLSKDTYDDDLDNLLAQIGDQYADLFLAAKNLSDAILLSDILRVNTEITKAPLSASMIKRYDEHHQDLTLLKALVRQQLPEKYKEIFFDQSKNGYAGYIDGGASQEEFYKFIKPILEKMDGTEELLVKLNREDLLRKQRTFDNGSIPHQIHLGELHAILRRQEDFYPFLKDNREKIEKILTFRIPYYVGPLARGNSRFAWMTRKSEETITPWNFEEVVDKGASAQSFIERMTNFDKNLPNEKVLPKHSLLYEYFTVYNELTKVKYVTEGMRKPAFLSGEQKKAIVDLLFKTNRKVTVKQLKEDYFKKIECFDSVEISGVEDRFNASLGTYHDLLKIIKDKDFLDNEENEDILEDIVLTLTLFEDREMIEERLKTYAHLFDDKVMKQLKRRRYTGWGRLSRKLINGIRDKQSGKTILDFLKSDGFANRNFMQLIHDDSLTFKEDIQKAQVSGQGDSLHEHIANLAGSPAIKKGILQTVKVVDELVKVMGRHKPENIVIEMARENQTTQKGQKNSRERMKRIEEGIKELGSQILKEHPVENTQLQNEKLYLYYLQNGRDMYVDQELDINRLSDYDVDHIVPQSFLKDDSIDNKVLTRSDKARGKSDNVPSEEVVKKMKNYWRQLLNAKLITQRKFDNLTKAERGGLSELDKAGFIKRQLVETRQITKHVAQILDSRMNTKYDENDKLIREVKVITLKSKLVSDFRKDFQFYKVREINNYHHAHDAYLNAVVGTALIKKYPKLESEFVYGDYKVYDVRKMIAKSEQEIGKATAKYFFYSNIMNFFKTEITLANGEIRKRPLIETNGETGEIVWDKGRDFATVRKVLSMPQVNIVKKTEVQTGGFSKESILPKRNSDKLIARKKDWDPKKYGGFDSPTVAYSVLVVAKVEKGKSKKLKSVKELLGITIMERSSFEKNPIDFLEAKGYKEVKKDLIIKLPKYSLFELENGRKRMLASAGELQKGNELALPSKYVNFLYLASHYEKLKGSPEDNEQKQLFVEQHKHYLDEIIEQISEFSKRVILADANLDKVLSAYNKHRDKPIREQAENIIHLFTLTNLGAPAAFKYFDTTIDRKRYTSTKEVLDATLIHQSITGLYETRIDLSQLGGDGGSGGSSGGSSGSETPGTSESATPESSGGSSGGSSGGTLNIEDEYRLHETSKGPDVPLGSTWLSDFPQAWAETGGMGLAVRQAPLIIPLKATSTPVSIKQYPMSQEARLGIKPHIQRLLDQGILVPCQSPWNTPLLPVKKPGTNDYRPVQDLREVNKRVEDIHPTVPNPYNLLSGLPPSHQWYTVLDLKDAFFCLRLHPTSQSLFAFEWRDPEMGISGQLTWTRLPQGFKNSPTLFNEALHRDLADFRIQHPDLILLQYVDDLLLAATSELDCQQGTRALLQTLGDLGYRASAKKAQICQKQVKYLGYLLKEGQRWLTEARKETVMGQPTPKTPRQLREFLGKAGFCRLFIPGFAEMAAPLYPLTKPGTLFEWGPDQQKAYQEIKQALLTAPALGLPDLTKPFELFVDEKQGYAKGVLTQKLGPWRRPVAYLSKKLDPVAAGWPPCLRMVAAIAVLTKDAGKLTMGQPLVILAPHAVEALVKQPPDRWLSNARMTHYQALLLDTDRVQFGPIVALNPATLLPLPEEGLQHDCLDILAEAHGTRPDLTDQPLPDADHTWYTDGSSFLQEGQRKAGAAVTTETEVVWAKALPAGTSAQRAELIALTQALKMAEGKKLNVYTDSRYAFATAHIHGEIYRRRGWLTSEGKEIKNKDEILALLKALFLPKRLSIIHCPGHQKGNRAEARGNRMADQAAREVATRETPETSTLLAGKRTADGSEFEKRTADGSEFESPKKKAKVE

SEQ ID NO: 2610 - protein, 2125 aa, synthetic construct
MPAAKRVKLDGGDKKYSIGLDIGTNSVGWAVITDEYKVPSKKFKVLGNTDRHSIKKNLIGALLFDSGETAEATRLKRTARRRYTRRKNRICYLQEIFSNEMAKVDDSFFHRLEESFLVEEDKKHERHPIFGNIVDEVAYHEKYPTIYHLRKKLVDSTDKADLRLIYLALAHMIKFRGHFLIEGDLNPDNSDVDKLFIQLVQTYNQLFEENPINASGVDAKAILSARLSKSRRLENLIAQLPGEKKNGLFGNLIALSLGLTPNFKSNFDLAEDAKLQLSKDTYDDDLDNLLAQIGDQYADLFLAAKNLSDAILLSDILRVNTEITKAPLSASMIKRYDEHHQDLTLLKALVRQQLPEKYKEIFFDQSKNGYAGYIDGGASQEEFYKFIKPILEKMDGTEELLVKLNREDLLRKQRTFDNGSIPHQIHLGELHAILRRQEDFYPFLKDNREKIEKILTFRIPYYVGPLARGNSRFAWMTRKSEETITPWNFEEVVDKGASAQSFIERMTNFDKNLPNEKVLPKHSLLYEYFTVYNELTKVKYVTEGMRKPAFLSGEQKKAIVDLLFKTNRKVTVKQLKEDYFKKIECFDSVEISGVEDRFNASLGTYHDLLKIIKDKDFLDNEENEDILEDIVLTLTLFEDREMIEERLKTYAHLFDDKVMKQLKRRRYTGWGRLSRKLINGIRDKQSGKTILDFLKSDGFANRNFMQLIHDDSLTFKEDIQKAQVSGQGDSLHEHIANLAGSPAIKKGILQTVKVVDELVKVMGRHKPENIVIEMARENQTTQKGQKNSRERMKRIEEGIKELGSQILKEHPVENTQLQNEKLYLYYLQNGRDMYVDQELDINRLSDYDVDHIVPQSFLKDDSIDNKVLTRSDKARGKSDNVPSEEVVKKMKNYWRQLLNAKLITQRKFDNLTKAERGGLSELDKAGFIKRQLVETRQITKHVAQILDSRMNTKYDENDKLIREVKVITLKSKLVSDFRKDFQFYKVREINNYHHAHDAYLNAVVGTALIKKYPKLESEFVYGDYKVYDVRKMIAKSEQEIGKATAKYFFYSNIMNFFKTEITLANGEIRKRPLIETNGETGEIVWDKGRDFATVRKVLSMPQVNIVKKTEVQTGGFSKESILPKRNSDKLIARKKDWDPKKYGGFDSPTVAYSVLVVAKVEKGKSKKLKSVKELLGITIMERSSFEKNPIDFLEAKGYKEVKKDLIIKLPKYSLFELENGRKRMLASAGELQKGNELALPSKYVNFLYLASHYEKLKGSPEDNEQKQLFVEQHKHYLDEIIEQISEFSKRVILADANLDKVLSAYNKHRDKPIREQAENIIHLFTLTNLGAPAAFKYFDTTIDRKRYTSTKEVLDATLIHQSITGLYETRIDLSQLGGDGGEAAAKEAAAKEAAAKEAAAKGGTLNIEDEYRLHETSKEPDVSLGSTWLSDFPQAWAETGGMGLAVRQAPLIIPLKATSTPVSIKQYPMSQEARLGIKPHIQRLLDQGILVPCQSPWNTPLLPVKKPGTNDYRPVQDLREVNKRVEDIHPTVPNPYNLLSGLPPSHQWYTVLDLKDAFFCLRLHPTSQPLFAFEWRDPEMGISGQLTWTRLPQGFKNSPTLFNEALHRDLADFRIQHPDLILLQYVDDLLLAATSELDCQQGTRALLQTLGNLGYRASAKKAQICQKQVKYLGYLLKEGQRWLTEARKETVMGQPTPKTPRQLREFLGKAGFCRLFIPGFAEMAAPLYPLTKPGTLFNWGPDQQKAYQEIKQALLTAPALGLPDLTKPFELFVDEKQGYAKGVLTQKLGPWRRPVAYLSKKLDPVAAGWPPCLRMVAAIAVLTKDAGKLTMGQPLVILAPHAVEALVKQPPDRWLSNARMTHYQALLLDTDRVQFGPVVALNPATLLPLPEEGLQHNCLDILAEAHGTRPDLTDQPLPDADHTWYTDGSSLLQEGQRKAGAAVTTETEVIWAKALPAGTSAQRAELIALTQALKMAEGKKLNVYTDSRYAFATAHIHGEIYRRRGWLTSEGKEIKNKDEILALLKALFLPKRLSIIHCPGHQKGHSAEARGNRMADQAARKAAITETPDTSTLLIENSSPSGGSKRTADGSEFEAGKRTADGSEFEKRTADGSEFESPKKKAKVE

SEQ ID NO: 2611 - protein, 2151 aa, synthetic construct
MPAAKRVKLDGGDKKYSIGLDIGTNSVGWAVITDEYKVPSKKFKVLGNTDRHSIKKNLIGALLFDSGETAEATRLKRTARRRYTRRKNRICYLQEIFSNEMAKVDDSFFHRLEESFLVEEDKKHERHPIFGNIVDEVAYHEKYPTIYHLRKKLVDSTDKADLRLIYLALAHMIKFRGHFLIEGDLNPDNSDVDKLFIQLVQTYNQLFEENPINASGVDAKAILSARLSKSRRLENLIAQLPGEKKNGLFGNLIALSLGLTPNFKSNFDLAEDAKLQLSKDTYDDDLDNLLAQIGDQYADLFLAAKNLSDAILLSDILRVNTEITKAPLSASMIKRYDEHHQDLTLLKALVRQQLPEKYKEIFFDQSKNGYAGYIDGGASQEEFYKFIKPILEKMDGTEELLVKLNREDLLRKQRTFDNGSIPHQIHLGELHAILRRQEDFYPFLKDNREKIEKILTFRIPYYVGPLARGNSRFAWMTRKSEETITPWNFEEVVDKGASAQSFIERMTNFDKNLPNEKVLPKHSLLYEYFTVYNELTKVKYVTEGMRKPAFLSGEQKKAIVDLLFKTNRKVTVKQLKEDYFKKIECFDSVEISGVEDRFNASLGTYHDLLKIIKDKDFLDNEENEDILEDIVLTLTLFEDREMIEERLKTYAHLFDDKVMKQLKRRRYTGWGRLSRKLINGIRDKQSGKTILDFLKSDGFANRNFMQLIHDDSLTFKEDIQKAQVSGQGDSLHEHIANLAGSPAIKKGILQTVKVVDELVKVMGRHKPENIVIEMARENQTTQKGQKNSRERMKRIEEGIKELGSQILKEHPVENTQLQNEKLYLYYLQNGRDMYVDQELDINRLSDYDVDHIVPQSFLKDDSIDNKVLTRSDKARGKSDNVPSEEVVKKMKNYWRQLLNAKLITQRKFDNLTKAERGGLSELDKAGFIKRQLVETRQITKHVAQILDSRMNTKYDENDKLIREVKVITLKSKLVSDFRKDFQFYKVREINNYHHAHDAYLNAVVGTALIKKYPKLESEFVYGDYKVYDVRKMIAKSEQEIGKATAKYFFYSNIMNFFKTEITLANGEIRKRPLIETNGETGEIVWDKGRDFATVRKVLSMPQVNIVKKTEVQTGGFSKESILPKRNSDKLIARKKDWDPKKYGGFDSPTVAYSVLVVAKVEKGKSKKLKSVKELLGITIMERSSFEKNPIDFLEAKGYKEVKKDLIIKLPKYSLFELENGRKRMLASAGELQKGNELALPSKYVNFLYLASHYEKLKGSPEDNEQKQLFVEQHKHYLDEIIEQISEFSKRVILADANLDKVLSAYNKHRDKPIREQAENIIHLFTLTNLGAPAAFKYFDTTIDRKRYTSTKEVLDATLIHQSITGLYETRIDLSQLGGDGGAEAAAKEAAAKEAAAKEAAAKALEAEAAAKEAAAKEAAAKEAAAKAGGTLNIEDEYRLHETSKEPDVSLGSTWLSDFPQAWAETGGMGLAVRQAPLIIPLKATSTPVSIKQYPMSQEARLGIKPHIQRLLDQGILVPCQSPWNTPLLPVKKPGTNDYRPVQDLREVNKRVEDIHPTVPNPYNLLSGLPPSHQWYTVLDLKDAFFCLRLHPTSQPLFAFEWRDPEMGISGQLTWTRLPQGFKNSPTLFNEALHRDLADFRIQHPDLILLQYVDDLLLAATSELDCQQGTRALLQTLGNLGYRASAKKAQICQKQVKYLGYLLKEGQRWLTEARKETVMGQPTPKTPRQLREFLGKAGFCRLFIPGFAEMAAPLYPLTKPGTLFNWGPDQQKAYQEIKQALLTAPALGLPDLTKPFELFVDEKQGYAKGVLTQKLGPWRRPVAYLSKKLDPVAAGWPPCLRMVAAIAVLTKDAGKLTMGQPLVILAPHAVEALVKQPPDRWLSNARMTHYQALLLDTDRVQFGPVVALNPATLLPLPEEGLQHNCLDILAEAHGTRPDLTDQPLPDADHTWYTDGSSLLQEGQRKAGAAVTTETEVIWAKALPAGTSAQRAELIALTQALKMAEGKKLNVYTDSRYAFATAHIHGEIYRRRGWLTSEGKEIKNKDEILALLKALFLPKRLSIIHCPGHQKGHSAEARGNRMADQAARKAAITETPDTSTLLIENSSPSGGSKRTADGSEFEAGKRTADGSEFEKRTADGSEFESPKKKAKVE

SEQ ID NO: 2612 - protein, 2123 aa, synthetic construct
MPAAKRVKLDGGDKKYSIGLDIGTNSVGWAVITDEYKVPSKKFKVLGNTDRHSIKKNLIGALLFDSGETAEATRLKRTARRRYTRRKNRICYLQEIFSNEMAKVDDSFFHRLEESFLVEEDKKHERHPIFGNIVDEVAYHEKYPTIYHLRKKLVDSTDKADLRLIYLALAHMIKFRGHFLIEGDLNPDNSDVDKLFIQLVQTYNQLFEENPINASGVDAKAILSARLSKSRRLENLIAQLPGEKKNGLFGNLIALSLGLTPNFKSNFDLAEDAKLQLSKDTYDDDLDNLLAQIGDQYADLFLAAKNLSDAILLSDILRVNTEITKAPLSASMIKRYDEHHQDLTLLKALVRQQLPEKYKEIFFDQSKNGYAGYIDGGASQEEFYKFIKPILEKMDGTEELLVKLNREDLLRKQRTFDNGSIPHQIHLGELHAILRRQEDFYPFLKDNREKIEKILTFRIPYYVGPLARGNSRFAWMTRKSEETITPWNFEEVVDKGASAQSFIERMTNFDKNLPNEKVLPKHSLLYEYFTVYNELTKVKYVTEGMRKPAFLSGEQKKAIVDLLFKTNRKVTVKQLKEDYFKKIECFDSVEISGVEDRFNASLGTYHDLLKIIKDKDFLDNEENEDILEDIVLTLTLFEDREMIEERLKTYAHLFDDKVMKQLKRRRYTGWGRLSRKLINGIRDKQSGKTILDFLKSDGFANRNFMQLIHDDSLTFKEDIQKAQVSGQGDSLHEHIANLAGSPAIKKGILQTVKVVDELVKVMGRHKPENIVIEMARENQTTQKGQKNSRERMKRIEEGIKELGSQILKEHPVENTQLQNEKLYLYYLQNGRDMYVDQELDINRLSDYDVDHIVPQSFLKDDSIDNKVLTRSDKARGKSDNVPSEEVVKKMKNYWRQLLNAKLITQRKFDNLTKAERGGLSELDKAGFIKRQLVETRQITKHVAQILDSRMNTKYDENDKLIREVKVITLKSKLVSDFRKDFQFYKVREINNYHHAHDAYLNAVVGTALIKKYPKLESEFVYGDYKVYDVRKMIAKSEQEIGKATAKYFFYSNIMNFFKTEITLANGEIRKRPLIETNGETGEIVWDKGRDFATVRKVLSMPQVNIVKKTEVQTGGFSKESILPKRNSDKLIARKKDWDPKKYGGFDSPTVAYSVLVVAKVEKGKSKKLKSVKELLGITIMERSSFEKNPIDFLEAKGYKEVKKDLIIKLPKYSLFELENGRKRMLASAGELQKGNELALPSKYVNFLYLASHYEKLKGSPEDNEQKQLFVEQHKHYLDEIIEQISEFSKRVILADANLDKVLSAYNKHRDKPIREQAENIIHLFTLTNLGAPAAFKYFDTTIDRKRYTSTKEVLDATLIHQSITGLYETRIDLSQLGGDGGGSSGSSGSSGSSGSSGSSGGTLNIEDEYRLHETSKEPDVSLGSTWLSDFPQAWAETGGMGLAVRQAPLIIPLKATSTPVSIKQYPMSQEARLGIKPHIQRLLDQGILVPCQSPWNTPLLPVKKPGTNDYRPVQDLREVNKRVEDIHPTVPNPYNLLSGLPPSHQWYTVLDLKDAFFCLRLHPTSQPLFAFEWRDPEMGISGQLTWTRLPQGFKNSPTLFNEALHRDLADFRIQHPDLILLQYVDDLLLAATSELDCQQGTRALLQTLGNLGYRASAKKAQICQKQVKYLGYLLKEGQRWLTEARKETVMGQPTPKTPRQLREFLGKAGFCRLFIPGFAEMAAPLYPLTKPGTLFNWGPDQQKAYQEIKQALLTAPALGLPDLTKPFELFVDEKQGYAKGVLTQKLGPWRRPVAYLSKKLDPVAAGWPPCLRMVAAIAVLTKDAGKLTMGQPLVILAPHAVEALVKQPPDRWLSNARMTHYQALLLDTDRVQFGPVVALNPATLLPLPEEGLQHNCLDILAEAHGTRPDLTDQPLPDADHTWYTDGSSLLQEGQRKAGAAVTTETEVIWAKALPAGTSAQRAELIALTQALKMAEGKKLNVYTDSRYAFATAHIHGEIYRRRGWLTSEGKEIKNKDEILALLKALFLPKRLSIIHCPGHQKGHSAEARGNRMADQAARKAAITETPDTSTLLIENSSPSGGSKRTADGSEFEAGKRTADGSEFEKRTADGSEFESPKKKAKVE

SEQ ID NO: 2613 - protein, 2130 aa, synthetic construct
MPAAKRVKLDGGDKKYSIGLDIGTNSVGWAVITDEYKVPSKKFKVLGNTDRHSIKKNLIGALLFDSGETAEATRLKRTARRRYTRRKNRICYLQEIFSNEMAKVDDSFFHRLEESFLVEEDKKHERHPIFGNIVDEVAYHEKYPTIYHLRKKLVDSTDKADLRLIYLALAHMIKFRGHFLIEGDLNPDNSDVDKLFIQLVQTYNQLFEENPINASGVDAKAILSARLSKSRRLENLIAQLPGEKKNGLFGNLIALSLGLTPNFKSNFDLAEDAKLQLSKDTYDDDLDNLLAQIGDQYADLFLAAKNLSDAILLSDILRVNTEITKAPLSASMIKRYDEHHQDLTLLKALVRQQLPEKYKEIFFDQSKNGYAGYIDGGASQEEFYKFIKPILEKMDGTEELLVKLNREDLLRKQRTFDNGSIPHQIHLGELHAILRRQEDFYPFLKDNREKIEKILTFRIPYYVGPLARGNSRFAWMTRKSEETITPWNFEEVVDKGASAQSFIERMTNFDKNLPNEKVLPKHSLLYEYFTVYNELTKVKYVTEGMRKPAFLSGEQKKAIVDLLFKTNRKVTVKQLKEDYFKKIECFDSVEISGVEDRFNASLGTYHDLLKIIKDKDFLDNEENEDILEDIVLTLTLFEDREMIEERLKTYAHLFDDKVMKQLKRRRYTGWGRLSRKLINGIRDKQSGKTILDFLKSDGFANRNFMQLIHDDSLTFKEDIQKAQVSGQGDSLHEHIANLAGSPAIKKGILQTVKVVDELVKVMGRHKPENIVIEMARENQTTQKGQKNSRERMKRIEEGIKELGSQILKEHPVENTQLQNEKLYLYYLQNGRDMYVDQELDINRLSDYDVDHIVPQSFLKDDSIDNKVLTRSDKARGKSDNVPSEEVVKKMKNYWRQLLNAKLITQRKFDNLTKAERGGLSELDKAGFIKRQLVETRQITKHVAQILDSRMNTKYDENDKLIREVKVITLKSKLVSDFRKDFQFYKVREINNYHHAHDAYLNAVVGTALIKKYPKLESEFVYGDYKVYDVRKMIAKSEQEIGKATAKYFFYSNIMNFFKTEITLANGEIRKRPLIETNGETGEIVWDKGRDFATVRKVLSMPQVNIVKKTEVQTGGFSKESILPKRNSDKLIARKKDWDPKKYGGFDSPTVAYSVLVVAKVEKGKSKKLKSVKELLGITIMERSSFEKNPIDFLEAKGYKEVKKDLIIKLPKYSLFELENGRKRMLASAGELQKGNELALPSKYVNFLYLASHYEKLKGSPEDNEQKQLFVEQHKHYLDEIIEQISEFSKRVILADANLDKVLSAYNKHRDKPIREQAENIIHLFTLTNLGAPAAFKYFDTTIDRKRYTSTKEVLDATLIHQSITGLYETRIDLSQLGGDGGGGGGSGGGGSGGGGSGGGGSGGGGSGGTLNIEDEYRLHETSKEPDVSLGSTWLSDFPQAWAETGGMGLAVRQAPLIIPLKATSTPVSIKQYPMSQEARLGIKPHIQRLLDQGILVPCQSPWNTPLLPVKKPGTNDYRPVQDLREVNKRVEDIHPTVPNPYNLLSGLPPSHQWYTVLDLKDAFFCLRLHPTSQPLFAFEWRDPEMGISGQLTWTRLPQGFKNSPTLFNEALHRDLADFRIQHPDLILLQYVDDLLLAATSELDCQQGTRALLQTLGNLGYRASAKKAQICQKQVKYLGYLLKEGQRWLTEARKETVMGQPTPKTPRQLREFLGKAGFCRLFIPGFAEMAAPLYPLTKPGTLFNWGPDQQKAYQEIKQALLTAPALGLPDLTKPFELFVDEKQGYAKGVLTQKLGPWRRPVAYLSKKLDPVAAGWPPCLRMVAAIAVLTKDAGKLTMGQPLVILAPHAVEALVKQPPDRWLSNARMTHYQALLLDTDRVQFGPVVALNPATLLPLPEEGLQHNCLDILAEAHGTRPDLTDQPLPDADHTWYTDGSSLLQEGQRKAGAAVTTETEVIWAKALPAGTSAQRAELIALTQALKMAEGKKLNVYTDSRYAFATAHIHGEIYRRRGWLTSEGKEIKNKDEILALLKALFLPKRLSIIHCPGHQKGHSAEARGNRMADQAARKAAITETPDTSTLLIENSSPSGGSKRTADGSEFEAGKRTADGSEFEKRTADGSEFESPKKKAKVE

SEQ ID NO: 2614 - protein, 2116 aa, synthetic construct
MPAAKRVKLDGGDKKYSIGLDIGTNSVGWAVITDEYKVPSKKFKVLGNTDRHSIKKNLIGALLFDSGETAEATRLKRTARRRYTRRKNRICYLQEIFSNEMAKVDDSFFHRLEESFLVEEDKKHERHPIFGNIVDEVAYHEKYPTIYHLRKKLVDSTDKADLRLIYLALAHMIKFRGHFLIEGDLNPDNSDVDKLFIQLVQTYNQLFEENPINASGVDAKAILSARLSKSRRLENLIAQLPGEKKNGLFGNLIALSLGLTPNFKSNFDLAEDAKLQLSKDTYDDDLDNLLAQIGDQYADLFLAAKNLSDAILLSDILRVNTEITKAPLSASMIKRYDEHHQDLTLLKALVRQQLPEKYKEIFFDQSKNGYAGYIDGGASQEEFYKFIKPILEKMDGTEELLVKLNREDLLRKQRTFDNGSIPHQIHLGELHAILRRQEDFYPFLKDNREKIEKILTFRIPYYVGPLARGNSRFAWMTRKSEETITPWNFEEVVDKGASAQSFIERMTNFDKNLPNEKVLPKHSLLYEYFTVYNELTKVKYVTEGMRKPAFLSGEQKKAIVDLLFKTNRKVTVKQLKEDYFKKIECFDSVEISGVEDRFNASLGTYHDLLKIIKDKDFLDNEENEDILEDIVLTLTLFEDREMIEERLKTYAHLFDDKVMKQLKRRRYTGWGRLSRKLINGIRDKQSGKTILDFLKSDGFANRNFMQLIHDDSLTFKEDIQKAQVSGQGDSLHEHIANLAGSPAIKKGILQTVKVVDELVKVMGRHKPENIVIEMARENQTTQKGQKNSRERMKRIEEGIKELGSQILKEHPVENTQLQNEKLYLYYLQNGRDMYVDQELDINRLSDYDVDHIVPQSFLKDDSIDNKVLTRSDKARGKSDNVPSEEVVKKMKNYWRQLLNAKLITQRKFDNLTKAERGGLSELDKAGFIKRQLVETRQITKHVAQILDSRMNTKYDENDKLIREVKVITLKSKLVSDFRKDFQFYKVREINNYHHAHDAYLNAVVGTALIKKYPKLESEFVYGDYKVYDVRKMIAKSEQEIGKATAKYFFYSNIMNFFKTEITLANGEIRKRPLIETNGETGEIVWDKGRDFATVRKVLSMPQVNIVKKTEVQTGGFSKESILPKRNSDKLIARKKDWDPKKYGGFDSPTVAYSVLVVAKVEKGKSKKLKSVKELLGITIMERSSFEKNPIDFLEAKGYKEVKKDLIIKLPKYSLFELENGRKRMLASAGELQKGNELALPSKYVNFLYLASHYEKLKGSPEDNEQKQLFVEQHKHYLDEIIEQISEFSKRVILADANLDKVLSAYNKHRDKPIREQAENIIHLFTLTNLGAPAAFKYFDTTIDRKRYTSTKEVLDATLIHQSITGLYETRIDLSQLGGDGGEAAAKGGGPAPGGTLNIEDEYRLHETSKEPDVSLGSTWLSDFPQAWAETGGMGLAVRQAPLIIPLKATSTPVSIKQYPMSQEARLGIKPHIQRLLDQGILVPCQSPWNTPLLPVKKPGTNDYRPVQDLREVNKRVEDIHPTVPNPYNLLSGLPPSHQWYTVLDLKDAFFCLRLHPTSQPLFAFEWRDPEMGISGQLTWTRLPQGFKNSPTLFNEALHRDLADFRIQHPDLILLQYVDDLLLAATSELDCQQGTRALLQTLGNLGYRASAKKAQICQKQVKYLGYLLKEGQRWLTEARKETVMGQPTPKTPRQLREFLGKAGFCRLFIPGFAEMAAPLYPLTKPGTLFNWGPDQQKAYQEIKQALLTAPALGLPDLTKPFELFVDEKQGYAKGVLTQKLGPWRRPVAYLSKKLDPVAAGWPPCLRMVAAIAVLTKDAGKLTMGQPLVILAPHAVEALVKQPPDRWLSNARMTHYQALLLDTDRVQFGPVVALNPATLLPLPEEGLQHNCLDILAEAHGTRPDLTDQPLPDADHTWYTDGSSLLQEGQRKAGAAVTTETEVIWAKALPAGTSAQRAELIALTQALKMAEGKKLNVYTDSRYAFATAHIHGEIYRRRGWLTSEGKEIKNKDEILALLKALFLPKRLSIIHCPGHQKGHSAEARGNRMADQAARKAAITETPDTSTLLIENSSPSGGSKRTADGSEFEAGKRTADGSEFEKRTADGSEFESPKKKAKVE

SEQ ID NO: 2615 - protein, 2125 aa, synthetic construct
MPAAKRVKLDGGDKKYSIGLDIGTNSVGWAVITDEYKVPSKKFKVLGNTDRHSIKKNLIGALLFDSGETAEATRLKRTARRRYTRRKNRICYLQEIFSNEMAKVDDSFFHRLEESFLVEEDKKHERHPIFGNIVDEVAYHEKYPTIYHLRKKLVDSTDKADLRLIYLALAHMIKFRGHFLIEGDLNPDNSDVDKLFIQLVQTYNQLFEENPINASGVDAKAILSARLSKSRRLENLIAQLPGEKKNGLFGNLIALSLGLTPNFKSNFDLAEDAKLQLSKDTYDDDLDNLLAQIGDQYADLFLAAKNLSDAILLSDILRVNTEITKAPLSASMIKRYDEHHQDLTLLKALVRQQLPEKYKEIFFDQSKNGYAGYIDGGASQEEFYKFIKPILEKMDGTEELLVKLNREDLLRKQRTFDNGSIPHQIHLGELHAILRRQEDFYPFLKDNREKIEKILTFRIPYYVGPLARGNSRFAWMTRKSEETITPWNFEEVVDKGASAQSFIERMTNFDKNLPNEKVLPKHSLLYEYFTVYNELTKVKYVTEGMRKPAFLSGEQKKAIVDLLFKTNRKVTVKQLKEDYFKKIECFDSVEISGVEDRFNASLGTYHDLLKIIKDKDFLDNEENEDILEDIVLTLTLFEDREMIEERLKTYAHLFDDKVMKQLKRRRYTGWGRLSRKLINGIRDKQSGKTILDFLKSDGFANRNFMQLIHDDSLTFKEDIQKAQVSGQGDSLHEHIANLAGSPAIKKGILQTVKVVDELVKVMGRHKPENIVIEMARENQTTQKGQKNSRERMKRIEEGIKELGSQILKEHPVENTQLQNEKLYLYYLQNGRDMYVDQELDINRLSDYDVDHIVPQSFLKDDSIDNKVLTRSDKARGKSDNVPSEEVVKKMKNYWRQLLNAKLITQRKFDNLTKAERGGLSELDKAGFIKRQLVETRQITKHVAQILDSRMNTKYDENDKLIREVKVITLKSKLVSDFRKDFQFYKVREINNYHHAHDAYLNAVVGTALIKKYPKLESEFVYGDYKVYDVRKMIAKSEQEIGKATAKYFFYSNIMNFFKTEITLANGEIRKRPLIETNGETGEIVWDKGRDFATVRKVLSMPQVNIVKKTEVQTGGFSKESILPKRNSDKLIARKKDWDPKKYGGFDSPTVAYSVLVVAKVEKGKSKKLKSVKELLGITIMERSSFEKNPIDFLEAKGYKEVKKDLIIKLPKYSLFELENGRKRMLASAGELQKGNELALPSKYVNFLYLASHYEKLKGSPEDNEQKQLFVEQHKHYLDEIIEQISEFSKRVILADANLDKVLSAYNKHRDKPIREQAENIIHLFTLTNLGAPAAFKYFDTTIDRKRYTSTKEVLDATLIHQSITGLYETRIDLSQLGGDGGGGGGSGGGGSGGGGSGGGGSGGTLNIEDEYRLHETSKEPDVSLGSTWLSDFPQAWAETGGMGLAVRQAPLIIPLKATSTPVSIKQYPMSQEARLGIKPHIQRLLDQGILVPCQSPWNTPLLPVKKPGTNDYRPVQDLREVNKRVEDIHPTVPNPYNLLSGLPPSHQWYTVLDLKDAFFCLRLHPTSQPLFAFEWRDPEMGISGQLTWTRLPQGFKNSPTLFNEALHRDLADFRIQHPDLILLQYVDDLLLAATSELDCQQGTRALLQTLGNLGYRASAKKAQICQKQVKYLGYLLKEGQRWLTEARKETVMGQPTPKTPRQLREFLGKAGFCRLFIPGFAEMAAPLYPLTKPGTLFNWGPDQQKAYQEIKQALLTAPALGLPDLTKPFELFVDEKQGYAKGVLTQKLGPWRRPVAYLSKKLDPVAAGWPPCLRMVAAIAVLTKDAGKLTMGQPLVILAPHAVEALVKQPPDRWLSNARMTHYQALLLDTDRVQFGPVVALNPATLLPLPEEGLQHNCLDILAEAHGTRPDLTDQPLPDADHTWYTDGSSLLQEGQRKAGAAVTTETEVIWAKALPAGTSAQRAELIALTQALKMAEGKKLNVYTDSRYAFATAHIHGEIYRRRGWLTSEGKEIKNKDEILALLKALFLPKRLSIIHCPGHQKGHSAEARGNRMADQAARKAAITETPDTSTLLIENSSPSGGSKRTADGSEFEAGKRTADGSEFEKRTADGSEFESPKKKAKVE

SEQ ID NO: 2616 - protein, 2114 aa, synthetic construct
MPAAKRVKLDGGDKKYSIGLDIGTNSVGWAVITDEYKVPSKKFKVLGNTDRHSIKKNLIGALLFDSGETAEATRLKRTARRRYTRRKNRICYLQEIFSNEMAKVDDSFFHRLEESFLVEEDKKHERHPIFGNIVDEVAYHEKYPTIYHLRKKLVDSTDKADLRLIYLALAHMIKFRGHFLIEGDLNPDNSDVDKLFIQLVQTYNQLFEENPINASGVDAKAILSARLSKSRRLENLIAQLPGEKKNGLFGNLIALSLGLTPNFKSNFDLAEDAKLQLSKDTYDDDLDNLLAQIGDQYADLFLAAKNLSDAILLSDILRVNTEITKAPLSASMIKRYDEHHQDLTLLKALVRQQLPEKYKEIFFDQSKNGYAGYIDGGASQEEFYKFIKPILEKMDGTEELLVKLNREDLLRKQRTFDNGSIPHQIHLGELHAILRRQEDFYPFLKDNREKIEKILTFRIPYYVGPLARGNSRFAWMTRKSEETITPWNFEEVVDKGASAQSFIERMTNFDKNLPNEKVLPKHSLLYEYFTVYNELTKVKYVTEGMRKPAFLSGEQKKAIVDLLFKTNRKVTVKQLKEDYFKKIECFDSVEISGVEDRFNASLGTYHDLLKIIKDKDFLDNEENEDILEDIVLTLTLFEDREMIEERLKTYAHLFDDKVMKQLKRRRYTGWGRLSRKLINGIRDKQSGKTILDFLKSDGFANRNFMQLIHDDSLTFKEDIQKAQVSGQGDSLHEHIANLAGSPAIKKGILQTVKVVDELVKVMGRHKPENIVIEMARENQTTQKGQKNSRERMKRIEEGIKELGSQILKEHPVENTQLQNEKLYLYYLQNGRDMYVDQELDINRLSDYDVDHIVPQSFLKDDSIDNKVLTRSDKARGKSDNVPSEEVVKKMKNYWRQLLNAKLITQRKFDNLTKAERGGLSELDKAGFIKRQLVETRQITKHVAQILDSRMNTKYDENDKLIREVKVITLKSKLVSDFRKDFQFYKVREINNYHHAHDAYLNAVVGTALIKKYPKLESEFVYGDYKVYDVRKMIAKSEQEIGKATAKYFFYSNIMNFFKTEITLANGEIRKRPLIETNGETGEIVWDKGRDFATVRKVLSMPQVNIVKKTEVQTGGFSKESILPKRNSDKLIARKKDWDPKKYGGFDSPTVAYSVLVVAKVEKGKSKKLKSVKELLGITIMERSSFEKNPIDFLEAKGYKEVKKDLIIKLPKYSLFELENGRKRMLASAGELQKGNELALPSKYVNFLYLASHYEKLKGSPEDNEQKQLFVEQHKHYLDEIIEQISEFSKRVILADANLDKVLSAYNKHRDKPIREQAENIIHLFTLTNLGAPAAFKYFDTTIDRKRYTSTKEVLDATLIHQSITGLYETRIDLSQLGGDGGPAPGSSGGGGGTLNIEDEYRLHETSKEPDVSLGSTWLSDFPQAWAETGGMGLAVRQAPLIIPLKATSTPVSIKQYPMSQEARLGIKPHIQRLLDQGILVPCQSPWNTPLLPVKKPGTNDYRPVQDLREVNKRVEDIHPTVPNPYNLLSGLPPSHQWYTVLDLKDAFFCLRLHPTSQPLFAFEWRDPEMGISGQLTWTRLPQGFKNSPTLFNEALHRDLADFRIQHPDLILLQYVDDLLLAATSELDCQQGTRALLQTLGNLGYRASAKKAQICQKQVKYLGYLLKEGQRWLTEARKETVMGQPTPKTPRQLREFLGKAGFCRLFIPGFAEMAAPLYPLTKPGTLFNWGPDQQKAYQEIKQALLTAPALGLPDLTKPFELFVDEKQGYAKGVLTQKLGPWRRPVAYLSKKLDPVAAGWPPCLRMVAAIAVLTKDAGKLTMGQPLVILAPHAVEALVKQPPDRWLSNARMTHYQALLLDTDRVQFGPVVALNPATLLPLPEEGLQHNCLDILAEAHGTRPDLTDQPLPDADHTWYTDGSSLLQEGQRKAGAAVTTETEVIWAKALPAGTSAQRAELIALTQALKMAEGKKLNVYTDSRYAFATAHIHGEIYRRRGWLTSEGKEIKNKDEILALLKALFLPKRLSIIHCPGHQKGHSAEARGNRMADQAARKAAITETPDTSTLLIENSSPSGGSKRTADGSEFEAGKRTADGSEFEKRTADGSEFESPKKKAKVE

SEQ ID NO: 2617 - protein, 2114 aa, synthetic construct
MPAAKRVKLDGGDKKYSIGLDIGTNSVGWAVITDEYKVPSKKFKVLGNTDRHSIKKNLIGALLFDSGETAEATRLKRTARRRYTRRKNRICYLQEIFSNEMAKVDDSFFHRLEESFLVEEDKKHERHPIFGNIVDEVAYHEKYPTIYHLRKKLVDSTDKADLRLIYLALAHMIKFRGHFLIEGDLNPDNSDVDKLFIQLVQTYNQLFEENPINASGVDAKAILSARLSKSRRLENLIAQLPGEKKNGLFGNLIALSLGLTPNFKSNFDLAEDAKLQLSKDTYDDDLDNLLAQIGDQYADLFLAAKNLSDAILLSDILRVNTEITKAPLSASMIKRYDEHHQDLTLLKALVRQQLPEKYKEIFFDQSKNGYAGYIDGGASQEEFYKFIKPILEKMDGTEELLVKLNREDLLRKQRTFDNGSIPHQIHLGELHAILRRQEDFYPFLKDNREKIEKILTFRIPYYVGPLARGNSRFAWMTRKSEETITPWNFEEVVDKGASAQSFIERMTNFDKNLPNEKVLPKHSLLYEYFTVYNELTKVKYVTEGMRKPAFLSGEQKKAIVDLLFKTNRKVTVKQLKEDYFKKIECFDSVEISGVEDRFNASLGTYHDLLKIIKDKDFLDNEENEDILEDIVLTLTLFEDREMIEERLKTYAHLFDDKVMKQLKRRRYTGWGRLSRKLINGIRDKQSGKTILDFLKSDGFANRNFMQLIHDDSLTFKEDIQKAQVSGQGDSLHEHIANLAGSPAIKKGILQTVKVVDELVKVMGRHKPENIVIEMARENQTTQKGQKNSRERMKRIEEGIKELGSQILKEHPVENTQLQNEKLYLYYLQNGRDMYVDQELDINRLSDYDVDHIVPQSFLKDDSIDNKVLTRSDKARGKSDNVPSEEVVKKMKNYWRQLLNAKLITQRKFDNLTKAERGGLSELDKAGFIKRQLVETRQITKHVAQILDSRMNTKYDENDKLIREVKVITLKSKLVSDFRKDFQFYKVREINNYHHAHDAYLNAVVGTALIKKYPKLESEFVYGDYKVYDVRKMIAKSEQEIGKATAKYFFYSNIMNFFKTEITLANGEIRKRPLIETNGETGEIVWDKGRDFATVRKVLSMPQVNIVKKTEVQTGGFSKESILPKRNSDKLIARKKDWDPKKYGGFDSPTVAYSVLVVAKVEKGKSKKLKSVKELLGITIMERSSFEKNPIDFLEAKGYKEVKKDLIIKLPKYSLFELENGRKRMLASAGELQKGNELALPSKYVNFLYLASHYEKLKGSPEDNEQKQLFVEQHKHYLDEIIEQISEFSKRVILADANLDKVLSAYNKHRDKPIREQAENIIHLFTLTNLGAPAAFKYFDTTIDRKRYTSTKEVLDATLIHQSITGLYETRIDLSQLGGDGGGSSGGGGGSGGTLNIEDEYRLHETSKEPDVSLGSTWLSDFPQAWAETGGMGLAVRQAPLIIPLKATSTPVSIKQYPMSQEARLGIKPHIQRLLDQGILVPCQSPWNTPLLPVKKPGTNDYRPVQDLREVNKRVEDIHPTVPNPYNLLSGLPPSHQWYTVLDLKDAFFCLRLHPTSQPLFAFEWRDPEMGISGQLTWTRLPQGFKNSPTLFNEALHRDLADFRIQHPDLILLQYVDDLLLAATSELDCQQGTRALLQTLGNLGYRASAKKAQICQKQVKYLGYLLKEGQRWLTEARKETVMGQPTPKTPRQLREFLGKAGFCRLFIPGFAEMAAPLYPLTKPGTLFNWGPDQQKAYQEIKQALLTAPALGLPDLTKPFELFVDEKQGYAKGVLTQKLGPWRRPVAYLSKKLDPVAAGWPPCLRMVAAIAVLTKDAGKLTMGQPLVILAPHAVEALVKQPPDRWLSNARMTHYQALLLDTDRVQFGPVVALNPATLLPLPEEGLQHNCLDILAEAHGTRPDLTDQPLPDADHTWYTDGSSLLQEGQRKAGAAVTTETEVIWAKALPAGTSAQRAELIALTQALKMAEGKKLNVYTDSRYAFATAHIHGEIYRRRGWLTSEGKEIKNKDEILALLKALFLPKRLSIIHCPGHQKGHSAEARGNRMADQAARKAAITETPDTSTLLIENSSPSGGSKRTADGSEFEAGKRTADGSEFEKRTADGSEFESPKKKAKVE

SEQ ID NO: 2618 - protein, 2114 aa, synthetic construct
MPAAKRVKLDGGDKKYSIGLDIGTNSVGWAVITDEYKVPSKKFKVLGNTDRHSIKKNLIGALLFDSGETAEATRLKRTARRRYTRRKNRICYLQEIFSNEMAKVDDSFFHRLEESFLVEEDKKHERHPIFGNIVDEVAYHEKYPTIYHLRKKLVDSTDKADLRLIYLALAHMIKFRGHFLIEGDLNPDNSDVDKLFIQLVQTYNQLFEENPINASGVDAKAILSARLSKSRRLENLIAQLPGEKKNGLFGNLIALSLGLTPNFKSNFDLAEDAKLQLSKDTYDDDLDNLLAQIGDQYADLFLAAKNLSDAILLSDILRVNTEITKAPLSASMIKRYDEHHQDLTLLKALVRQQLPEKYKEIFFDQSKNGYAGYIDGGASQEEFYKFIKPILEKMDGTEELLVKLNREDLLRKQRTFDNGSIPHQIHLGELHAILRRQEDFYPFLKDNREKIEKILTFRIPYYVGPLARGNSRFAWMTRKSEETITPWNFEEVVDKGASAQSFIERMTNFDKNLPNEKVLPKHSLLYEYFTVYNELTKVKYVTEGMRKPAFLSGEQKKAIVDLLFKTNRKVTVKQLKEDYFKKIECFDSVEISGVEDRFNASLGTYHDLLKIIKDKDFLDNEENEDILEDIVLTLTLFEDREMIEERLKTYAHLFDDKVMKQLKRRRYTGWGRLSRKLINGIRDKQSGKTILDFLKSDGFANRNFMQLIHDDSLTFKEDIQKAQVSGQGDSLHEHIANLAGSPAIKKGILQTVKVVDELVKVMGRHKPENIVIEMARENQTTQKGQKNSRERMKRIEEGIKELGSQILKEHPVENTQLQNEKLYLYYLQNGRDMYVDQELDINRLSDYDVDHIVPQSFLKDDSIDNKVLTRSDKARGKSDNVPSEEVVKKMKNYWRQLLNAKLITQRKFDNLTKAERGGLSELDKAGFIKRQLVETRQITKHVAQILDSRMNTKYDENDKLIREVKVITLKSKLVSDFRKDFQFYKVREINNYHHAHDAYLNAVVGTALIKKYPKLESEFVYGDYKVYDVRKMIAKSEQEIGKATAKYFFYSNIMNFFKTEITLANGEIRKRPLIETNGETGEIVWDKGRDFATVRKVLSMPQVNIVKKTEVQTGGFSKESILPKRNSDKLIARKKDWDPKKYGGFDSPTVAYSVLVVAKVEKGKSKKLKSVKELLGITIMERSSFEKNPIDFLEAKGYKEVKKDLIIKLPKYSLFELENGRKRMLASAGELQKGNELALPSKYVNFLYLASHYEKLKGSPEDNEQKQLFVEQHKHYLDEIIEQISEFSKRVILADANLDKVLSAYNKHRDKPIREQAENIIHLFTLTNLGAPAAFKYFDTTIDRKRYTSTKEVLDATLIHQSITGLYETRIDLSQLGGDGGGGGPAPGGSGGTLNIEDEYRLHETSKEPDVSLGSTWLSDFPQAWAETGGMGLAVRQAPLIIPLKATSTPVSIKQYPMSQEARLGIKPHIQRLLDQGILVPCQSPWNTPLLPVKKPGTNDYRPVQDLREVNKRVEDIHPTVPNPYNLLSGLPPSHQWYTVLDLKDAFFCLRLHPTSQPLFAFEWRDPEMGISGQLTWTRLPQGFKNSPTLFNEALHRDLADFRIQHPDLILLQYVDDLLLAATSELDCQQGTRALLQTLGNLGYRASAKKAQICQKQVKYLGYLLKEGQRWLTEARKETVMGQPTPKTPRQLREFLGKAGFCRLFIPGFAEMAAPLYPLTKPGTLFNWGPDQQKAYQEIKQALLTAPALGLPDLTKPFELFVDEKQGYAKGVLTQKLGPWRRPVAYLSKKLDPVAAGWPPCLRMVAAIAVLTKDAGKLTMGQPLVILAPHAVEALVKQPPDRWLSNARMTHYQALLLDTDRVQFGPVVALNPATLLPLPEEGLQHNCLDILAEAHGTRPDLTDQPLPDADHTWYTDGSSLLQEGQRKAGAAVTTETEVIWAKALPAGTSAQRAELIALTQALKMAEGKKLNVYTDSRYAFATAHIHGEIYRRRGWLTSEGKEIKNKDEILALLKALFLPKRLSIIHCPGHQKGHSAEARGNRMADQAARKAAITETPDTSTLLIENSSPSGGSKRTADGSEFEAGKRTADGSEFEKRTADGSEFESPKKKAKVE

SEQ ID NO: 2619 - protein, 2116 aa, synthetic construct
MPAAKRVKLDGGDKKYSIGLDIGTNSVGWAVITDEYKVPSKKFKVLGNTDRHSIKKNLIGALLFDSGETAEATRLKRTARRRYTRRKNRICYLQEIFSNEMAKVDDSFFHRLEESFLVEEDKKHERHPIFGNIVDEVAYHEKYPTIYHLRKKLVDSTDKADLRLIYLALAHMIKFRGHFLIEGDLNPDNSDVDKLFIQLVQTYNQLFEENPINASGVDAKAILSARLSKSRRLENLIAQLPGEKKNGLFGNLIALSLGLTPNFKSNFDLAEDAKLQLSKDTYDDDLDNLLAQIGDQYADLFLAAKNLSDAILLSDILRVNTEITKAPLSASMIKRYDEHHQDLTLLKALVRQQLPEKYKEIFFDQSKNGYAGYIDGGASQEEFYKFIKPILEKMDGTEELLVKLNREDLLRKQRTFDNGSIPHQIHLGELHAILRRQEDFYPFLKDNREKIEKILTFRIPYYVGPLARGNSRFAWMTRKSEETITPWNFEEVVDKGASAQSFIERMTNFDKNLPNEKVLPKHSLLYEYFTVYNELTKVKYVTEGMRKPAFLSGEQKKAIVDLLFKTNRKVTVKQLKEDYFKKIECFDSVEISGVEDRFNASLGTYHDLLKIIKDKDFLDNEENEDILEDIVLTLTLFEDREMIEERLKTYAHLFDDKVMKQLKRRRYTGWGRLSRKLINGIRDKQSGKTILDFLKSDGFANRNFMQLIHDDSLTFKEDIQKAQVSGQGDSLHEHIANLAGSPAIKKGILQTVKVVDELVKVMGRHKPENIVIEMARENQTTQKGQKNSRERMKRIEEGIKELGSQILKEHPVENTQLQNEKLYLYYLQNGRDMYVDQELDINRLSDYDVDHIVPQSFLKDDSIDNKVLTRSDKARGKSDNVPSEEVVKKMKNYWRQLLNAKLITQRKFDNLTKAERGGLSELDKAGFIKRQLVETRQITKHVAQILDSRMNTKYDENDKLIREVKVITLKSKLVSDFRKDFQFYKVREINNYHHAHDAYLNAVVGTALIKKYPKLESEFVYGDYKVYDVRKMIAKSEQEIGKATAKYFFYSNIMNFFKTEITLANGEIRKRPLIETNGETGEIVWDKGRDFATVRKVLSMPQVNIVKKTEVQTGGFSKESILPKRNSDKLIARKKDWDPKKYGGFDSPTVAYSVLVVAKVEKGKSKKLKSVKELLGITIMERSSFEKNPIDFLEAKGYKEVKKDLIIKLPKYSLFELENGRKRMLASAGELQKGNELALPSKYVNFLYLASHYEKLKGSPEDNEQKQLFVEQHKHYLDEIIEQISEFSKRVILADANLDKVLSAYNKHRDKPIREQAENIIHLFTLTNLGAPAAFKYFDTTIDRKRYTSTKEVLDATLIHQSITGLYETRIDLSQLGGDGGPAPAPAPAPAPGGTLNIEDEYRLHETSKEPDVSLGSTWLSDFPQAWAETGGMGLAVRQAPLIIPLKATSTPVSIKQYPMSQEARLGIKPHIQRLLDQGILVPCQSPWNTPLLPVKKPGTNDYRPVQDLREVNKRVEDIHPTVPNPYNLLSGLPPSHQWYTVLDLKDAFFCLRLHPTSQPLFAFEWRDPEMGISGQLTWTRLPQGFKNSPTLFNEALHRDLADFRIQHPDLILLQYVDDLLLAATSELDCQQGTRALLQTLGNLGYRASAKKAQICQKQVKYLGYLLKEGQRWLTEARKETVMGQPTPKTPRQLREFLGKAGFCRLFIPGFAEMAAPLYPLTKPGTLFNWGPDQQKAYQEIKQALLTAPALGLPDLTKPFELFVDEKQGYAKGVLTQKLGPWRRPVAYLSKKLDPVAAGWPPCLRMVAAIAVLTKDAGKLTMGQPLVILAPHAVEALVKQPPDRWLSNARMTHYQALLLDTDRVQFGPVVALNPATLLPLPEEGLQHNCLDILAEAHGTRPDLTDQPLPDADHTWYTDGSSLLQEGQRKAGAAVTTETEVIWAKALPAGTSAQRAELIALTQALKMAEGKKLNVYTDSRYAFATAHIHGEIYRRRGWLTSEGKEIKNKDEILALLKALFLPKRLSIIHCPGHQKGHSAEARGNRMADQAARKAAITETPDTSTLLIENSSPSGGSKRTADGSEFEAGKRTADGSEFEKRTADGSEFESPKKKAKVE

SEQ ID NO: 2620 - protein, 2110 aa, synthetic construct
MPAAKRVKLDGGDKKYSIGLDIGTNSVGWAVITDEYKVPSKKFKVLGNTDRHSIKKNLIGALLFDSGETAEATRLKRTARRRYTRRKNRICYLQEIFSNEMAKVDDSFFHRLEESFLVEEDKKHERHPIFGNIVDEVAYHEKYPTIYHLRKKLVDSTDKADLRLIYLALAHMIKFRGHFLIEGDLNPDNSDVDKLFIQLVQTYNQLFEENPINASGVDAKAILSARLSKSRRLENLIAQLPGEKKNGLFGNLIALSLGLTPNFKSNFDLAEDAKLQLSKDTYDDDLDNLLAQIGDQYADLFLAAKNLSDAILLSDILRVNTEITKAPLSASMIKRYDEHHQDLTLLKALVRQQLPEKYKEIFFDQSKNGYAGYIDGGASQEEFYKFIKPILEKMDGTEELLVKLNREDLLRKQRTFDNGSIPHQIHLGELHAILRRQEDFYPFLKDNREKIEKILTFRIPYYVGPLARGNSRFAWMTRKSEETITPWNFEEVVDKGASAQSFIERMTNFDKNLPNEKVLPKHSLLYEYFTVYNELTKVKYVTEGMRKPAFLSGEQKKAIVDLLFKTNRKVTVKQLKEDYFKKIECFDSVEISGVEDRFNASLGTYHDLLKIIKDKDFLDNEENEDILEDIVLTLTLFEDREMIEERLKTYAHLFDDKVMKQLKRRRYTGWGRLSRKLINGIRDKQSGKTILDFLKSDGFANRNFMQLIHDDSLTFKEDIQKAQVSGQGDSLHEHIANLAGSPAIKKGILQTVKVVDELVKVMGRHKPENIVIEMARENQTTQKGQKNSRERMKRIEEGIKELGSQILKEHPVENTQLQNEKLYLYYLQNGRDMYVDQELDINRLSDYDVDHIVPQSFLKDDSIDNKVLTRSDKARGKSDNVPSEEVVKKMKNYWRQLLNAKLITQRKFDNLTKAERGGLSELDKAGFIKRQLVETRQITKHVAQILDSRMNTKYDENDKLIREVKVITLKSKLVSDFRKDFQFYKVREINNYHHAHDAYLNAVVGTALIKKYPKLESEFVYGDYKVYDVRKMIAKSEQEIGKATAKYFFYSNIMNFFKTEITLANGEIRKRPLIETNGETGEIVWDKGRDFATVRKVLSMPQVNIVKKTEVQTGGFSKESILPKRNSDKLIARKKDWDPKKYGGFDSPTVAYSVLVVAKVEKGKSKKLKSVKELLGITIMERSSFEKNPIDFLEAKGYKEVKKDLIIKLPKYSLFELENGRKRMLASAGELQKGNELALPSKYVNFLYLASHYEKLKGSPEDNEQKQLFVEQHKHYLDEIIEQISEFSKRVILADANLDKVLSAYNKHRDKPIREQAENIIHLFTLTNLGAPAAFKYFDTTIDRKRYTSTKEVLDATLIHQSITGLYETRIDLSQLGGDGGEAAAKGGTLNIEDEYRLHETSKEPDVSLGSTWLSDFPQAWAETGGMGLAVRQAPLIIPLKATSTPVSIKQYPMSQEARLGIKPHIQRLLDQGILVPCQSPWNTPLLPVKKPGTNDYRPVQDLREVNKRVEDIHPTVPNPYNLLSGLPPSHQWYTVLDLKDAFFCLRLHPTSQPLFAFEWRDPEMGISGQLTWTRLPQGFKNSPTLFNEALHRDLADFRIQHPDLILLQYVDDLLLAATSELDCQQGTRALLQTLGNLGYRASAKKAQICQKQVKYLGYLLKEGQRWLTEARKETVMGQPTPKTPRQLREFLGKAGFCRLFIPGFAEMAAPLYPLTKPGTLFNWGPDQQKAYQEIKQALLTAPALGLPDLTKPFELFVDEKQGYAKGVLTQKLGPWRRPVAYLSKKLDPVAAGWPPCLRMVAAIAVLTKDAGKLTMGQPLVILAPHAVEALVKQPPDRWLSNARMTHYQALLLDTDRVQFGPVVALNPATLLPLPEEGLQHNCLDILAEAHGTRPDLTDQPLPDADHTWYTDGSSLLQEGQRKAGAAVTTETEVIWAKALPAGTSAQRAELIALTQALKMAEGKKLNVYTDSRYAFATAHIHGEIYRRRGWLTSEGKEIKNKDEILALLKALFLPKRLSIIHCPGHQKGHSAEARGNRMADQAARKAAITETPDTSTLLIENSSPSGGSKRTADGSEFEAGKRTADGSEFEKRTADGSEFESPKKKAKVE

SEQ ID NO: 2621 - protein, 2111 aa, synthetic construct
MPAAKRVKLDGGDKKYSIGLDIGTNSVGWAVITDEYKVPSKKFKVLGNTDRHSIKKNLIGALLFDSGETAEATRLKRTARRRYTRRKNRICYLQEIFSNEMAKVDDSFFHRLEESFLVEEDKKHERHPIFGNIVDEVAYHEKYPTIYHLRKKLVDSTDKADLRLIYLALAHMIKFRGHFLIEGDLNPDNSDVDKLFIQLVQTYNQLFEENPINASGVDAKAILSARLSKSRRLENLIAQLPGEKKNGLFGNLIALSLGLTPNFKSNFDLAEDAKLQLSKDTYDDDLDNLLAQIGDQYADLFLAAKNLSDAILLSDILRVNTEITKAPLSASMIKRYDEHHQDLTLLKALVRQQLPEKYKEIFFDQSKNGYAGYIDGGASQEEFYKFIKPILEKMDGTEELLVKLNREDLLRKQRTFDNGSIPHQIHLGELHAILRRQEDFYPFLKDNREKIEKILTFRIPYYVGPLARGNSRFAWMTRKSEETITPWNFEEVVDKGASAQSFIERMTNFDKNLPNEKVLPKHSLLYEYFTVYNELTKVKYVTEGMRKPAFLSGEQKKAIVDLLFKTNRKVTVKQLKEDYFKKIECFDSVEISGVEDRFNASLGTYHDLLKIIKDKDFLDNEENEDILEDIVLTLTLFEDREMIEERLKTYAHLFDDKVMKQLKRRRYTGWGRLSRKLINGIRDKQSGKTILDFLKSDGFANRNFMQLIHDDSLTFKEDIQKAQVSGQGDSLHEHIANLAGSPAIKKGILQTVKVVDELVKVMGRHKPENIVIEMARENQTTQKGQKNSRERMKRIEEGIKELGSQILKEHPVENTQLQNEKLYLYYLQNGRDMYVDQELDINRLSDYDVDHIVPQSFLKDDSIDNKVLTRSDKARGKSDNVPSEEVVKKMKNYWRQLLNAKLITQRKFDNLTKAERGGLSELDKAGFIKRQLVETRQITKHVAQILDSRMNTKYDENDKLIREVKVITLKSKLVSDFRKDFQFYKVREINNYHHAHDAYLNAVVGTALIKKYPKLESEFVYGDYKVYDVRKMIAKSEQEIGKATAKYFFYSNIMNFFKTEITLANGEIRKRPLIETNGETGEIVWDKGRDFATVRKVLSMPQVNIVKKTEVQTGGFSKESILPKRNSDKLIARKKDWDPKKYGGFDSPTVAYSVLVVAKVEKGKSKKLKSVKELLGITIMERSSFEKNPIDFLEAKGYKEVKKDLIIKLPKYSLFELENGRKRMLASAGELQKGNELALPSKYVNFLYLASHYEKLKGSPEDNEQKQLFVEQHKHYLDEIIEQISEFSKRVILADANLDKVLSAYNKHRDKPIREQAENIIHLFTLTNLGAPAAFKYFDTTIDRKRYTSTKEVLDATLIHQSITGLYETRIDLSQLGGDGGGGGGSSGGTLNIEDEYRLHETSKEPDVSLGSTWLSDFPQAWAETGGMGLAVRQAPLIIPLKATSTPVSIKQYPMSQEARLGIKPHIQRLLDQGILVPCQSPWNTPLLPVKKPGTNDYRPVQDLREVNKRVEDIHPTVPNPYNLLSGLPPSHQWYTVLDLKDAFFCLRLHPTSQPLFAFEWRDPEMGISGQLTWTRLPQGFKNSPTLFNEALHRDLADFRIQHPDLILLQYVDDLLLAATSELDCQQGTRALLQTLGNLGYRASAKKAQICQKQVKYLGYLLKEGQRWLTEARKETVMGQPTPKTPRQLREFLGKAGFCRLFIPGFAEMAAPLYPLTKPGTLFNWGPDQQKAYQEIKQALLTAPALGLPDLTKPFELFVDEKQGYAKGVLTQKLGPWRRPVAYLSKKLDPVAAGWPPCLRMVAAIAVLTKDAGKLTMGQPLVILAPHAVEALVKQPPDRWLSNARMTHYQALLLDTDRVQFGPVVALNPATLLPLPEEGLQHNCLDILAEAHGTRPDLTDQPLPDADHTWYTDGSSLLQEGQRKAGAAVTTETEVIWAKALPAGTSAQRAELIALTQALKMAEGKKLNVYTDSRYAFATAHIHGEIYRRRGWLTSEGKEIKNKDEILALLKALFLPKRLSIIHCPGHQKGHSAEARGNRMADQAARKAAITETPDTSTLLIENSSPSGGSKRTADGSEFEAGKRTADGSEFEKRTADGSEFESPKKKAKVE

SEQ ID NO: 2622 - protein, 2114 aa, synthetic construct
MPAAKRVKLDGGDKKYSIGLDIGTNSVGWAVITDEYKVPSKKFKVLGNTDRHSIKKNLIGALLFDSGETAEATRLKRTARRRYTRRKNRICYLQEIFSNEMAKVDDSFFHRLEESFLVEEDKKHERHPIFGNIVDEVAYHEKYPTIYHLRKKLVDSTDKADLRLIYLALAHMIKFRGHFLIEGDLNPDNSDVDKLFIQLVQTYNQLFEENPINASGVDAKAILSARLSKSRRLENLIAQLPGEKKNGLFGNLIALSLGLTPNFKSNFDLAEDAKLQLSKDTYDDDLDNLLAQIGDQYADLFLAAKNLSDAILLSDILRVNTEITKAPLSASMIKRYDEHHQDLTLLKALVRQQLPEKYKEIFFDQSKNGYAGYIDGGASQEEFYKFIKPILEKMDGTEELLVKLNREDLLRKQRTFDNGSIPHQIHLGELHAILRRQEDFYPFLKDNREKIEKILTFRIPYYVGPLARGNSRFAWMTRKSEETITPWNFEEVVDKGASAQSFIERMTNFDKNLPNEKVLPKHSLLYEYFTVYNELTKVKYVTEGMRKPAFLSGEQKKAIVDLLFKTNRKVTVKQLKEDYFKKIECFDSVEISGVEDRFNASLGTYHDLLKIIKDKDFLDNEENEDILEDIVLTLTLFEDREMIEERLKTYAHLFDDKVMKQLKRRRYTGWGRLSRKLINGIRDKQSGKTILDFLKSDGFANRNFMQLIHDDSLTFKEDIQKAQVSGQGDSLHEHIANLAGSPAIKKGILQTVKVVDELVKVMGRHKPENIVIEMARENQTTQKGQKNSRERMKRIEEGIKELGSQILKEHPVENTQLQNEKLYLYYLQNGRDMYVDQELDINRLSDYDVDHIVPQSFLKDDSIDNKVLTRSDKARGKSDNVPSEEVVKKMKNYWRQLLNAKLITQRKFDNLTKAERGGLSELDKAGFIKRQLVETRQITKHVAQILDSRMNTKYDENDKLIREVKVITLKSKLVSDFRKDFQFYKVREINNYHHAHDAYLNAVVGTALIKKYPKLESEFVYGDYKVYDVRKMIAKSEQEIGKATAKYFFYSNIMNFFKTEITLANGEIRKRPLIETNGETGEIVWDKGRDFATVRKVLSMPQVNIVKKTEVQTGGFSKESILPKRNSDKLIARKKDWDPKKYGGFDSPTVAYSVLVVAKVEKGKSKKLKSVKELLGITIMERSSFEKNPIDFLEAKGYKEVKKDLIIKLPKYSLFELENGRKRMLASAGELQKGNELALPSKYVNFLYLASHYEKLKGSPEDNEQKQLFVEQHKHYLDEIIEQISEFSKRVILADANLDKVLSAYNKHRDKPIREQAENIIHLFTLTNLGAPAAFKYFDTTIDRKRYTSTKEVLDATLIHQSITGLYETRIDLSQLGGDGGGGSGGGPAPGGTLNIEDEYRLHETSKEPDVSLGSTWLSDFPQAWAETGGMGLAVRQAPLIIPLKATSTPVSIKQYPMSQEARLGIKPHIQRLLDQGILVPCQSPWNTPLLPVKKPGTNDYRPVQDLREVNKRVEDIHPTVPNPYNLLSGLPPSHQWYTVLDLKDAFFCLRLHPTSQPLFAFEWRDPEMGISGQLTWTRLPQGFKNSPTLFNEALHRDLADFRIQHPDLILLQYVDDLLLAATSELDCQQGTRALLQTLGNLGYRASAKKAQICQKQVKYLGYLLKEGQRWLTEARKETVMGQPTPKTPRQLREFLGKAGFCRLFIPGFAEMAAPLYPLTKPGTLFNWGPDQQKAYQEIKQALLTAPALGLPDLTKPFELFVDEKQGYAKGVLTQKLGPWRRPVAYLSKKLDPVAAGWPPCLRMVAAIAVLTKDAGKLTMGQPLVILAPHAVEALVKQPPDRWLSNARMTHYQALLLDTDRVQFGPVVALNPATLLPLPEEGLQHNCLDILAEAHGTRPDLTDQPLPDADHTWYTDGSSLLQEGQRKAGAAVTTETEVIWAKALPAGTSAQRAELIALTQALKMAEGKKLNVYTDSRYAFATAHIHGEIYRRRGWLTSEGKEIKNKDEILALLKALFLPKRLSIIHCPGHQKGHSAEARGNRMADQAARKAAITETPDTSTLLIENSSPSGGSKRTADGSEFEAGKRTADGSEFEKRTADGSEFESPKKKAKVE

SEQ ID NO: 2623 - protein, 2120 aa, synthetic construct
MPAAKRVKLDGGDKKYSIGLDIGTNSVGWAVITDEYKVPSKKFKVLGNTDRHSIKKNLIGALLFDSGETAEATRLKRTARRRYTRRKNRICYLQEIFSNEMAKVDDSFFHRLEESFLVEEDKKHERHPIFGNIVDEVAYHEKYPTIYHLRKKLVDSTDKADLRLIYLALAHMIKFRGHFLIEGDLNPDNSDVDKLFIQLVQTYNQLFEENPINASGVDAKAILSARLSKSRRLENLIAQLPGEKKNGLFGNLIALSLGLTPNFKSNFDLAEDAKLQLSKDTYDDDLDNLLAQIGDQYADLFLAAKNLSDAILLSDILRVNTEITKAPLSASMIKRYDEHHQDLTLLKALVRQQLPEKYKEIFFDQSKNGYAGYIDGGASQEEFYKFIKPILEKMDGTEELLVKLNREDLLRKQRTFDNGSIPHQIHLGELHAILRRQEDFYPFLKDNREKIEKILTFRIPYYVGPLARGNSRFAWMTRKSEETITPWNFEEVVDKGASAQSFIERMTNFDKNLPNEKVLPKHSLLYEYFTVYNELTKVKYVTEGMRKPAFLSGEQKKAIVDLLFKTNRKVTVKQLKEDYFKKIECFDSVEISGVEDRFNASLGTYHDLLKIIKDKDFLDNEENEDILEDIVLTLTLFEDREMIEERLKTYAHLFDDKVMKQLKRRRYTGWGRLSRKLINGIRDKQSGKTILDFLKSDGFANRNFMQLIHDDSLTFKEDIQKAQVSGQGDSLHEHIANLAGSPAIKKGILQTVKVVDELVKVMGRHKPENIVIEMARENQTTQKGQKNSRERMKRIEEGIKELGSQILKEHPVENTQLQNEKLYLYYLQNGRDMYVDQELDINRLSDYDVDHIVPQSFLKDDSIDNKVLTRSDKARGKSDNVPSEEVVKKMKNYWRQLLNAKLITQRKFDNLTKAERGGLSELDKAGFIKRQLVETRQITKHVAQILDSRMNTKYDENDKLIREVKVITLKSKLVSDFRKDFQFYKVREINNYHHAHDAYLNAVVGTALIKKYPKLESEFVYGDYKVYDVRKMIAKSEQEIGKATAKYFFYSNIMNFFKTEITLANGEIRKRPLIETNGETGEIVWDKGRDFATVRKVLSMPQVNIVKKTEVQTGGFSKESILPKRNSDKLIARKKDWDPKKYGGFDSPTVAYSVLVVAKVEKGKSKKLKSVKELLGITIMERSSFEKNPIDFLEAKGYKEVKKDLIIKLPKYSLFELENGRKRMLASAGELQKGNELALPSKYVNFLYLASHYEKLKGSPEDNEQKQLFVEQHKHYLDEIIEQISEFSKRVILADANLDKVLSAYNKHRDKPIREQAENIIHLFTLTNLGAPAAFKYFDTTIDRKRYTSTKEVLDATLIHQSITGLYETRIDLSQLGGDGGEAAAKGGGGSEAAAKGGTLNIEDEYRLHETSKEPDVSLGSTWLSDFPQAWAETGGMGLAVRQAPLIIPLKATSTPVSIKQYPMSQEARLGIKPHIQRLLDQGILVPCQSPWNTPLLPVKKPGTNDYRPVQDLREVNKRVEDIHPTVPNPYNLLSGLPPSHQWYTVLDLKDAFFCLRLHPTSQPLFAFEWRDPEMGISGQLTWTRLPQGFKNSPTLFNEALHRDLADFRIQHPDLILLQYVDDLLLAATSELDCQQGTRALLQTLGNLGYRASAKKAQICQKQVKYLGYLLKEGQRWLTEARKETVMGQPTPKTPRQLREFLGKAGFCRLFIPGFAEMAAPLYPLTKPGTLFNWGPDQQKAYQEIKQALLTAPALGLPDLTKPFELFVDEKQGYAKGVLTQKLGPWRRPVAYLSKKLDPVAAGWPPCLRMVAAIAVLTKDAGKLTMGQPLVILAPHAVEALVKQPPDRWLSNARMTHYQALLLDTDRVQFGPVVALNPATLLPLPEEGLQHNCLDILAEAHGTRPDLTDQPLPDADHTWYTDGSSLLQEGQRKAGAAVTTETEVIWAKALPAGTSAQRAELIALTQALKMAEGKKLNVYTDSRYAFATAHIHGEIYRRRGWLTSEGKEIKNKDEILALLKALFLPKRLSIIHCPGHQKGHSAEARGNRMADQAARKAAITETPDTSTLLIENSSPSGGSKRTADGSEFEAGKRTADGSEFEKRTADGSEFESPKKKAKVE

SEQ ID NO: 2624 - protein, 2108 aa, synthetic construct
MPAAKRVKLDGGDKKYSIGLDIGTNSVGWAVITDEYKVPSKKFKVLGNTDRHSIKKNLIGALLFDSGETAEATRLKRTARRRYTRRKNRICYLQEIFSNEMAKVDDSFFHRLEESFLVEEDKKHERHPIFGNIVDEVAYHEKYPTIYHLRKKLVDSTDKADLRLIYLALAHMIKFRGHFLIEGDLNPDNSDVDKLFIQLVQTYNQLFEENPINASGVDAKAILSARLSKSRRLENLIAQLPGEKKNGLFGNLIALSLGLTPNFKSNFDLAEDAKLQLSKDTYDDDLDNLLAQIGDQYADLFLAAKNLSDAILLSDILRVNTEITKAPLSASMIKRYDEHHQDLTLLKALVRQQLPEKYKEIFFDQSKNGYAGYIDGGASQEEFYKFIKPILEKMDGTEELLVKLNREDLLRKQRTFDNGSIPHQIHLGELHAILRRQEDFYPFLKDNREKIEKILTFRIPYYVGPLARGNSRFAWMTRKSEETITPWNFEEVVDKGASAQSFIERMTNFDKNLPNEKVLPKHSLLYEYFTVYNELTKVKYVTEGMRKPAFLSGEQKKAIVDLLFKTNRKVTVKQLKEDYFKKIECFDSVEISGVEDRFNASLGTYHDLLKIIKDKDFLDNEENEDILEDIVLTLTLFEDREMIEERLKTYAHLFDDKVMKQLKRRRYTGWGRLSRKLINGIRDKQSGKTILDFLKSDGFANRNFMQLIHDDSLTFKEDIQKAQVSGQGDSLHEHIANLAGSPAIKKGILQTVKVVDELVKVMGRHKPENIVIEMARENQTTQKGQKNSRERMKRIEEGIKELGSQILKEHPVENTQLQNEKLYLYYLQNGRDMYVDQELDINRLSDYDVDHIVPQSFLKDDSIDNKVLTRSDKARGKSDNVPSEEVVKKMKNYWRQLLNAKLITQRKFDNLTKAERGGLSELDKAGFIKRQLVETRQITKHVAQILDSRMNTKYDENDKLIREVKVITLKSKLVSDFRKDFQFYKVREINNYHHAHDAYLNAVVGTALIKKYPKLESEFVYGDYKVYDVRKMIAKSEQEIGKATAKYFFYSNIMNFFKTEITLANGEIRKRPLIETNGETGEIVWDKGRDFATVRKVLSMPQVNIVKKTEVQTGGFSKESILPKRNSDKLIARKKDWDPKKYGGFDSPTVAYSVLVVAKVEKGKSKKLKSVKELLGITIMERSSFEKNPIDFLEAKGYKEVKKDLIIKLPKYSLFELENGRKRMLASAGELQKGNELALPSKYVNFLYLASHYEKLKGSPEDNEQKQLFVEQHKHYLDEIIEQISEFSKRVILADANLDKVLSAYNKHRDKPIREQAENIIHLFTLTNLGAPAAFKYFDTTIDRKRYTSTKEVLDATLIHQSITGLYETRIDLSQLGGDGGPAPGGTLNIEDEYRLHETSKEPDVSLGSTWLSDFPQAWAETGGMGLAVRQAPLIIPLKATSTPVSIKQYPMSQEARLGIKPHIQRLLDQGILVPCQSPWNTPLLPVKKPGTNDYRPVQDLREVNKRVEDIHPTVPNPYNLLSGLPPSHQWYTVLDLKDAFFCLRLHPTSQPLFAFEWRDPEMGISGQLTWTRLPQGFKNSPTLFNEALHRDLADFRIQHPDLILLQYVDDLLLAATSELDCQQGTRALLQTLGNLGYRASAKKAQICQKQVKYLGYLLKEGQRWLTEARKETVMGQPTPKTPRQLREFLGKAGFCRLFIPGFAEMAAPLYPLTKPGTLFNWGPDQQKAYQEIKQALLTAPALGLPDLTKPFELFVDEKQGYAKGVLTQKLGPWRRPVAYLSKKLDPVAAGWPPCLRMVAAIAVLTKDAGKLTMGQPLVILAPHAVEALVKQPPDRWLSNARMTHYQALLLDTDRVQFGPVVALNPATLLPLPEEGLQHNCLDILAEAHGTRPDLTDQPLPDADHTWYTDGSSLLQEGQRKAGAAVTTETEVIWAKALPAGTSAQRAELIALTQALKMAEGKKLNVYTDSRYAFATAHIHGEIYRRRGWLTSEGKEIKNKDEILALLKALFLPKRLSIIHCPGHQKGHSAEARGNRMADQAARKAAITETPDTSTLLIENSSPSGGSKRTADGSEFEAGKRTADGSEFEKRTADGSEFESPKKKAKVE

SEQ ID NO: 2625 - protein, 2113 aa, synthetic construct
MPAAKRVKLDGGDKKYSIGLDIGTNSVGWAVITDEYKVPSKKFKVLGNTDRHSIKKNLIGALLFDSGETAEATRLKRTARRRYTRRKNRICYLQEIFSNEMAKVDDSFFHRLEESFLVEEDKKHERHPIFGNIVDEVAYHEKYPTIYHLRKKLVDSTDKADLRLIYLALAHMIKFRGHFLIEGDLNPDNSDVDKLFIQLVQTYNQLFEENPINASGVDAKAILSARLSKSRRLENLIAQLPGEKKNGLFGNLIALSLGLTPNFKSNFDLAEDAKLQLSKDTYDDDLDNLLAQIGDQYADLFLAAKNLSDAILLSDILRVNTEITKAPLSASMIKRYDEHHQDLTLLKALVRQQLPEKYKEIFFDQSKNGYAGYIDGGASQEEFYKFIKPILEKMDGTEELLVKLNREDLLRKQRTFDNGSIPHQIHLGELHAILRRQEDFYPFLKDNREKIEKILTFRIPYYVGPLARGNSRFAWMTRKSEETITPWNFEEVVDKGASAQSFIERMTNFDKNLPNEKVLPKHSLLYEYFTVYNELTKVKYVTEGMRKPAFLSGEQKKAIVDLLFKTNRKVTVKQLKEDYFKKIECFDSVEISGVEDRFNASLGTYHDLLKIIKDKDFLDNEENEDILEDIVLTLTLFEDREMIEERLKTYAHLFDDKVMKQLKRRRYTGWGRLSRKLINGIRDKQSGKTILDFLKSDGFANRNFMQLIHDDSLTFKEDIQKAQVSGQGDSLHEHIANLAGSPAIKKGILQTVKVVDELVKVMGRHKPENIVIEMARENQTTQKGQKNSRERMKRIEEGIKELGSQILKEHPVENTQLQNEKLYLYYLQNGRDMYVDQELDINRLSDYDVDHIVPQSFLKDDSIDNKVLTRSDKARGKSDNVPSEEVVKKMKNYWRQLLNAKLITQRKFDNLTKAERGGLSELDKAGFIKRQLVETRQITKHVAQILDSRMNTKYDENDKLIREVKVITLKSKLVSDFRKDFQFYKVREINNYHHAHDAYLNAVVGTALIKKYPKLESEFVYGDYKVYDVRKMIAKSEQEIGKATAKYFFYSNIMNFFKTEITLANGEIRKRPLIETNGETGEIVWDKGRDFATVRKVLSMPQVNIVKKTEVQTGGFSKESILPKRNSDKLIARKKDWDPKKYGGFDSPTVAYSVLVVAKVEKGKSKKLKSVKELLGITIMERSSFEKNPIDFLEAKGYKEVKKDLIIKLPKYSLFELENGRKRMLASAGELQKGNELALPSKYVNFLYLASHYEKLKGSPEDNEQKQLFVEQHKHYLDEIIEQISEFSKRVILADANLDKVLSAYNKHRDKPIREQAENIIHLFTLTNLGAPAAFKYFDTTIDRKRYTSTKEVLDATLIHQSITGLYETRIDLSQLGGDGGEAAAKGSSGGTLNIEDEYRLHETSKEPDVSLGSTWLSDFPQAWAETGGMGLAVRQAPLIIPLKATSTPVSIKQYPMSQEARLGIKPHIQRLLDQGILVPCQSPWNTPLLPVKKPGTNDYRPVQDLREVNKRVEDIHPTVPNPYNLLSGLPPSHQWYTVLDLKDAFFCLRLHPTSQPLFAFEWRDPEMGISGQLTWTRLPQGFKNSPTLFNEALHRDLADFRIQHPDLILLQYVDDLLLAATSELDCQQGTRALLQTLGNLGYRASAKKAQICQKQVKYLGYLLKEGQRWLTEARKETVMGQPTPKTPRQLREFLGKAGFCRLFIPGFAEMAAPLYPLTKPGTLFNWGPDQQKAYQEIKQALLTAPALGLPDLTKPFELFVDEKQGYAKGVLTQKLGPWRRPVAYLSKKLDPVAAGWPPCLRMVAAIAVLTKDAGKLTMGQPLVILAPHAVEALVKQPPDRWLSNARMTHYQALLLDTDRVQFGPVVALNPATLLPLPEEGLQHNCLDILAEAHGTRPDLTDQPLPDADHTWYTDGSSLLQEGQRKAGAAVTTETEVIWAKALPAGTSAQRAELIALTQALKMAEGKKLNVYTDSRYAFATAHIHGEIYRRRGWLTSEGKEIKNKDEILALLKALFLPKRLSIIHCPGHQKGHSAEARGNRMADQAARKAAITETPDTSTLLIENSSPSGGSKRTADGSEFEAGKRTADGSEFEKRTADGSEFESPKKKAKVE

SEQ ID NO: 2626 - protein, 2113 aa, synthetic construct
MPAAKRVKLDGGDKKYSIGLDIGTNSVGWAVITDEYKVPSKKFKVLGNTDRHSIKKNLIGALLFDSGETAEATRLKRTARRRYTRRKNRICYLQEIFSNEMAKVDDSFFHRLEESFLVEEDKKHERHPIFGNIVDEVAYHEKYPTIYHLRKKLVDSTDKADLRLIYLALAHMIKFRGHFLIEGDLNPDNSDVDKLFIQLVQTYNQLFEENPINASGVDAKAILSARLSKSRRLENLIAQLPGEKKNGLFGNLIALSLGLTPNFKSNFDLAEDAKLQLSKDTYDDDLDNLLAQIGDQYADLFLAAKNLSDAILLSDILRVNTEITKAPLSASMIKRYDEHHQDLTLLKALVRQQLPEKYKEIFFDQSKNGYAGYIDGGASQEEFYKFIKPILEKMDGTEELLVKLNREDLLRKQRTFDNGSIPHQIHLGELHAILRRQEDFYPFLKDNREKIEKILTFRIPYYVGPLARGNSRFAWMTRKSEETITPWNFEEVVDKGASAQSFIERMTNFDKNLPNEKVLPKHSLLYEYFTVYNELTKVKYVTEGMRKPAFLSGEQKKAIVDLLFKTNRKVTVKQLKEDYFKKIECFDSVEISGVEDRFNASLGTYHDLLKIIKDKDFLDNEENEDILEDIVLTLTLFEDREMIEERLKTYAHLFDDKVMKQLKRRRYTGWGRLSRKLINGIRDKQSGKTILDFLKSDGFANRNFMQLIHDDSLTFKEDIQKAQVSGQGDSLHEHIANLAGSPAIKKGILQTVKVVDELVKVMGRHKPENIVIEMARENQTTQKGQKNSRERMKRIEEGIKELGSQILKEHPVENTQLQNEKLYLYYLQNGRDMYVDQELDINRLSDYDVDHIVPQSFLKDDSIDNKVLTRSDKARGKSDNVPSEEVVKKMKNYWRQLLNAKLITQRKFDNLTKAERGGLSELDKAGFIKRQLVETRQITKHVAQILDSRMNTKYDENDKLIREVKVITLKSKLVSDFRKDFQFYKVREINNYHHAHDAYLNAVVGTALIKKYPKLESEFVYGDYKVYDVRKMIAKSEQEIGKATAKYFFYSNIMNFFKTEITLANGEIRKRPLIETNGETGEIVWDKGRDFATVRKVLSMPQVNIVKKTEVQTGGFSKESILPKRNSDKLIARKKDWDPKKYGGFDSPTVAYSVLVVAKVEKGKSKKLKSVKELLGITIMERSSFEKNPIDFLEAKGYKEVKKDLIIKLPKYSLFELENGRKRMLASAGELQKGNELALPSKYVNFLYLASHYEKLKGSPEDNEQKQLFVEQHKHYLDEIIEQISEFSKRVILADANLDKVLSAYNKHRDKPIREQAENIIHLFTLTNLGAPAAFKYFDTTIDRKRYTSTKEVLDATLIHQSITGLYETRIDLSQLGGDGGGGGGGGGGGGTLNIEDEYRLHETSKEPDVSLGSTWLSDFPQAWAETGGMGLAVRQAPLIIPLKATSTPVSIKQYPMSQEARLGIKPHIQRLLDQGILVPCQSPWNTPLLPVKKPGTNDYRPVQDLREVNKRVEDIHPTVPNPYNLLSGLPPSHQWYTVLDLKDAFFCLRLHPTSQPLFAFEWRDPEMGISGQLTWTRLPQGFKNSPTLFNEALHRDLADFRIQHPDLILLQYVDDLLLAATSELDCQQGTRALLQTLGNLGYRASAKKAQICQKQVKYLGYLLKEGQRWLTEARKETVMGQPTPKTPRQLREFLGKAGFCRLFIPGFAEMAAPLYPLTKPGTLFNWGPDQQKAYQEIKQALLTAPALGLPDLTKPFELFVDEKQGYAKGVLTQKLGPWRRPVAYLSKKLDPVAAGWPPCLRMVAAIAVLTKDAGKLTMGQPLVILAPHAVEALVKQPPDRWLSNARMTHYQALLLDTDRVQFGPVVALNPATLLPLPEEGLQHNCLDILAEAHGTRPDLTDQPLPDADHTWYTDGSSLLQEGQRKAGAAVTTETEVIWAKALPAGTSAQRAELIALTQALKMAEGKKLNVYTDSRYAFATAHIHGEIYRRRGWLTSEGKEIKNKDEILALLKALFLPKRLSIIHCPGHQKGHSAEARGNRMADQAARKAAITETPDTSTLLIENSSPSGGSKRTADGSEFEAGKRTADGSEFEKRTADGSEFESPKKKAKVE

SEQ ID NO: 2627 - protein, 2120 aa, synthetic construct
MPAAKRVKLDGGDKKYSIGLDIGTNSVGWAVITDEYKVPSKKFKVLGNTDRHSIKKNLIGALLFDSGETAEATRLKRTARRRYTRRKNRICYLQEIFSNEMAKVDDSFFHRLEESFLVEEDKKHERHPIFGNIVDEVAYHEKYPTIYHLRKKLVDSTDKADLRLIYLALAHMIKFRGHFLIEGDLNPDNSDVDKLFIQLVQTYNQLFEENPINASGVDAKAILSARLSKSRRLENLIAQLPGEKKNGLFGNLIALSLGLTPNFKSNFDLAEDAKLQLSKDTYDDDLDNLLAQIGDQYADLFLAAKNLSDAILLSDILRVNTEITKAPLSASMIKRYDEHHQDLTLLKALVRQQLPEKYKEIFFDQSKNGYAGYIDGGASQEEFYKFIKPILEKMDGTEELLVKLNREDLLRKQRTFDNGSIPHQIHLGELHAILRRQEDFYPFLKDNREKIEKILTFRIPYYVGPLARGNSRFAWMTRKSEETITPWNFEEVVDKGASAQSFIERMTNFDKNLPNEKVLPKHSLLYEYFTVYNELTKVKYVTEGMRKPAFLSGEQKKAIVDLLFKTNRKVTVKQLKEDYFKKIECFDSVEISGVEDRFNASLGTYHDLLKIIKDKDFLDNEENEDILEDIVLTLTLFEDREMIEERLKTYAHLFDDKVMKQLKRRRYTGWGRLSRKLINGIRDKQSGKTILDFLKSDGFANRNFMQLIHDDSLTFKEDIQKAQVSGQGDSLHEHIANLAGSPAIKKGILQTVKVVDELVKVMGRHKPENIVIEMARENQTTQKGQKNSRERMKRIEEGIKELGSQILKEHPVENTQLQNEKLYLYYLQNGRDMYVDQELDINRLSDYDVDHIVPQSFLKDDSIDNKVLTRSDKARGKSDNVPSEEVVKKMKNYWRQLLNAKLITQRKFDNLTKAERGGLSELDKAGFIKRQLVETRQITKHVAQILDSRMNTKYDENDKLIREVKVITLKSKLVSDFRKDFQFYKVREINNYHHAHDAYLNAVVGTALIKKYPKLESEFVYGDYKVYDVRKMIAKSEQEIGKATAKYFFYSNIMNFFKTEITLANGEIRKRPLIETNGETGEIVWDKGRDFATVRKVLSMPQVNIVKKTEVQTGGFSKESILPKRNSDKLIARKKDWDPKKYGGFDSPTVAYSVLVVAKVEKGKSKKLKSVKELLGITIMERSSFEKNPIDFLEAKGYKEVKKDLIIKLPKYSLFELENGRKRMLASAGELQKGNELALPSKYVNFLYLASHYEKLKGSPEDNEQKQLFVEQHKHYLDEIIEQISEFSKRVILADANLDKVLSAYNKHRDKPIREQAENIIHLFTLTNLGAPAAFKYFDTTIDRKRYTSTKEVLDATLIHQSITGLYETRIDLSQLGGDGGEAAAKEAAAKEAAAKGGTLNIEDEYRLHETSKEPDVSLGSTWLSDFPQAWAETGGMGLAVRQAPLIIPLKATSTPVSIKQYPMSQEARLGIKPHIQRLLDQGILVPCQSPWNTPLLPVKKPGTNDYRPVQDLREVNKRVEDIHPTVPNPYNLLSGLPPSHQWYTVLDLKDAFFCLRLHPTSQPLFAFEWRDPEMGISGQLTWTRLPQGFKNSPTLFNEALHRDLADFRIQHPDLILLQYVDDLLLAATSELDCQQGTRALLQTLGNLGYRASAKKAQICQKQVKYLGYLLKEGQRWLTEARKETVMGQPTPKTPRQLREFLGKAGFCRLFIPGFAEMAAPLYPLTKPGTLFNWGPDQQKAYQEIKQALLTAPALGLPDLTKPFELFVDEKQGYAKGVLTQKLGPWRRPVAYLSKKLDPVAAGWPPCLRMVAAIAVLTKDAGKLTMGQPLVILAPHAVEALVKQPPDRWLSNARMTHYQALLLDTDRVQFGPVVALNPATLLPLPEEGLQHNCLDILAEAHGTRPDLTDQPLPDADHTWYTDGSSLLQEGQRKAGAAVTTETEVIWAKALPAGTSAQRAELIALTQALKMAEGKKLNVYTDSRYAFATAHIHGEIYRRRGWLTSEGKEIKNKDEILALLKALFLPKRLSIIHCPGHQKGHSAEARGNRMADQAARKAAITETPDTSTLLIENSSPSGGSKRTADGSEFEAGKRTADGSEFEKRTADGSEFESPKKKAKVE

SEQ ID NO: 2628 - protein, 2116 aa, synthetic construct
MPAAKRVKLDGGDKKYSIGLDIGTNSVGWAVITDEYKVPSKKFKVLGNTDRHSIKKNLIGALLFDSGETAEATRLKRTARRRYTRRKNRICYLQEIFSNEMAKVDDSFFHRLEESFLVEEDKKHERHPIFGNIVDEVAYHEKYPTIYHLRKKLVDSTDKADLRLIYLALAHMIKFRGHFLIEGDLNPDNSDVDKLFIQLVQTYNQLFEENPINASGVDAKAILSARLSKSRRLENLIAQLPGEKKNGLFGNLIALSLGLTPNFKSNFDLAEDAKLQLSKDTYDDDLDNLLAQIGDQYADLFLAAKNLSDAILLSDILRVNTEITKAPLSASMIKRYDEHHQDLTLLKALVRQQLPEKYKEIFFDQSKNGYAGYIDGGASQEEFYKFIKPILEKMDGTEELLVKLNREDLLRKQRTFDNGSIPHQIHLGELHAILRRQEDFYPFLKDNREKIEKILTFRIPYYVGPLARGNSRFAWMTRKSEETITPWNFEEVVDKGASAQSFIERMTNFDKNLPNEKVLPKHSLLYEYFTVYNELTKVKYVTEGMRKPAFLSGEQKKAIVDLLFKTNRKVTVKQLKEDYFKKIECFDSVEISGVEDRFNASLGTYHDLLKIIKDKDFLDNEENEDILEDIVLTLTLFEDREMIEERLKTYAHLFDDKVMKQLKRRRYTGWGRLSRKLINGIRDKQSGKTILDFLKSDGFANRNFMQLIHDDSLTFKEDIQKAQVSGQGDSLHEHIANLAGSPAIKKGILQTVKVVDELVKVMGRHKPENIVIEMARENQTTQKGQKNSRERMKRIEEGIKELGSQILKEHPVENTQLQNEKLYLYYLQNGRDMYVDQELDINRLSDYDVDHIVPQSFLKDDSIDNKVLTRSDKARGKSDNVPSEEVVKKMKNYWRQLLNAKLITQRKFDNLTKAERGGLSELDKAGFIKRQLVETRQITKHVAQILDSRMNTKYDENDKLIREVKVITLKSKLVSDFRKDFQFYKVREINNYHHAHDAYLNAVVGTALIKKYPKLESEFVYGDYKVYDVRKMIAKSEQEIGKATAKYFFYSNIMNFFKTEITLANGEIRKRPLIETNGETGEIVWDKGRDFATVRKVLSMPQVNIVKKTEVQTGGFSKESILPKRNSDKLIARKKDWDPKKYGGFDSPTVAYSVLVVAKVEKGKSKKLKSVKELLGITIMERSSFEKNPIDFLEAKGYKEVKKDLIIKLPKYSLFELENGRKRMLASAGELQKGNELALPSKYVNFLYLASHYEKLKGSPEDNEQKQLFVEQHKHYLDEIIEQISEFSKRVILADANLDKVLSAYNKHRDKPIREQAENIIHLFTLTNLGAPAAFKYFDTTIDRKRYTSTKEVLDATLIHQSITGLYETRIDLSQLGGDGGEAAAKPAPGSSGGTLNIEDEYRLHETSKEPDVSLGSTWLSDFPQAWAETGGMGLAVRQAPLIIPLKATSTPVSIKQYPMSQEARLGIKPHIQRLLDQGILVPCQSPWNTPLLPVKKPGTNDYRPVQDLREVNKRVEDIHPTVPNPYNLLSGLPPSHQWYTVLDLKDAFFCLRLHPTSQPLFAFEWRDPEMGISGQLTWTRLPQGFKNSPTLFNEALHRDLADFRIQHPDLILLQYVDDLLLAATSELDCQQGTRALLQTLGNLGYRASAKKAQICQKQVKYLGYLLKEGQRWLTEARKETVMGQPTPKTPRQLREFLGKAGFCRLFIPGFAEMAAPLYPLTKPGTLFNWGPDQQKAYQEIKQALLTAPALGLPDLTKPFELFVDEKQGYAKGVLTQKLGPWRRPVAYLSKKLDPVAAGWPPCLRMVAAIAVLTKDAGKLTMGQPLVILAPHAVEALVKQPPDRWLSNARMTHYQALLLDTDRVQFGPVVALNPATLLPLPEEGLQHNCLDILAEAHGTRPDLTDQPLPDADHTWYTDGSSLLQEGQRKAGAAVTTETEVIWAKALPAGTSAQRAELIALTQALKMAEGKKLNVYTDSRYAFATAHIHGEIYRRRGWLTSEGKEIKNKDEILALLKALFLPKRLSIIHCPGHQKGHSAEARGNRMADQAARKAAITETPDTSTLLIENSSPSGGSKRTADGSEFEAGKRTADGSEFEKRTADGSEFESPKKKAKVE

SEQ ID NO: 2629 - protein, 2116 aa, synthetic construct
MPAAKRVKLDGGDKKYSIGLDIGTNSVGWAVITDEYKVPSKKFKVLGNTDRHSIKKNLIGALLFDSGETAEATRLKRTARRRYTRRKNRICYLQEIFSNEMAKVDDSFFHRLEESFLVEEDKKHERHPIFGNIVDEVAYHEKYPTIYHLRKKLVDSTDKADLRLIYLALAHMIKFRGHFLIEGDLNPDNSDVDKLFIQLVQTYNQLFEENPINASGVDAKAILSARLSKSRRLENLIAQLPGEKKNGLFGNLIALSLGLTPNFKSNFDLAEDAKLQLSKDTYDDDLDNLLAQIGDQYADLFLAAKNLSDAILLSDILRVNTEITKAPLSASMIKRYDEHHQDLTLLKALVRQQLPEKYKEIFFDQSKNGYAGYIDGGASQEEFYKFIKPILEKMDGTEELLVKLNREDLLRKQRTFDNGSIPHQIHLGELHAILRRQEDFYPFLKDNREKIEKILTFRIPYYVGPLARGNSRFAWMTRKSEETITPWNFEEVVDKGASAQSFIERMTNFDKNLPNEKVLPKHSLLYEYFTVYNELTKVKYVTEGMRKPAFLSGEQKKAIVDLLFKTNRKVTVKQLKEDYFKKIECFDSVEISGVEDRFNASLGTYHDLLKIIKDKDFLDNEENEDILEDIVLTLTLFEDREMIEERLKTYAHLFDDKVMKQLKRRRYTGWGRLSRKLINGIRDKQSGKTILDFLKSDGFANRNFMQLIHDDSLTFKEDIQKAQVSGQGDSLHEHIANLAGSPAIKKGILQTVKVVDELVKVMGRHKPENIVIEMARENQTTQKGQKNSRERMKRIEEGIKELGSQILKEHPVENTQLQNEKLYLYYLQNGRDMYVDQELDINRLSDYDVDHIVPQSFLKDDSIDNKVLTRSDKARGKSDNVPSEEVVKKMKNYWRQLLNAKLITQRKFDNLTKAERGGLSELDKAGFIKRQLVETRQITKHVAQILDSRMNTKYDENDKLIREVKVITLKSKLVSDFRKDFQFYKVREINNYHHAHDAYLNAVVGTALIKKYPKLESEFVYGDYKVYDVRKMIAKSEQEIGKATAKYFFYSNIMNFFKTEITLANGEIRKRPLIETNGETGEIVWDKGRDFATVRKVLSMPQVNIVKKTEVQTGGFSKESILPKRNSDKLIARKKDWDPKKYGGFDSPTVAYSVLVVAKVEKGKSKKLKSVKELLGITIMERSSFEKNPIDFLEAKGYKEVKKDLIIKLPKYSLFELENGRKRMLASAGELQKGNELALPSKYVNFLYLASHYEKLKGSPEDNEQKQLFVEQHKHYLDEIIEQISEFSKRVILADANLDKVLSAYNKHRDKPIREQAENIIHLFTLTNLGAPAAFKYFDTTIDRKRYTSTKEVLDATLIHQSITGLYETRIDLSQLGGDGGGGSEAAAKGGGGGTLNIEDEYRLHETSKEPDVSLGSTWLSDFPQAWAETGGMGLAVRQAPLIIPLKATSTPVSIKQYPMSQEARLGIKPHIQRLLDQGILVPCQSPWNTPLLPVKKPGTNDYRPVQDLREVNKRVEDIHPTVPNPYNLLSGLPPSHQWYTVLDLKDAFFCLRLHPTSQPLFAFEWRDPEMGISGQLTWTRLPQGFKNSPTLFNEALHRDLADFRIQHPDLILLQYVDDLLLAATSELDCQQGTRALLQTLGNLGYRASAKKAQICQKQVKYLGYLLKEGQRWLTEARKETVMGQPTPKTPRQLREFLGKAGFCRLFIPGFAEMAAPLYPLTKPGTLFNWGPDQQKAYQEIKQALLTAPALGLPDLTKPFELFVDEKQGYAKGVLTQKLGPWRRPVAYLSKKLDPVAAGWPPCLRMVAAIAVLTKDAGKLTMGQPLVILAPHAVEALVKQPPDRWLSNARMTHYQALLLDTDRVQFGPVVALNPATLLPLPEEGLQHNCLDILAEAHGTRPDLTDQPLPDADHTWYTDGSSLLQEGQRKAGAAVTTETEVIWAKALPAGTSAQRAELIALTQALKMAEGKKLNVYTDSRYAFATAHIHGEIYRRRGWLTSEGKEIKNKDEILALLKALFLPKRLSIIHCPGHQKGHSAEARGNRMADQAARKAAITETPDTSTLLIENSSPSGGSKRTADGSEFEAGKRTADGSEFEKRTADGSEFESPKKKAKVE

SEQ ID NO: 2630 - protein, 2135 aa, synthetic construct
MPAAKRVKLDGGDKKYSIGLDIGTNSVGWAVITDEYKVPSKKFKVLGNTDRHSIKKNLIGALLFDSGETAEATRLKRTARRRYTRRKNRICYLQEIFSNEMAKVDDSFFHRLEESFLVEEDKKHERHPIFGNIVDEVAYHEKYPTIYHLRKKLVDSTDKADLRLIYLALAHMIKFRGHFLIEGDLNPDNSDVDKLFIQLVQTYNQLFEENPINASGVDAKAILSARLSKSRRLENLIAQLPGEKKNGLFGNLIALSLGLTPNFKSNFDLAEDAKLQLSKDTYDDDLDNLLAQIGDQYADLFLAAKNLSDAILLSDILRVNTEITKAPLSASMIKRYDEHHQDLTLLKALVRQQLPEKYKEIFFDQSKNGYAGYIDGGASQEEFYKFIKPILEKMDGTEELLVKLNREDLLRKQRTFDNGSIPHQIHLGELHAILRRQEDFYPFLKDNREKIEKILTFRIPYYVGPLARGNSRFAWMTRKSEETITPWNFEEVVDKGASAQSFIERMTNFDKNLPNEKVLPKHSLLYEYFTVYNELTKVKYVTEGMRKPAFLSGEQKKAIVDLLFKTNRKVTVKQLKEDYFKKIECFDSVEISGVEDRFNASLGTYHDLLKIIKDKDFLDNEENEDILEDIVLTLTLFEDREMIEERLKTYAHLFDDKVMKQLKRRRYTGWGRLSRKLINGIRDKQSGKTILDFLKSDGFANRNFMQLIHDDSLTFKEDIQKAQVSGQGDSLHEHIANLAGSPAIKKGILQTVKVVDELVKVMGRHKPENIVIEMARENQTTQKGQKNSRERMKRIEEGIKELGSQILKEHPVENTQLQNEKLYLYYLQNGRDMYVDQELDINRLSDYDVDHIVPQSFLKDDSIDNKVLTRSDKARGKSDNVPSEEVVKKMKNYWRQLLNAKLITQRKFDNLTKAERGGLSELDKAGFIKRQLVETRQITKHVAQILDSRMNTKYDENDKLIREVKVITLKSKLVSDFRKDFQFYKVREINNYHHAHDAYLNAVVGTALIKKYPKLESEFVYGDYKVYDVRKMIAKSEQEIGKATAKYFFYSNIMNFFKTEITLANGEIRKRPLIETNGETGEIVWDKGRDFATVRKVLSMPQVNIVKKTEVQTGGFSKESILPKRNSDKLIARKKDWDPKKYGGFDSPTVAYSVLVVAKVEKGKSKKLKSVKELLGITIMERSSFEKNPIDFLEAKGYKEVKKDLIIKLPKYSLFELENGRKRMLASAGELQKGNELALPSKYVNFLYLASHYEKLKGSPEDNEQKQLFVEQHKHYLDEIIEQISEFSKRVILADANLDKVLSAYNKHRDKPIREQAENIIHLFTLTNLGAPAAFKYFDTTIDRKRYTSTKEVLDATLIHQSITGLYETRIDLSQLGGDGGEAAAKEAAAKEAAAKEAAAKEAAAKEAAAKGGTLNIEDEYRLHETSKEPDVSLGSTWLSDFPQAWAETGGMGLAVRQAPLIIPLKATSTPVSIKQYPMSQEARLGIKPHIQRLLDQGILVPCQSPWNTPLLPVKKPGTNDYRPVQDLREVNKRVEDIHPTVPNPYNLLSGLPPSHQWYTVLDLKDAFFCLRLHPTSQPLFAFEWRDPEMGISGQLTWTRLPQGFKNSPTLFNEALHRDLADFRIQHPDLILLQYVDDLLLAATSELDCQQGTRALLQTLGNLGYRASAKKAQICQKQVKYLGYLLKEGQRWLTEARKETVMGQPTPKTPRQLREFLGKAGFCRLFIPGFAEMAAPLYPLTKPGTLFNWGPDQQKAYQEIKQALLTAPALGLPDLTKPFELFVDEKQGYAKGVLTQKLGPWRRPVAYLSKKLDPVAAGWPPCLRMVAAIAVLTKDAGKLTMGQPLVILAPHAVEALVKQPPDRWLSNARMTHYQALLLDTDRVQFGPVVALNPATLLPLPEEGLQHNCLDILAEAHGTRPDLTDQPLPDADHTWYTDGSSLLQEGQRKAGAAVTTETEVIWAKALPAGTSAQRAELIALTQALKMAEGKKLNVYTDSRYAFATAHIHGEIYRRRGWLTSEGKEIKNKDEILALLKALFLPKRLSIIHCPGHQKGHSAEARGNRMADQAARKAAITETPDTSTLLIENSSPSGGSKRTADGSEFEAGKRTADGSEFEKRTADGSEFESPKKKAKVE

SEQ ID NO: 2631 - protein, 2108 aa, synthetic construct
MPAAKRVKLDGGDKKYSIGLDIGTNSVGWAVITDEYKVPSKKFKVLGNTDRHSIKKNLIGALLFDSGETAEATRLKRTARRRYTRRKNRICYLQEIFSNEMAKVDDSFFHRLEESFLVEEDKKHERHPIFGNIVDEVAYHEKYPTIYHLRKKLVDSTDKADLRLIYLALAHMIKFRGHFLIEGDLNPDNSDVDKLFIQLVQTYNQLFEENPINASGVDAKAILSARLSKSRRLENLIAQLPGEKKNGLFGNLIALSLGLTPNFKSNFDLAEDAKLQLSKDTYDDDLDNLLAQIGDQYADLFLAAKNLSDAILLSDILRVNTEITKAPLSASMIKRYDEHHQDLTLLKALVRQQLPEKYKEIFFDQSKNGYAGYIDGGASQEEFYKFIKPILEKMDGTEELLVKLNREDLLRKQRTFDNGSIPHQIHLGELHAILRRQEDFYPFLKDNREKIEKILTFRIPYYVGPLARGNSRFAWMTRKSEETITPWNFEEVVDKGASAQSFIERMTNFDKNLPNEKVLPKHSLLYEYFTVYNELTKVKYVTEGMRKPAFLSGEQKKAIVDLLFKTNRKVTVKQLKEDYFKKIECFDSVEISGVEDRFNASLGTYHDLLKIIKDKDFLDNEENEDILEDIVLTLTLFEDREMIEERLKTYAHLFDDKVMKQLKRRRYTGWGRLSRKLINGIRDKQSGKTILDFLKSDGFANRNFMQLIHDDSLTFKEDIQKAQVSGQGDSLHEHIANLAGSPAIKKGILQTVKVVDELVKVMGRHKPENIVIEMARENQTTQKGQKNSRERMKRIEEGIKELGSQILKEHPVENTQLQNEKLYLYYLQNGRDMYVDQELDINRLSDYDVDHIVPQSFLKDDSIDNKVLTRSDKARGKSDNVPSEEVVKKMKNYWRQLLNAKLITQRKFDNLTKAERGGLSELDKAGFIKRQLVETRQITKHVAQILDSRMNTKYDENDKLIREVKVITLKSKLVSDFRKDFQFYKVREINNYHHAHDAYLNAVVGTALIKKYPKLESEFVYGDYKVYDVRKMIAKSEQEIGKATAKYFFYSNIMNFFKTEITLANGEIRKRPLIETNGETGEIVWDKGRDFATVRKVLSMPQVNIVKKTEVQTGGFSKESILPKRNSDKLIARKKDWDPKKYGGFDSPTVAYSVLVVAKVEKGKSKKLKSVKELLGITIMERSSFEKNPIDFLEAKGYKEVKKDLIIKLPKYSLFELENGRKRMLASAGELQKGNELALPSKYVNFLYLASHYEKLKGSPEDNEQKQLFVEQHKHYLDEIIEQISEFSKRVILADANLDKVLSAYNKHRDKPIREQAENIIHLFTLTNLGAPAAFKYFDTTIDRKRYTSTKEVLDATLIHQSITGLYETRIDLSQLGGDGGGGSGGTLNIEDEYRLHETSKEPDVSLGSTWLSDFPQAWAETGGMGLAVRQAPLIIPLKATSTPVSIKQYPMSQEARLGIKPHIQRLLDQGILVPCQSPWNTPLLPVKKPGTNDYRPVQDLREVNKRVEDIHPTVPNPYNLLSGLPPSHQWYTVLDLKDAFFCLRLHPTSQPLFAFEWRDPEMGISGQLTWTRLPQGFKNSPTLFNEALHRDLADFRIQHPDLILLQYVDDLLLAATSELDCQQGTRALLQTLGNLGYRASAKKAQICQKQVKYLGYLLKEGQRWLTEARKETVMGQPTPKTPRQLREFLGKAGFCRLFIPGFAEMAAPLYPLTKPGTLFNWGPDQQKAYQEIKQALLTAPALGLPDLTKPFELFVDEKQGYAKGVLTQKLGPWRRPVAYLSKKLDPVAAGWPPCLRMVAAIAVLTKDAGKLTMGQPLVILAPHAVEALVKQPPDRWLSNARMTHYQALLLDTDRVQFGPVVALNPATLLPLPEEGLQHNCLDILAEAHGTRPDLTDQPLPDADHTWYTDGSSLLQEGQRKAGAAVTTETEVIWAKALPAGTSAQRAELIALTQALKMAEGKKLNVYTDSRYAFATAHIHGEIYRRRGWLTSEGKEIKNKDEILALLKALFLPKRLSIIHCPGHQKGHSAEARGNRMADQAARKAAITETPDTSTLLIENSSPSGGSKRTADGSEFEAGKRTADGSEFEKRTADGSEFESPKKKAKVE

SEQ ID NO: 2632 - protein, 2114 aa, synthetic construct
MPAAKRVKLDGGDKKYSIGLDIGTNSVGWAVITDEYKVPSKKFKVLGNTDRHSIKKNLIGALLFDSGETAEATRLKRTARRRYTRRKNRICYLQEIFSNEMAKVDDSFFHRLEESFLVEEDKKHERHPIFGNIVDEVAYHEKYPTIYHLRKKLVDSTDKADLRLIYLALAHMIKFRGHFLIEGDLNPDNSDVDKLFIQLVQTYNQLFEENPINASGVDAKAILSARLSKSRRLENLIAQLPGEKKNGLFGNLIALSLGLTPNFKSNFDLAEDAKLQLSKDTYDDDLDNLLAQIGDQYADLFLAAKNLSDAILLSDILRVNTEITKAPLSASMIKRYDEHHQDLTLLKALVRQQLPEKYKEIFFDQSKNGYAGYIDGGASQEEFYKFIKPILEKMDGTEELLVKLNREDLLRKQRTFDNGSIPHQIHLGELHAILRRQEDFYPFLKDNREKIEKILTFRIPYYVGPLARGNSRFAWMTRKSEETITPWNFEEVVDKGASAQSFIERMTNFDKNLPNEKVLPKHSLLYEYFTVYNELTKVKYVTEGMRKPAFLSGEQKKAIVDLLFKTNRKVTVKQLKEDYFKKIECFDSVEISGVEDRFNASLGTYHDLLKIIKDKDFLDNEENEDILEDIVLTLTLFEDREMIEERLKTYAHLFDDKVMKQLKRRRYTGWGRLSRKLINGIRDKQSGKTILDFLKSDGFANRNFMQLIHDDSLTFKEDIQKAQVSGQGDSLHEHIANLAGSPAIKKGILQTVKVVDELVKVMGRHKPENIVIEMARENQTTQKGQKNSRERMKRIEEGIKELGSQILKEHPVENTQLQNEKLYLYYLQNGRDMYVDQELDINRLSDYDVDHIVPQSFLKDDSIDNKVLTRSDKARGKSDNVPSEEVVKKMKNYWRQLLNAKLITQRKFDNLTKAERGGLSELDKAGFIKRQLVETRQITKHVAQILDSRMNTKYDENDKLIREVKVITLKSKLVSDFRKDFQFYKVREINNYHHAHDAYLNAVVGTALIKKYPKLESEFVYGDYKVYDVRKMIAKSEQEIGKATAKYFFYSNIMNFFKTEITLANGEIRKRPLIETNGETGEIVWDKGRDFATVRKVLSMPQVNIVKKTEVQTGGFSKESILPKRNSDKLIARKKDWDPKKYGGFDSPTVAYSVLVVAKVEKGKSKKLKSVKELLGITIMERSSFEKNPIDFLEAKGYKEVKKDLIIKLPKYSLFELENGRKRMLASAGELQKGNELALPSKYVNFLYLASHYEKLKGSPEDNEQKQLFVEQHKHYLDEIIEQISEFSKRVILADANLDKVLSAYNKHRDKPIREQAENIIHLFTLTNLGAPAAFKYFDTTIDRKRYTSTKEVLDATLIHQSITGLYETRIDLSQLGGDGGGGGGSSGGSGGTLNIEDEYRLHETSKEPDVSLGSTWLSDFPQAWAETGGMGLAVRQAPLIIPLKATSTPVSIKQYPMSQEARLGIKPHIQRLLDQGILVPCQSPWNTPLLPVKKPGTNDYRPVQDLREVNKRVEDIHPTVPNPYNLLSGLPPSHQWYTVLDLKDAFFCLRLHPTSQPLFAFEWRDPEMGISGQLTWTRLPQGFKNSPTLFNEALHRDLADFRIQHPDLILLQYVDDLLLAATSELDCQQGTRALLQTLGNLGYRASAKKAQICQKQVKYLGYLLKEGQRWLTEARKETVMGQPTPKTPRQLREFLGKAGFCRLFIPGFAEMAAPLYPLTKPGTLFNWGPDQQKAYQEIKQALLTAPALGLPDLTKPFELFVDEKQGYAKGVLTQKLGPWRRPVAYLSKKLDPVAAGWPPCLRMVAAIAVLTKDAGKLTMGQPLVILAPHAVEALVKQPPDRWLSNARMTHYQALLLDTDRVQFGPVVALNPATLLPLPEEGLQHNCLDILAEAHGTRPDLTDQPLPDADHTWYTDGSSLLQEGQRKAGAAVTTETEVIWAKALPAGTSAQRAELIALTQALKMAEGKKLNVYTDSRYAFATAHIHGEIYRRRGWLTSEGKEIKNKDEILALLKALFLPKRLSIIHCPGHQKGHSAEARGNRMADQAARKAAITETPDTSTLLIENSSPSGGSKRTADGSEFEAGKRTADGSEFEKRTADGSEFESPKKKAKVE

SEQ ID NO: 2633 - protein, 2114 aa, synthetic construct
MPAAKRVKLDGGDKKYSIGLDIGTNSVGWAVITDEYKVPSKKFKVLGNTDRHSIKKNLIGALLFDSGETAEATRLKRTARRRYTRRKNRICYLQEIFSNEMAKVDDSFFHRLEESFLVEEDKKHERHPIFGNIVDEVAYHEKYPTIYHLRKKLVDSTDKADLRLIYLALAHMIKFRGHFLIEGDLNPDNSDVDKLFIQLVQTYNQLFEENPINASGVDAKAILSARLSKSRRLENLIAQLPGEKKNGLFGNLIALSLGLTPNFKSNFDLAEDAKLQLSKDTYDDDLDNLLAQIGDQYADLFLAAKNLSDAILLSDILRVNTEITKAPLSASMIKRYDEHHQDLTLLKALVRQQLPEKYKEIFFDQSKNGYAGYIDGGASQEEFYKFIKPILEKMDGTEELLVKLNREDLLRKQRTFDNGSIPHQIHLGELHAILRRQEDFYPFLKDNREKIEKILTFRIPYYVGPLARGNSRFAWMTRKSEETITPWNFEEVVDKGASAQSFIERMTNFDKNLPNEKVLPKHSLLYEYFTVYNELTKVKYVTEGMRKPAFLSGEQKKAIVDLLFKTNRKVTVKQLKEDYFKKIECFDSVEISGVEDRFNASLGTYHDLLKIIKDKDFLDNEENEDILEDIVLTLTLFEDREMIEERLKTYAHLFDDKVMKQLKRRRYTGWGRLSRKLINGIRDKQSGKTILDFLKSDGFANRNFMQLIHDDSLTFKEDIQKAQVSGQGDSLHEHIANLAGSPAIKKGILQTVKVVDELVKVMGRHKPENIVIEMARENQTTQKGQKNSRERMKRIEEGIKELGSQILKEHPVENTQLQNEKLYLYYLQNGRDMYVDQELDINRLSDYDVDHIVPQSFLKDDSIDNKVLTRSDKARGKSDNVPSEEVVKKMKNYWRQLLNAKLITQRKFDNLTKAERGGLSELDKAGFIKRQLVETRQITKHVAQILDSRMNTKYDENDKLIREVKVITLKSKLVSDFRKDFQFYKVREINNYHHAHDAYLNAVVGTALIKKYPKLESEFVYGDYKVYDVRKMIAKSEQEIGKATAKYFFYSNIMNFFKTEITLANGEIRKRPLIETNGETGEIVWDKGRDFATVRKVLSMPQVNIVKKTEVQTGGFSKESILPKRNSDKLIARKKDWDPKKYGGFDSPTVAYSVLVVAKVEKGKSKKLKSVKELLGITIMERSSFEKNPIDFLEAKGYKEVKKDLIIKLPKYSLFELENGRKRMLASAGELQKGNELALPSKYVNFLYLASHYEKLKGSPEDNEQKQLFVEQHKHYLDEIIEQISEFSKRVILADANLDKVLSAYNKHRDKPIREQAENIIHLFTLTNLGAPAAFKYFDTTIDRKRYTSTKEVLDATLIHQSITGLYETRIDLSQLGGDGGGSSPAPGGGGGTLNIEDEYRLHETSKEPDVSLGSTWLSDFPQAWAETGGMGLAVRQAPLIIPLKATSTPVSIKQYPMSQEARLGIKPHIQRLLDQGILVPCQSPWNTPLLPVKKPGTNDYRPVQDLREVNKRVEDIHPTVPNPYNLLSGLPPSHQWYTVLDLKDAFFCLRLHPTSQPLFAFEWRDPEMGISGQLTWTRLPQGFKNSPTLFNEALHRDLADFRIQHPDLILLQYVDDLLLAATSELDCQQGTRALLQTLGNLGYRASAKKAQICQKQVKYLGYLLKEGQRWLTEARKETVMGQPTPKTPRQLREFLGKAGFCRLFIPGFAEMAAPLYPLTKPGTLFNWGPDQQKAYQEIKQALLTAPALGLPDLTKPFELFVDEKQGYAKGVLTQKLGPWRRPVAYLSKKLDPVAAGWPPCLRMVAAIAVLTKDAGKLTMGQPLVILAPHAVEALVKQPPDRWLSNARMTHYQALLLDTDRVQFGPVVALNPATLLPLPEEGLQHNCLDILAEAHGTRPDLTDQPLPDADHTWYTDGSSLLQEGQRKAGAAVTTETEVIWAKALPAGTSAQRAELIALTQALKMAEGKKLNVYTDSRYAFATAHIHGEIYRRRGWLTSEGKEIKNKDEILALLKALFLPKRLSIIHCPGHQKGHSAEARGNRMADQAARKAAITETPDTSTLLIENSSPSGGSKRTADGSEFEAGKRTADGSEFEKRTADGSEFESPKKKAKVE

SEQ ID NO: 2634 - protein, 2114 aa, synthetic construct
MPAAKRVKLDGGDKKYSIGLDIGTNSVGWAVITDEYKVPSKKFKVLGNTDRHSIKKNLIGALLFDSGETAEATRLKRTARRRYTRRKNRICYLQEIFSNEMAKVDDSFFHRLEESFLVEEDKKHERHPIFGNIVDEVAYHEKYPTIYHLRKKLVDSTDKADLRLIYLALAHMIKFRGHFLIEGDLNPDNSDVDKLFIQLVQTYNQLFEENPINASGVDAKAILSARLSKSRRLENLIAQLPGEKKNGLFGNLIALSLGLTPNFKSNFDLAEDAKLQLSKDTYDDDLDNLLAQIGDQYADLFLAAKNLSDAILLSDILRVNTEITKAPLSASMIKRYDEHHQDLTLLKALVRQQLPEKYKEIFFDQSKNGYAGYIDGGASQEEFYKFIKPILEKMDGTEELLVKLNREDLLRKQRTFDNGSIPHQIHLGELHAILRRQEDFYPFLKDNREKIEKILTFRIPYYVGPLARGNSRFAWMTRKSEETITPWNFEEVVDKGASAQSFIERMTNFDKNLPNEKVLPKHSLLYEYFTVYNELTKVKYVTEGMRKPAFLSGEQKKAIVDLLFKTNRKVTVKQLKEDYFKKIECFDSVEISGVEDRFNASLGTYHDLLKIIKDKDFLDNEENEDILEDIVLTLTLFEDREMIEERLKTYAHLFDDKVMKQLKRRRYTGWGRLSRKLINGIRDKQSGKTILDFLKSDGFANRNFMQLIHDDSLTFKEDIQKAQVSGQGDSLHEHIANLAGSPAIKKGILQTVKVVDELVKVMGRHKPENIVIEMARENQTTQKGQKNSRERMKRIEEGIKELGSQILKEHPVENTQLQNEKLYLYYLQNGRDMYVDQELDINRLSDYDVDHIVPQSFLKDDSIDNKVLTRSDKARGKSDNVPSEEVVKKMKNYWRQLLNAKLITQRKFDNLTKAERGGLSELDKAGFIKRQLVETRQITKHVAQILDSRMNTKYDENDKLIREVKVITLKSKLVSDFRKDFQFYKVREINNYHHAHDAYLNAVVGTALIKKYPKLESEFVYGDYKVYDVRKMIAKSEQEIGKATAKYFFYSNIMNFFKTEITLANGEIRKRPLIETNGETGEIVWDKGRDFATVRKVLSMPQVNIVKKTEVQTGGFSKESILPKRNSDKLIARKKDWDPKKYGGFDSPTVAYSVLVVAKVEKGKSKKLKSVKELLGITIMERSSFEKNPIDFLEAKGYKEVKKDLIIKLPKYSLFELENGRKRMLASAGELQKGNELALPSKYVNFLYLASHYEKLKGSPEDNEQKQLFVEQHKHYLDEIIEQISEFSKRVILADANLDKVLSAYNKHRDKPIREQAENIIHLFTLTNLGAPAAFKYFDTTIDRKRYTSTKEVLDATLIHQSITGLYETRIDLSQLGGDGGGSSGSSGSSGGTLNIEDEYRLHETSKEPDVSLGSTWLSDFPQAWAETGGMGLAVRQAPLIIPLKATSTPVSIKQYPMSQEARLGIKPHIQRLLDQGILVPCQSPWNTPLLPVKKPGTNDYRPVQDLREVNKRVEDIHPTVPNPYNLLSGLPPSHQWYTVLDLKDAFFCLRLHPTSQPLFAFEWRDPEMGISGQLTWTRLPQGFKNSPTLFNEALHRDLADFRIQHPDLILLQYVDDLLLAATSELDCQQGTRALLQTLGNLGYRASAKKAQICQKQVKYLGYLLKEGQRWLTEARKETVMGQPTPKTPRQLREFLGKAGFCRLFIPGFAEMAAPLYPLTKPGTLFNWGPDQQKAYQEIKQALLTAPALGLPDLTKPFELFVDEKQGYAKGVLTQKLGPWRRPVAYLSKKLDPVAAGWPPCLRMVAAIAVLTKDAGKLTMGQPLVILAPHAVEALVKQPPDRWLSNARMTHYQALLLDTDRVQFGPVVALNPATLLPLPEEGLQHNCLDILAEAHGTRPDLTDQPLPDADHTWYTDGSSLLQEGQRKAGAAVTTETEVIWAKALPAGTSAQRAELIALTQALKMAEGKKLNVYTDSRYAFATAHIHGEIYRRRGWLTSEGKEIKNKDEILALLKALFLPKRLSIIHCPGHQKGHSAEARGNRMADQAARKAAITETPDTSTLLIENSSPSGGSKRTADGSEFEAGKRTADGSEFEKRTADGSEFESPKKKAKVE

SEQ ID NO: 2635 - protein, 2112 aa, synthetic construct
MPAAKRVKLDGGDKKYSIGLDIGTNSVGWAVITDEYKVPSKKFKVLGNTDRHSIKKNLIGALLFDSGETAEATRLKRTARRRYTRRKNRICYLQEIFSNEMAKVDDSFFHRLEESFLVEEDKKHERHPIFGNIVDEVAYHEKYPTIYHLRKKLVDSTDKADLRLIYLALAHMIKFRGHFLIEGDLNPDNSDVDKLFIQLVQTYNQLFEENPINASGVDAKAILSARLSKSRRLENLIAQLPGEKKNGLFGNLIALSLGLTPNFKSNFDLAEDAKLQLSKDTYDDDLDNLLAQIGDQYADLFLAAKNLSDAILLSDILRVNTEITKAPLSASMIKRYDEHHQDLTLLKALVRQQLPEKYKEIFFDQSKNGYAGYIDGGASQEEFYKFIKPILEKMDGTEELLVKLNREDLLRKQRTFDNGSIPHQIHLGELHAILRRQEDFYPFLKDNREKIEKILTFRIPYYVGPLARGNSRFAWMTRKSEETITPWNFEEVVDKGASAQSFIERMTNFDKNLPNEKVLPKHSLLYEYFTVYNELTKVKYVTEGMRKPAFLSGEQKKAIVDLLFKTNRKVTVKQLKEDYFKKIECFDSVEISGVEDRFNASLGTYHDLLKIIKDKDFLDNEENEDILEDIVLTLTLFEDREMIEERLKTYAHLFDDKVMKQLKRRRYTGWGRLSRKLINGIRDKQSGKTILDFLKSDGFANRNFMQLIHDDSLTFKEDIQKAQVSGQGDSLHEHIANLAGSPAIKKGILQTVKVVDELVKVMGRHKPENIVIEMARENQTTQKGQKNSRERMKRIEEGIKELGSQILKEHPVENTQLQNEKLYLYYLQNGRDMYVDQELDINRLSDYDVDHIVPQSFLKDDSIDNKVLTRSDKARGKSDNVPSEEVVKKMKNYWRQLLNAKLITQRKFDNLTKAERGGLSELDKAGFIKRQLVETRQITKHVAQILDSRMNTKYDENDKLIREVKVITLKSKLVSDFRKDFQFYKVREINNYHHAHDAYLNAVVGTALIKKYPKLESEFVYGDYKVYDVRKMIAKSEQEIGKATAKYFFYSNIMNFFKTEITLANGEIRKRPLIETNGETGEIVWDKGRDFATVRKVLSMPQVNIVKKTEVQTGGFSKESILPKRNSDKLIARKKDWDPKKYGGFDSPTVAYSVLVVAKVEKGKSKKLKSVKELLGITIMERSSFEKNPIDFLEAKGYKEVKKDLIIKLPKYSLFELENGRKRMLASAGELQKGNELALPSKYVNFLYLASHYEKLKGSPEDNEQKQLFVEQHKHYLDEIIEQISEFSKRVILADANLDKVLSAYNKHRDKPIREQAENIIHLFTLTNLGAPAAFKYFDTTIDRKRYTSTKEVLDATLIHQSITGLYETRIDLSQLGGDGGGGGGGGGGGTLNIEDEYRLHETSKEPDVSLGSTWLSDFPQAWAETGGMGLAVRQAPLIIPLKATSTPVSIKQYPMSQEARLGIKPHIQRLLDQGILVPCQSPWNTPLLPVKKPGTNDYRPVQDLREVNKRVEDIHPTVPNPYNLLSGLPPSHQWYTVLDLKDAFFCLRLHPTSQPLFAFEWRDPEMGISGQLTWTRLPQGFKNSPTLFNEALHRDLADFRIQHPDLILLQYVDDLLLAATSELDCQQGTRALLQTLGNLGYRASAKKAQICQKQVKYLGYLLKEGQRWLTEARKETVMGQPTPKTPRQLREFLGKAGFCRLFIPGFAEMAAPLYPLTKPGTLFNWGPDQQKAYQEIKQALLTAPALGLPDLTKPFELFVDEKQGYAKGVLTQKLGPWRRPVAYLSKKLDPVAAGWPPCLRMVAAIAVLTKDAGKLTMGQPLVILAPHAVEALVKQPPDRWLSNARMTHYQALLLDTDRVQFGPVVALNPATLLPLPEEGLQHNCLDILAEAHGTRPDLTDQPLPDADHTWYTDGSSLLQEGQRKAGAAVTTETEVIWAKALPAGTSAQRAELIALTQALKMAEGKKLNVYTDSRYAFATAHIHGEIYRRRGWLTSEGKEIKNKDEILALLKALFLPKRLSIIHCPGHQKGHSAEARGNRMADQAARKAAITETPDTSTLLIENSSPSGGSKRTADGSEFEAGKRTADGSEFEKRTADGSEFESPKKKAKVE

SEQ ID NO: 2636 - protein, 2120 aa, synthetic construct
MPAAKRVKLDGGDKKYSIGLDIGTNSVGWAVITDEYKVPSKKFKVLGNTDRHSIKKNLIGALLFDSGETAEATRLKRTARRRYTRRKNRICYLQEIFSNEMAKVDDSFFHRLEESFLVEEDKKHERHPIFGNIVDEVAYHEKYPTIYHLRKKLVDSTDKADLRLIYLALAHMIKFRGHFLIEGDLNPDNSDVDKLFIQLVQTYNQLFEENPINASGVDAKAILSARLSKSRRLENLIAQLPGEKKNGLFGNLIALSLGLTPNFKSNFDLAEDAKLQLSKDTYDDDLDNLLAQIGDQYADLFLAAKNLSDAILLSDILRVNTEITKAPLSASMIKRYDEHHQDLTLLKALVRQQLPEKYKEIFFDQSKNGYAGYIDGGASQEEFYKFIKPILEKMDGTEELLVKLNREDLLRKQRTFDNGSIPHQIHLGELHAILRRQEDFYPFLKDNREKIEKILTFRIPYYVGPLARGNSRFAWMTRKSEETITPWNFEEVVDKGASAQSFIERMTNFDKNLPNEKVLPKHSLLYEYFTVYNELTKVKYVTEGMRKPAFLSGEQKKAIVDLLFKTNRKVTVKQLKEDYFKKIECFDSVEISGVEDRFNASLGTYHDLLKIIKDKDFLDNEENEDILEDIVLTLTLFEDREMIEERLKTYAHLFDDKVMKQLKRRRYTGWGRLSRKLINGIRDKQSGKTILDFLKSDGFANRNFMQLIHDDSLTFKEDIQKAQVSGQGDSLHEHIANLAGSPAIKKGILQTVKVVDELVKVMGRHKPENIVIEMARENQTTQKGQKNSRERMKRIEEGIKELGSQILKEHPVENTQLQNEKLYLYYLQNGRDMYVDQELDINRLSDYDVDHIVPQSFLKDDSIDNKVLTRSDKARGKSDNVPSEEVVKKMKNYWRQLLNAKLITQRKFDNLTKAERGGLSELDKAGFIKRQLVETRQITKHVAQILDSRMNTKYDENDKLIREVKVITLKSKLVSDFRKDFQFYKVREINNYHHAHDAYLNAVVGTALIKKYPKLESEFVYGDYKVYDVRKMIAKSEQEIGKATAKYFFYSNIMNFFKTEITLANGEIRKRPLIETNGETGEIVWDKGRDFATVRKVLSMPQVNIVKKTEVQTGGFSKESILPKRNSDKLIARKKDWDPKKYGGFDSPTVAYSVLVVAKVEKGKSKKLKSVKELLGITIMERSSFEKNPIDFLEAKGYKEVKKDLIIKLPKYSLFELENGRKRMLASAGELQKGNELALPSKYVNFLYLASHYEKLKGSPEDNEQKQLFVEQHKHYLDEIIEQISEFSKRVILADANLDKVLSAYNKHRDKPIREQAENIIHLFTLTNLGAPAAFKYFDTTIDRKRYTSTKEVLDATLIHQSITGLYETRIDLSQLGGDGGGGGGSEAAAKGGGGSGGTLNIEDEYRLHETSKEPDVSLGSTWLSDFPQAWAETGGMGLAVRQAPLIIPLKATSTPVSIKQYPMSQEARLGIKPHIQRLLDQGILVPCQSPWNTPLLPVKKPGTNDYRPVQDLREVNKRVEDIHPTVPNPYNLLSGLPPSHQWYTVLDLKDAFFCLRLHPTSQPLFAFEWRDPEMGISGQLTWTRLPQGFKNSPTLFNEALHRDLADFRIQHPDLILLQYVDDLLLAATSELDCQQGTRALLQTLGNLGYRASAKKAQICQKQVKYLGYLLKEGQRWLTEARKETVMGQPTPKTPRQLREFLGKAGFCRLFIPGFAEMAAPLYPLTKPGTLFNWGPDQQKAYQEIKQALLTAPALGLPDLTKPFELFVDEKQGYAKGVLTQKLGPWRRPVAYLSKKLDPVAAGWPPCLRMVAAIAVLTKDAGKLTMGQPLVILAPHAVEALVKQPPDRWLSNARMTHYQALLLDTDRVQFGPVVALNPATLLPLPEEGLQHNCLDILAEAHGTRPDLTDQPLPDADHTWYTDGSSLLQEGQRKAGAAVTTETEVIWAKALPAGTSAQRAELIALTQALKMAEGKKLNVYTDSRYAFATAHIHGEIYRRRGWLTSEGKEIKNKDEILALLKALFLPKRLSIIHCPGHQKGHSAEARGNRMADQAARKAAITETPDTSTLLIENSSPSGGSKRTADGSEFEAGKRTADGSEFEKRTADGSEFESPKKKAKVE

SEQ ID NO: 2637 - protein, 2116 aa, synthetic construct
MPAAKRVKLDGGDKKYSIGLDIGTNSVGWAVITDEYKVPSKKFKVLGNTDRHSIKKNLIGALLFDSGETAEATRLKRTARRRYTRRKNRICYLQEIFSNEMAKVDDSFFHRLEESFLVEEDKKHERHPIFGNIVDEVAYHEKYPTIYHLRKKLVDSTDKADLRLIYLALAHMIKFRGHFLIEGDLNPDNSDVDKLFIQLVQTYNQLFEENPINASGVDAKAILSARLSKSRRLENLIAQLPGEKKNGLFGNLIALSLGLTPNFKSNFDLAEDAKLQLSKDTYDDDLDNLLAQIGDQYADLFLAAKNLSDAILLSDILRVNTEITKAPLSASMIKRYDEHHQDLTLLKALVRQQLPEKYKEIFFDQSKNGYAGYIDGGASQEEFYKFIKPILEKMDGTEELLVKLNREDLLRKQRTFDNGSIPHQIHLGELHAILRRQEDFYPFLKDNREKIEKILTFRIPYYVGPLARGNSRFAWMTRKSEETITPWNFEEVVDKGASAQSFIERMTNFDKNLPNEKVLPKHSLLYEYFTVYNELTKVKYVTEGMRKPAFLSGEQKKAIVDLLFKTNRKVTVKQLKEDYFKKIECFDSVEISGVEDRFNASLGTYHDLLKIIKDKDFLDNEENEDILEDIVLTLTLFEDREMIEERLKTYAHLFDDKVMKQLKRRRYTGWGRLSRKLINGIRDKQSGKTILDFLKSDGFANRNFMQLIHDDSLTFKEDIQKAQVSGQGDSLHEHIANLAGSPAIKKGILQTVKVVDELVKVMGRHKPENIVIEMARENQTTQKGQKNSRERMKRIEEGIKELGSQILKEHPVENTQLQNEKLYLYYLQNGRDMYVDQELDINRLSDYDVDHIVPQSFLKDDSIDNKVLTRSDKARGKSDNVPSEEVVKKMKNYWRQLLNAKLITQRKFDNLTKAERGGLSELDKAGFIKRQLVETRQITKHVAQILDSRMNTKYDENDKLIREVKVITLKSKLVSDFRKDFQFYKVREINNYHHAHDAYLNAVVGTALIKKYPKLESEFVYGDYKVYDVRKMIAKSEQEIGKATAKYFFYSNIMNFFKTEITLANGEIRKRPLIETNGETGEIVWDKGRDFATVRKVLSMPQVNIVKKTEVQTGGFSKESILPKRNSDKLIARKKDWDPKKYGGFDSPTVAYSVLVVAKVEKGKSKKLKSVKELLGITIMERSSFEKNPIDFLEAKGYKEVKKDLIIKLPKYSLFELENGRKRMLASAGELQKGNELALPSKYVNFLYLASHYEKLKGSPEDNEQKQLFVEQHKHYLDEIIEQISEFSKRVILADANLDKVLSAYNKHRDKPIREQAENIIHLFTLTNLGAPAAFKYFDTTIDRKRYTSTKEVLDATLIHQSITGLYETRIDLSQLGGDGGEAAAKGGSGGGGGTLNIEDEYRLHETSKEPDVSLGSTWLSDFPQAWAETGGMGLAVRQAPLIIPLKATSTPVSIKQYPMSQEARLGIKPHIQRLLDQGILVPCQSPWNTPLLPVKKPGTNDYRPVQDLREVNKRVEDIHPTVPNPYNLLSGLPPSHQWYTVLDLKDAFFCLRLHPTSQPLFAFEWRDPEMGISGQLTWTRLPQGFKNSPTLFNEALHRDLADFRIQHPDLILLQYVDDLLLAATSELDCQQGTRALLQTLGNLGYRASAKKAQICQKQVKYLGYLLKEGQRWLTEARKETVMGQPTPKTPRQLREFLGKAGFCRLFIPGFAEMAAPLYPLTKPGTLFNWGPDQQKAYQEIKQALLTAPALGLPDLTKPFELFVDEKQGYAKGVLTQKLGPWRRPVAYLSKKLDPVAAGWPPCLRMVAAIAVLTKDAGKLTMGQPLVILAPHAVEALVKQPPDRWLSNARMTHYQALLLDTDRVQFGPVVALNPATLLPLPEEGLQHNCLDILAEAHGTRPDLTDQPLPDADHTWYTDGSSLLQEGQRKAGAAVTTETEVIWAKALPAGTSAQRAELIALTQALKMAEGKKLNVYTDSRYAFATAHIHGEIYRRRGWLTSEGKEIKNKDEILALLKALFLPKRLSIIHCPGHQKGHSAEARGNRMADQAARKAAITETPDTSTLLIENSSPSGGSKRTADGSEFEAGKRTADGSEFEKRTADGSEFESPKKKAKVE

SEQ ID NO: 2638 - protein, 2116 aa, synthetic construct
MPAAKRVKLDGGDKKYSIGLDIGTNSVGWAVITDEYKVPSKKFKVLGNTDRHSIKKNLIGALLFDSGETAEATRLKRTARRRYTRRKNRICYLQEIFSNEMAKVDDSFFHRLEESFLVEEDKKHERHPIFGNIVDEVAYHEKYPTIYHLRKKLVDSTDKADLRLIYLALAHMIKFRGHFLIEGDLNPDNSDVDKLFIQLVQTYNQLFEENPINASGVDAKAILSARLSKSRRLENLIAQLPGEKKNGLFGNLIALSLGLTPNFKSNFDLAEDAKLQLSKDTYDDDLDNLLAQIGDQYADLFLAAKNLSDAILLSDILRVNTEITKAPLSASMIKRYDEHHQDLTLLKALVRQQLPEKYKEIFFDQSKNGYAGYIDGGASQEEFYKFIKPILEKMDGTEELLVKLNREDLLRKQRTFDNGSIPHQIHLGELHAILRRQEDFYPFLKDNREKIEKILTFRIPYYVGPLARGNSRFAWMTRKSEETITPWNFEEVVDKGASAQSFIERMTNFDKNLPNEKVLPKHSLLYEYFTVYNELTKVKYVTEGMRKPAFLSGEQKKAIVDLLFKTNRKVTVKQLKEDYFKKIECFDSVEISGVEDRFNASLGTYHDLLKIIKDKDFLDNEENEDILEDIVLTLTLFEDREMIEERLKTYAHLFDDKVMKQLKRRRYTGWGRLSRKLINGIRDKQSGKTILDFLKSDGFANRNFMQLIHDDSLTFKEDIQKAQVSGQGDSLHEHIANLAGSPAIKKGILQTVKVVDELVKVMGRHKPENIVIEMARENQTTQKGQKNSRERMKRIEEGIKELGSQILKEHPVENTQLQNEKLYLYYLQNGRDMYVDQELDINRLSDYDVDHIVPQSFLKDDSIDNKVLTRSDKARGKSDNVPSEEVVKKMKNYWRQLLNAKLITQRKFDNLTKAERGGLSELDKAGFIKRQLVETRQITKHVAQILDSRMNTKYDENDKLIREVKVITLKSKLVSDFRKDFQFYKVREINNYHHAHDAYLNAVVGTALIKKYPKLESEFVYGDYKVYDVRKMIAKSEQEIGKATAKYFFYSNIMNFFKTEITLANGEIRKRPLIETNGETGEIVWDKGRDFATVRKVLSMPQVNIVKKTEVQTGGFSKESILPKRNSDKLIARKKDWDPKKYGGFDSPTVAYSVLVVAKVEKGKSKKLKSVKELLGITIMERSSFEKNPIDFLEAKGYKEVKKDLIIKLPKYSLFELENGRKRMLASAGELQKGNELALPSKYVNFLYLASHYEKLKGSPEDNEQKQLFVEQHKHYLDEIIEQISEFSKRVILADANLDKVLSAYNKHRDKPIREQAENIIHLFTLTNLGAPAAFKYFDTTIDRKRYTSTKEVLDATLIHQSITGLYETRIDLSQLGGDGGGGGEAAAKGGSGGTLNIEDEYRLHETSKEPDVSLGSTWLSDFPQAWAETGGMGLAVRQAPLIIPLKATSTPVSIKQYPMSQEARLGIKPHIQRLLDQGILVPCQSPWNTPLLPVKKPGTNDYRPVQDLREVNKRVEDIHPTVPNPYNLLSGLPPSHQWYTVLDLKDAFFCLRLHPTSQPLFAFEWRDPEMGISGQLTWTRLPQGFKNSPTLFNEALHRDLADFRIQHPDLILLQYVDDLLLAATSELDCQQGTRALLQTLGNLGYRASAKKAQICQKQVKYLGYLLKEGQRWLTEARKETVMGQPTPKTPRQLREFLGKAGFCRLFIPGFAEMAAPLYPLTKPGTLFNWGPDQQKAYQEIKQALLTAPALGLPDLTKPFELFVDEKQGYAKGVLTQKLGPWRRPVAYLSKKLDPVAAGWPPCLRMVAAIAVLTKDAGKLTMGQPLVILAPHAVEALVKQPPDRWLSNARMTHYQALLLDTDRVQFGPVVALNPATLLPLPEEGLQHNCLDILAEAHGTRPDLTDQPLPDADHTWYTDGSSLLQEGQRKAGAAVTTETEVIWAKALPAGTSAQRAELIALTQALKMAEGKKLNVYTDSRYAFATAHIHGEIYRRRGWLTSEGKEIKNKDEILALLKALFLPKRLSIIHCPGHQKGHSAEARGNRMADQAARKAAITETPDTSTLLIENSSPSGGSKRTADGSEFEAGKRTADGSEFEKRTADGSEFESPKKKAKVE

SEQ ID NO: 2639 - protein, 2115 aa, synthetic construct
MPAAKRVKLDGGDKKYSIGLDIGTNSVGWAVITDEYKVPSKKFKVLGNTDRHSIKKNLIGALLFDSGETAEATRLKRTARRRYTRRKNRICYLQEIFSNEMAKVDDSFFHRLEESFLVEEDKKHERHPIFGNIVDEVAYHEKYPTIYHLRKKLVDSTDKADLRLIYLALAHMIKFRGHFLIEGDLNPDNSDVDKLFIQLVQTYNQLFEENPINASGVDAKAILSARLSKSRRLENLIAQLPGEKKNGLFGNLIALSLGLTPNFKSNFDLAEDAKLQLSKDTYDDDLDNLLAQIGDQYADLFLAAKNLSDAILLSDILRVNTEITKAPLSASMIKRYDEHHQDLTLLKALVRQQLPEKYKEIFFDQSKNGYAGYIDGGASQEEFYKFIKPILEKMDGTEELLVKLNREDLLRKQRTFDNGSIPHQIHLGELHAILRRQEDFYPFLKDNREKIEKILTFRIPYYVGPLARGNSRFAWMTRKSEETITPWNFEEVVDKGASAQSFIERMTNFDKNLPNEKVLPKHSLLYEYFTVYNELTKVKYVTEGMRKPAFLSGEQKKAIVDLLFKTNRKVTVKQLKEDYFKKIECFDSVEISGVEDRFNASLGTYHDLLKIIKDKDFLDNEENEDILEDIVLTLTLFEDREMIEERLKTYAHLFDDKVMKQLKRRRYTGWGRLSRKLINGIRDKQSGKTILDFLKSDGFANRNFMQLIHDDSLTFKEDIQKAQVSGQGDSLHEHIANLAGSPAIKKGILQTVKVVDELVKVMGRHKPENIVIEMARENQTTQKGQKNSRERMKRIEEGIKELGSQILKEHPVENTQLQNEKLYLYYLQNGRDMYVDQELDINRLSDYDVDHIVPQSFLKDDSIDNKVLTRSDKARGKSDNVPSEEVVKKMKNYWRQLLNAKLITQRKFDNLTKAERGGLSELDKAGFIKRQLVETRQITKHVAQILDSRMNTKYDENDKLIREVKVITLKSKLVSDFRKDFQFYKVREINNYHHAHDAYLNAVVGTALIKKYPKLESEFVYGDYKVYDVRKMIAKSEQEIGKATAKYFFYSNIMNFFKTEITLANGEIRKRPLIETNGETGEIVWDKGRDFATVRKVLSMPQVNIVKKTEVQTGGFSKESILPKRNSDKLIARKKDWDPKKYGGFDSPTVAYSVLVVAKVEKGKSKKLKSVKELLGITIMERSSFEKNPIDFLEAKGYKEVKKDLIIKLPKYSLFELENGRKRMLASAGELQKGNELALPSKYVNFLYLASHYEKLKGSPEDNEQKQLFVEQHKHYLDEIIEQISEFSKRVILADANLDKVLSAYNKHRDKPIREQAENIIHLFTLTNLGAPAAFKYFDTTIDRKRYTSTKEVLDATLIHQSITGLYETRIDLSQLGGDGGGGGGSGGGGSGGTLNIEDEYRLHETSKEPDVSLGSTWLSDFPQAWAETGGMGLAVRQAPLIIPLKATSTPVSIKQYPMSQEARLGIKPHIQRLLDQGILVPCQSPWNTPLLPVKKPGTNDYRPVQDLREVNKRVEDIHPTVPNPYNLLSGLPPSHQWYTVLDLKDAFFCLRLHPTSQPLFAFEWRDPEMGISGQLTWTRLPQGFKNSPTLFNEALHRDLADFRIQHPDLILLQYVDDLLLAATSELDCQQGTRALLQTLGNLGYRASAKKAQICQKQVKYLGYLLKEGQRWLTEARKETVMGQPTPKTPRQLREFLGKAGFCRLFIPGFAEMAAPLYPLTKPGTLFNWGPDQQKAYQEIKQALLTAPALGLPDLTKPFELFVDEKQGYAKGVLTQKLGPWRRPVAYLSKKLDPVAAGWPPCLRMVAAIAVLTKDAGKLTMGQPLVILAPHAVEALVKQPPDRWLSNARMTHYQALLLDTDRVQFGPVVALNPATLLPLPEEGLQHNCLDILAEAHGTRPDLTDQPLPDADHTWYTDGSSLLQEGQRKAGAAVTTETEVIWAKALPAGTSAQRAELIALTQALKMAEGKKLNVYTDSRYAFATAHIHGEIYRRRGWLTSEGKEIKNKDEILALLKALFLPKRLSIIHCPGHQKGHSAEARGNRMADQAARKAAITETPDTSTLLIENSSPSGGSKRTADGSEFEAGKRTADGSEFEKRTADGSEFESPKKKAKVE

SEQ ID NO: 2640 - protein, 2116 aa, synthetic construct
MPAAKRVKLDGGDKKYSIGLDIGTNSVGWAVITDEYKVPSKKFKVLGNTDRHSIKKNLIGALLFDSGETAEATRLKRTARRRYTRRKNRICYLQEIFSNEMAKVDDSFFHRLEESFLVEEDKKHERHPIFGNIVDEVAYHEKYPTIYHLRKKLVDSTDKADLRLIYLALAHMIKFRGHFLIEGDLNPDNSDVDKLFIQLVQTYNQLFEENPINASGVDAKAILSARLSKSRRLENLIAQLPGEKKNGLFGNLIALSLGLTPNFKSNFDLAEDAKLQLSKDTYDDDLDNLLAQIGDQYADLFLAAKNLSDAILLSDILRVNTEITKAPLSASMIKRYDEHHQDLTLLKALVRQQLPEKYKEIFFDQSKNGYAGYIDGGASQEEFYKFIKPILEKMDGTEELLVKLNREDLLRKQRTFDNGSIPHQIHLGELHAILRRQEDFYPFLKDNREKIEKILTFRIPYYVGPLARGNSRFAWMTRKSEETITPWNFEEVVDKGASAQSFIERMTNFDKNLPNEKVLPKHSLLYEYFTVYNELTKVKYVTEGMRKPAFLSGEQKKAIVDLLFKTNRKVTVKQLKEDYFKKIECFDSVEISGVEDRFNASLGTYHDLLKIIKDKDFLDNEENEDILEDIVLTLTLFEDREMIEERLKTYAHLFDDKVMKQLKRRRYTGWGRLSRKLINGIRDKQSGKTILDFLKSDGFANRNFMQLIHDDSLTFKEDIQKAQVSGQGDSLHEHIANLAGSPAIKKGILQTVKVVDELVKVMGRHKPENIVIEMARENQTTQKGQKNSRERMKRIEEGIKELGSQILKEHPVENTQLQNEKLYLYYLQNGRDMYVDQELDINRLSDYDVDHIVPQSFLKDDSIDNKVLTRSDKARGKSDNVPSEEVVKKMKNYWRQLLNAKLITQRKFDNLTKAERGGLSELDKAGFIKRQLVETRQITKHVAQILDSRMNTKYDENDKLIREVKVITLKSKLVSDFRKDFQFYKVREINNYHHAHDAYLNAVVGTALIKKYPKLESEFVYGDYKVYDVRKMIAKSEQEIGKATAKYFFYSNIMNFFKTEITLANGEIRKRPLIETNGETGEIVWDKGRDFATVRKVLSMPQVNIVKKTEVQTGGFSKESILPKRNSDKLIARKKDWDPKKYGGFDSPTVAYSVLVVAKVEKGKSKKLKSVKELLGITIMERSSFEKNPIDFLEAKGYKEVKKDLIIKLPKYSLFELENGRKRMLASAGELQKGNELALPSKYVNFLYLASHYEKLKGSPEDNEQKQLFVEQHKHYLDEIIEQISEFSKRVILADANLDKVLSAYNKHRDKPIREQAENIIHLFTLTNLGAPAAFKYFDTTIDRKRYTSTKEVLDATLIHQSITGLYETRIDLSQLGGDGGPAPGGSEAAAKGGTLNIEDEYRLHETSKEPDVSLGSTWLSDFPQAWAETGGMGLAVRQAPLIIPLKATSTPVSIKQYPMSQEARLGIKPHIQRLLDQGILVPCQSPWNTPLLPVKKPGTNDYRPVQDLREVNKRVEDIHPTVPNPYNLLSGLPPSHQWYTVLDLKDAFFCLRLHPTSQPLFAFEWRDPEMGISGQLTWTRLPQGFKNSPTLFNEALHRDLADFRIQHPDLILLQYVDDLLLAATSELDCQQGTRALLQTLGNLGYRASAKKAQICQKQVKYLGYLLKEGQRWLTEARKETVMGQPTPKTPRQLREFLGKAGFCRLFIPGFAEMAAPLYPLTKPGTLFNWGPDQQKAYQEIKQALLTAPALGLPDLTKPFELFVDEKQGYAKGVLTQKLGPWRRPVAYLSKKLDPVAAGWPPCLRMVAAIAVLTKDAGKLTMGQPLVILAPHAVEALVKQPPDRWLSNARMTHYQALLLDTDRVQFGPVVALNPATLLPLPEEGLQHNCLDILAEAHGTRPDLTDQPLPDADHTWYTDGSSLLQEGQRKAGAAVTTETEVIWAKALPAGTSAQRAELIALTQALKMAEGKKLNVYTDSRYAFATAHIHGEIYRRRGWLTSEGKEIKNKDEILALLKALFLPKRLSIIHCPGHQKGHSAEARGNRMADQAARKAAITETPDTSTLLIENSSPSGGSKRTADGSEFEAGKRTADGSEFEKRTADGSEFESPKKKAKVE

SEQ ID NO: 2641 - protein, 2116 aa, synthetic construct
MPAAKRVKLDGGDKKYSIGLDIGTNSVGWAVITDEYKVPSKKFKVLGNTDRHSIKKNLIGALLFDSGETAEATRLKRTARRRYTRRKNRICYLQEIFSNEMAKVDDSFFHRLEESFLVEEDKKHERHPIFGNIVDEVAYHEKYPTIYHLRKKLVDSTDKADLRLIYLALAHMIKFRGHFLIEGDLNPDNSDVDKLFIQLVQTYNQLFEENPINASGVDAKAILSARLSKSRRLENLIAQLPGEKKNGLFGNLIALSLGLTPNFKSNFDLAEDAKLQLSKDTYDDDLDNLLAQIGDQYADLFLAAKNLSDAILLSDILRVNTEITKAPLSASMIKRYDEHHQDLTLLKALVRQQLPEKYKEIFFDQSKNGYAGYIDGGASQEEFYKFIKPILEKMDGTEELLVKLNREDLLRKQRTFDNGSIPHQIHLGELHAILRRQEDFYPFLKDNREKIEKILTFRIPYYVGPLARGNSRFAWMTRKSEETITPWNFEEVVDKGASAQSFIERMTNFDKNLPNEKVLPKHSLLYEYFTVYNELTKVKYVTEGMRKPAFLSGEQKKAIVDLLFKTNRKVTVKQLKEDYFKKIECFDSVEISGVEDRFNASLGTYHDLLKIIKDKDFLDNEENEDILEDIVLTLTLFEDREMIEERLKTYAHLFDDKVMKQLKRRRYTGWGRLSRKLINGIRDKQSGKTILDFLKSDGFANRNFMQLIHDDSLTFKEDIQKAQVSGQGDSLHEHIANLAGSPAIKKGILQTVKVVDELVKVMGRHKPENIVIEMARENQTTQKGQKNSRERMKRIEEGIKELGSQILKEHPVENTQLQNEKLYLYYLQNGRDMYVDQELDINRLSDYDVDHIVPQSFLKDDSIDNKVLTRSDKARGKSDNVPSEEVVKKMKNYWRQLLNAKLITQRKFDNLTKAERGGLSELDKAGFIKRQLVETRQITKHVAQILDSRMNTKYDENDKLIREVKVITLKSKLVSDFRKDFQFYKVREINNYHHAHDAYLNAVVGTALIKKYPKLESEFVYGDYKVYDVRKMIAKSEQEIGKATAKYFFYSNIMNFFKTEITLANGEIRKRPLIETNGETGEIVWDKGRDFATVRKVLSMPQVNIVKKTEVQTGGFSKESILPKRNSDKLIARKKDWDPKKYGGFDSPTVAYSVLVVAKVEKGKSKKLKSVKELLGITIMERSSFEKNPIDFLEAKGYKEVKKDLIIKLPKYSLFELENGRKRMLASAGELQKGNELALPSKYVNFLYLASHYEKLKGSPEDNEQKQLFVEQHKHYLDEIIEQISEFSKRVILADANLDKVLSAYNKHRDKPIREQAENIIHLFTLTNLGAPAAFKYFDTTIDRKRYTSTKEVLDATLIHQSITGLYETRIDLSQLGGDGGGSSEAAAKPAPGGTLNIEDEYRLHETSKEPDVSLGSTWLSDFPQAWAETGGMGLAVRQAPLIIPLKATSTPVSIKQYPMSQEARLGIKPHIQRLLDQGILVPCQSPWNTPLLPVKKPGTNDYRPVQDLREVNKRVEDIHPTVPNPYNLLSGLPPSHQWYTVLDLKDAFFCLRLHPTSQPLFAFEWRDPEMGISGQLTWTRLPQGFKNSPTLFNEALHRDLADFRIQHPDLILLQYVDDLLLAATSELDCQQGTRALLQTLGNLGYRASAKKAQICQKQVKYLGYLLKEGQRWLTEARKETVMGQPTPKTPRQLREFLGKAGFCRLFIPGFAEMAAPLYPLTKPGTLFNWGPDQQKAYQEIKQALLTAPALGLPDLTKPFELFVDEKQGYAKGVLTQKLGPWRRPVAYLSKKLDPVAAGWPPCLRMVAAIAVLTKDAGKLTMGQPLVILAPHAVEALVKQPPDRWLSNARMTHYQALLLDTDRVQFGPVVALNPATLLPLPEEGLQHNCLDILAEAHGTRPDLTDQPLPDADHTWYTDGSSLLQEGQRKAGAAVTTETEVIWAKALPAGTSAQRAELIALTQALKMAEGKKLNVYTDSRYAFATAHIHGEIYRRRGWLTSEGKEIKNKDEILALLKALFLPKRLSIIHCPGHQKGHSAEARGNRMADQAARKAAITETPDTSTLLIENSSPSGGSKRTADGSEFEAGKRTADGSEFEKRTADGSEFESPKKKAKVE

SEQ ID NO: 2642 - protein, 2111 aa, synthetic construct
MPAAKRVKLDGGDKKYSIGLDIGTNSVGWAVITDEYKVPSKKFKVLGNTDRHSIKKNLIGALLFDSGETAEATRLKRTARRRYTRRKNRICYLQEIFSNEMAKVDDSFFHRLEESFLVEEDKKHERHPIFGNIVDEVAYHEKYPTIYHLRKKLVDSTDKADLRLIYLALAHMIKFRGHFLIEGDLNPDNSDVDKLFIQLVQTYNQLFEENPINASGVDAKAILSARLSKSRRLENLIAQLPGEKKNGLFGNLIALSLGLTPNFKSNFDLAEDAKLQLSKDTYDDDLDNLLAQIGDQYADLFLAAKNLSDAILLSDILRVNTEITKAPLSASMIKRYDEHHQDLTLLKALVRQQLPEKYKEIFFDQSKNGYAGYIDGGASQEEFYKFIKPILEKMDGTEELLVKLNREDLLRKQRTFDNGSIPHQIHLGELHAILRRQEDFYPFLKDNREKIEKILTFRIPYYVGPLARGNSRFAWMTRKSEETITPWNFEEVVDKGASAQSFIERMTNFDKNLPNEKVLPKHSLLYEYFTVYNELTKVKYVTEGMRKPAFLSGEQKKAIVDLLFKTNRKVTVKQLKEDYFKKIECFDSVEISGVEDRFNASLGTYHDLLKIIKDKDFLDNEENEDILEDIVLTLTLFEDREMIEERLKTYAHLFDDKVMKQLKRRRYTGWGRLSRKLINGIRDKQSGKTILDFLKSDGFANRNFMQLIHDDSLTFKEDIQKAQVSGQGDSLHEHIANLAGSPAIKKGILQTVKVVDELVKVMGRHKPENIVIEMARENQTTQKGQKNSRERMKRIEEGIKELGSQILKEHPVENTQLQNEKLYLYYLQNGRDMYVDQELDINRLSDYDVDHIVPQSFLKDDSIDNKVLTRSDKARGKSDNVPSEEVVKKMKNYWRQLLNAKLITQRKFDNLTKAERGGLSELDKAGFIKRQLVETRQITKHVAQILDSRMNTKYDENDKLIREVKVITLKSKLVSDFRKDFQFYKVREINNYHHAHDAYLNAVVGTALIKKYPKLESEFVYGDYKVYDVRKMIAKSEQEIGKATAKYFFYSNIMNFFKTEITLANGEIRKRPLIETNGETGEIVWDKGRDFATVRKVLSMPQVNIVKKTEVQTGGFSKESILPKRNSDKLIARKKDWDPKKYGGFDSPTVAYSVLVVAKVEKGKSKKLKSVKELLGITIMERSSFEKNPIDFLEAKGYKEVKKDLIIKLPKYSLFELENGRKRMLASAGELQKGNELALPSKYVNFLYLASHYEKLKGSPEDNEQKQLFVEQHKHYLDEIIEQISEFSKRVILADANLDKVLSAYNKHRDKPIREQAENIIHLFTLTNLGAPAAFKYFDTTIDRKRYTSTKEVLDATLIHQSITGLYETRIDLSQLGGDGGGGGGGGGGTLNIEDEYRLHETSKEPDVSLGSTWLSDFPQAWAETGGMGLAVRQAPLIIPLKATSTPVSIKQYPMSQEARLGIKPHIQRLLDQGILVPCQSPWNTPLLPVKKPGTNDYRPVQDLREVNKRVEDIHPTVPNPYNLLSGLPPSHQWYTVLDLKDAFFCLRLHPTSQPLFAFEWRDPEMGISGQLTWTRLPQGFKNSPTLFNEALHRDLADFRIQHPDLILLQYVDDLLLAATSELDCQQGTRALLQTLGNLGYRASAKKAQICQKQVKYLGYLLKEGQRWLTEARKETVMGQPTPKTPRQLREFLGKAGFCRLFIPGFAEMAAPLYPLTKPGTLFNWGPDQQKAYQEIKQALLTAPALGLPDLTKPFELFVDEKQGYAKGVLTQKLGPWRRPVAYLSKKLDPVAAGWPPCLRMVAAIAVLTKDAGKLTMGQPLVILAPHAVEALVKQPPDRWLSNARMTHYQALLLDTDRVQFGPVVALNPATLLPLPEEGLQHNCLDILAEAHGTRPDLTDQPLPDADHTWYTDGSSLLQEGQRKAGAAVTTETEVIWAKALPAGTSAQRAELIALTQALKMAEGKKLNVYTDSRYAFATAHIHGEIYRRRGWLTSEGKEIKNKDEILALLKALFLPKRLSIIHCPGHQKGHSAEARGNRMADQAARKAAITETPDTSTLLIENSSPSGGSKRTADGSEFEAGKRTADGSEFEKRTADGSEFESPKKKAKVE

SEQ ID NO: 2643 - protein, 2111 aa, synthetic construct
MPAAKRVKLDGGDKKYSIGLDIGTNSVGWAVITDEYKVPSKKFKVLGNTDRHSIKKNLIGALLFDSGETAEATRLKRTARRRYTRRKNRICYLQEIFSNEMAKVDDSFFHRLEESFLVEEDKKHERHPIFGNIVDEVAYHEKYPTIYHLRKKLVDSTDKADLRLIYLALAHMIKFRGHFLIEGDLNPDNSDVDKLFIQLVQTYNQLFEENPINASGVDAKAILSARLSKSRRLENLIAQLPGEKKNGLFGNLIALSLGLTPNFKSNFDLAEDAKLQLSKDTYDDDLDNLLAQIGDQYADLFLAAKNLSDAILLSDILRVNTEITKAPLSASMIKRYDEHHQDLTLLKALVRQQLPEKYKEIFFDQSKNGYAGYIDGGASQEEFYKFIKPILEKMDGTEELLVKLNREDLLRKQRTFDNGSIPHQIHLGELHAILRRQEDFYPFLKDNREKIEKILTFRIPYYVGPLARGNSRFAWMTRKSEETITPWNFEEVVDKGASAQSFIERMTNFDKNLPNEKVLPKHSLLYEYFTVYNELTKVKYVTEGMRKPAFLSGEQKKAIVDLLFKTNRKVTVKQLKEDYFKKIECFDSVEISGVEDRFNASLGTYHDLLKIIKDKDFLDNEENEDILEDIVLTLTLFEDREMIEERLKTYAHLFDDKVMKQLKRRRYTGWGRLSRKLINGIRDKQSGKTILDFLKSDGFANRNFMQLIHDDSLTFKEDIQKAQVSGQGDSLHEHIANLAGSPAIKKGILQTVKVVDELVKVMGRHKPENIVIEMARENQTTQKGQKNSRERMKRIEEGIKELGSQILKEHPVENTQLQNEKLYLYYLQNGRDMYVDQELDINRLSDYDVDHIVPQSFLKDDSIDNKVLTRSDKARGKSDNVPSEEVVKKMKNYWRQLLNAKLITQRKFDNLTKAERGGLSELDKAGFIKRQLVETRQITKHVAQILDSRMNTKYDENDKLIREVKVITLKSKLVSDFRKDFQFYKVREINNYHHAHDAYLNAVVGTALIKKYPKLESEFVYGDYKVYDVRKMIAKSEQEIGKATAKYFFYSNIMNFFKTEITLANGEIRKRPLIETNGETGEIVWDKGRDFATVRKVLSMPQVNIVKKTEVQTGGFSKESILPKRNSDKLIARKKDWDPKKYGGFDSPTVAYSVLVVAKVEKGKSKKLKSVKELLGITIMERSSFEKNPIDFLEAKGYKEVKKDLIIKLPKYSLFELENGRKRMLASAGELQKGNELALPSKYVNFLYLASHYEKLKGSPEDNEQKQLFVEQHKHYLDEIIEQISEFSKRVILADANLDKVLSAYNKHRDKPIREQAENIIHLFTLTNLGAPAAFKYFDTTIDRKRYTSTKEVLDATLIHQSITGLYETRIDLSQLGGDGGPAPGGSGGTLNIEDEYRLHETSKEPDVSLGSTWLSDFPQAWAETGGMGLAVRQAPLIIPLKATSTPVSIKQYPMSQEARLGIKPHIQRLLDQGILVPCQSPWNTPLLPVKKPGTNDYRPVQDLREVNKRVEDIHPTVPNPYNLLSGLPPSHQWYTVLDLKDAFFCLRLHPTSQPLFAFEWRDPEMGISGQLTWTRLPQGFKNSPTLFNEALHRDLADFRIQHPDLILLQYVDDLLLAATSELDCQQGTRALLQTLGNLGYRASAKKAQICQKQVKYLGYLLKEGQRWLTEARKETVMGQPTPKTPRQLREFLGKAGFCRLFIPGFAEMAAPLYPLTKPGTLFNWGPDQQKAYQEIKQALLTAPALGLPDLTKPFELFVDEKQGYAKGVLTQKLGPWRRPVAYLSKKLDPVAAGWPPCLRMVAAIAVLTKDAGKLTMGQPLVILAPHAVEALVKQPPDRWLSNARMTHYQALLLDTDRVQFGPVVALNPATLLPLPEEGLQHNCLDILAEAHGTRPDLTDQPLPDADHTWYTDGSSLLQEGQRKAGAAVTTETEVIWAKALPAGTSAQRAELIALTQALKMAEGKKLNVYTDSRYAFATAHIHGEIYRRRGWLTSEGKEIKNKDEILALLKALFLPKRLSIIHCPGHQKGHSAEARGNRMADQAARKAAITETPDTSTLLIENSSPSGGSKRTADGSEFEAGKRTADGSEFEKRTADGSEFESPKKKAKVE

SEQ ID NO: 2644 - protein, 2135 aa, synthetic construct
MPAAKRVKLDGGDKKYSIGLDIGTNSVGWAVITDEYKVPSKKFKVLGNTDRHSIKKNLIGALLFDSGETAEATRLKRTARRRYTRRKNRICYLQEIFSNEMAKVDDSFFHRLEESFLVEEDKKHERHPIFGNIVDEVAYHEKYPTIYHLRKKLVDSTDKADLRLIYLALAHMIKFRGHFLIEGDLNPDNSDVDKLFIQLVQTYNQLFEENPINASGVDAKAILSARLSKSRRLENLIAQLPGEKKNGLFGNLIALSLGLTPNFKSNFDLAEDAKLQLSKDTYDDDLDNLLAQIGDQYADLFLAAKNLSDAILLSDILRVNTEITKAPLSASMIKRYDEHHQDLTLLKALVRQQLPEKYKEIFFDQSKNGYAGYIDGGASQEEFYKFIKPILEKMDGTEELLVKLNREDLLRKQRTFDNGSIPHQIHLGELHAILRRQEDFYPFLKDNREKIEKILTFRIPYYVGPLARGNSRFAWMTRKSEETITPWNFEEVVDKGASAQSFIERMTNFDKNLPNEKVLPKHSLLYEYFTVYNELTKVKYVTEGMRKPAFLSGEQKKAIVDLLFKTNRKVTVKQLKEDYFKKIECFDSVEISGVEDRFNASLGTYHDLLKIIKDKDFLDNEENEDILEDIVLTLTLFEDREMIEERLKTYAHLFDDKVMKQLKRRRYTGWGRLSRKLINGIRDKQSGKTILDFLKSDGFANRNFMQLIHDDSLTFKEDIQKAQVSGQGDSLHEHIANLAGSPAIKKGILQTVKVVDELVKVMGRHKPENIVIEMARENQTTQKGQKNSRERMKRIEEGIKELGSQILKEHPVENTQLQNEKLYLYYLQNGRDMYVDQELDINRLSDYDVDHIVPQSFLKDDSIDNKVLTRSDKARGKSDNVPSEEVVKKMKNYWRQLLNAKLITQRKFDNLTKAERGGLSELDKAGFIKRQLVETRQITKHVAQILDSRMNTKYDENDKLIREVKVITLKSKLVSDFRKDFQFYKVREINNYHHAHDAYLNAVVGTALIKKYPKLESEFVYGDYKVYDVRKMIAKSEQEIGKATAKYFFYSNIMNFFKTEITLANGEIRKRPLIETNGETGEIVWDKGRDFATVRKVLSMPQVNIVKKTEVQTGGFSKESILPKRNSDKLIARKKDWDPKKYGGFDSPTVAYSVLVVAKVEKGKSKKLKSVKELLGITIMERSSFEKNPIDFLEAKGYKEVKKDLIIKLPKYSLFELENGRKRMLASAGELQKGNELALPSKYVNFLYLASHYEKLKGSPEDNEQKQLFVEQHKHYLDEIIEQISEFSKRVILADANLDKVLSAYNKHRDKPIREQAENIIHLFTLTNLGAPAAFKYFDTTIDRKRYTSTKEVLDATLIHQSITGLYETRIDLSQLGGDGGGGGGSGGGGSGGGGSGGGGSGGGGSGGGGSGGTLNIEDEYRLHETSKEPDVSLGSTWLSDFPQAWAETGGMGLAVRQAPLIIPLKATSTPVSIKQYPMSQEARLGIKPHIQRLLDQGILVPCQSPWNTPLLPVKKPGTNDYRPVQDLREVNKRVEDIHPTVPNPYNLLSGLPPSHQWYTVLDLKDAFFCLRLHPTSQPLFAFEWRDPEMGISGQLTWTRLPQGFKNSPTLFNEALHRDLADFRIQHPDLILLQYVDDLLLAATSELDCQQGTRALLQTLGNLGYRASAKKAQICQKQVKYLGYLLKEGQRWLTEARKETVMGQPTPKTPRQLREFLGKAGFCRLFIPGFAEMAAPLYPLTKPGTLFNWGPDQQKAYQEIKQALLTAPALGLPDLTKPFELFVDEKQGYAKGVLTQKLGPWRRPVAYLSKKLDPVAAGWPPCLRMVAAIAVLTKDAGKLTMGQPLVILAPHAVEALVKQPPDRWLSNARMTHYQALLLDTDRVQFGPVVALNPATLLPLPEEGLQHNCLDILAEAHGTRPDLTDQPLPDADHTWYTDGSSLLQEGQRKAGAAVTTETEVIWAKALPAGTSAQRAELIALTQALKMAEGKKLNVYTDSRYAFATAHIHGEIYRRRGWLTSEGKEIKNKDEILALLKALFLPKRLSIIHCPGHQKGHSAEARGNRMADQAARKAAITETPDTSTLLIENSSPSGGSKRTADGSEFEAGKRTADGSEFEKRTADGSEFESPKKKAKVE

SEQ ID NO: 2645 - protein, 2116 aa, synthetic construct
MPAAKRVKLDGGDKKYSIGLDIGTNSVGWAVITDEYKVPSKKFKVLGNTDRHSIKKNLIGALLFDSGETAEATRLKRTARRRYTRRKNRICYLQEIFSNEMAKVDDSFFHRLEESFLVEEDKKHERHPIFGNIVDEVAYHEKYPTIYHLRKKLVDSTDKADLRLIYLALAHMIKFRGHFLIEGDLNPDNSDVDKLFIQLVQTYNQLFEENPINASGVDAKAILSARLSKSRRLENLIAQLPGEKKNGLFGNLIALSLGLTPNFKSNFDLAEDAKLQLSKDTYDDDLDNLLAQIGDQYADLFLAAKNLSDAILLSDILRVNTEITKAPLSASMIKRYDEHHQDLTLLKALVRQQLPEKYKEIFFDQSKNGYAGYIDGGASQEEFYKFIKPILEKMDGTEELLVKLNREDLLRKQRTFDNGSIPHQIHLGELHAILRRQEDFYPFLKDNREKIEKILTFRIPYYVGPLARGNSRFAWMTRKSEETITPWNFEEVVDKGASAQSFIERMTNFDKNLPNEKVLPKHSLLYEYFTVYNELTKVKYVTEGMRKPAFLSGEQKKAIVDLLFKTNRKVTVKQLKEDYFKKIECFDSVEISGVEDRFNASLGTYHDLLKIIKDKDFLDNEENEDILEDIVLTLTLFEDREMIEERLKTYAHLFDDKVMKQLKRRRYTGWGRLSRKLINGIRDKQSGKTILDFLKSDGFANRNFMQLIHDDSLTFKEDIQKAQVSGQGDSLHEHIANLAGSPAIKKGILQTVKVVDELVKVMGRHKPENIVIEMARENQTTQKGQKNSRERMKRIEEGIKELGSQILKEHPVENTQLQNEKLYLYYLQNGRDMYVDQELDINRLSDYDVDHIVPQSFLKDDSIDNKVLTRSDKARGKSDNVPSEEVVKKMKNYWRQLLNAKLITQRKFDNLTKAERGGLSELDKAGFIKRQLVETRQITKHVAQILDSRMNTKYDENDKLIREVKVITLKSKLVSDFRKDFQFYKVREINNYHHAHDAYLNAVVGTALIKKYPKLESEFVYGDYKVYDVRKMIAKSEQEIGKATAKYFFYSNIMNFFKTEITLANGEIRKRPLIETNGETGEIVWDKGRDFATVRKVLSMPQVNIVKKTEVQTGGFSKESILPKRNSDKLIARKKDWDPKKYGGFDSPTVAYSVLVVAKVEKGKSKKLKSVKELLGITIMERSSFEKNPIDFLEAKGYKEVKKDLIIKLPKYSLFELENGRKRMLASAGELQKGNELALPSKYVNFLYLASHYEKLKGSPEDNEQKQLFVEQHKHYLDEIIEQISEFSKRVILADANLDKVLSAYNKHRDKPIREQAENIIHLFTLTNLGAPAAFKYFDTTIDRKRYTSTKEVLDATLIHQSITGLYETRIDLSQLGGDGGPAPEAAAKGSSGGTLNIEDEYRLHETSKEPDVSLGSTWLSDFPQAWAETGGMGLAVRQAPLIIPLKATSTPVSIKQYPMSQEARLGIKPHIQRLLDQGILVPCQSPWNTPLLPVKKPGTNDYRPVQDLREVNKRVEDIHPTVPNPYNLLSGLPPSHQWYTVLDLKDAFFCLRLHPTSQPLFAFEWRDPEMGISGQLTWTRLPQGFKNSPTLFNEALHRDLADFRIQHPDLILLQYVDDLLLAATSELDCQQGTRALLQTLGNLGYRASAKKAQICQKQVKYLGYLLKEGQRWLTEARKETVMGQPTPKTPRQLREFLGKAGFCRLFIPGFAEMAAPLYPLTKPGTLFNWGPDQQKAYQEIKQALLTAPALGLPDLTKPFELFVDEKQGYAKGVLTQKLGPWRRPVAYLSKKLDPVAAGWPPCLRMVAAIAVLTKDAGKLTMGQPLVILAPHAVEALVKQPPDRWLSNARMTHYQALLLDTDRVQFGPVVALNPATLLPLPEEGLQHNCLDILAEAHGTRPDLTDQPLPDADHTWYTDGSSLLQEGQRKAGAAVTTETEVIWAKALPAGTSAQRAELIALTQALKMAEGKKLNVYTDSRYAFATAHIHGEIYRRRGWLTSEGKEIKNKDEILALLKALFLPKRLSIIHCPGHQKGHSAEARGNRMADQAARKAAITETPDTSTLLIENSSPSGGSKRTADGSEFEAGKRTADGSEFEKRTADGSEFESPKKKAKVE

SEQ ID NO: 2646 - protein, 2108 aa, synthetic construct
MPAAKRVKLDGGDKKYSIGLDIGTNSVGWAVITDEYKVPSKKFKVLGNTDRHSIKKNLIGALLFDSGETAEATRLKRTARRRYTRRKNRICYLQEIFSNEMAKVDDSFFHRLEESFLVEEDKKHERHPIFGNIVDEVAYHEKYPTIYHLRKKLVDSTDKADLRLIYLALAHMIKFRGHFLIEGDLNPDNSDVDKLFIQLVQTYNQLFEENPINASGVDAKAILSARLSKSRRLENLIAQLPGEKKNGLFGNLIALSLGLTPNFKSNFDLAEDAKLQLSKDTYDDDLDNLLAQIGDQYADLFLAAKNLSDAILLSDILRVNTEITKAPLSASMIKRYDEHHQDLTLLKALVRQQLPEKYKEIFFDQSKNGYAGYIDGGASQEEFYKFIKPILEKMDGTEELLVKLNREDLLRKQRTFDNGSIPHQIHLGELHAILRRQEDFYPFLKDNREKIEKILTFRIPYYVGPLARGNSRFAWMTRKSEETITPWNFEEVVDKGASAQSFIERMTNFDKNLPNEKVLPKHSLLYEYFTVYNELTKVKYVTEGMRKPAFLSGEQKKAIVDLLFKTNRKVTVKQLKEDYFKKIECFDSVEISGVEDRFNASLGTYHDLLKIIKDKDFLDNEENEDILEDIVLTLTLFEDREMIEERLKTYAHLFDDKVMKQLKRRRYTGWGRLSRKLINGIRDKQSGKTILDFLKSDGFANRNFMQLIHDDSLTFKEDIQKAQVSGQGDSLHEHIANLAGSPAIKKGILQTVKVVDELVKVMGRHKPENIVIEMARENQTTQKGQKNSRERMKRIEEGIKELGSQILKEHPVENTQLQNEKLYLYYLQNGRDMYVDQELDINRLSDYDVDHIVPQSFLKDDSIDNKVLTRSDKARGKSDNVPSEEVVKKMKNYWRQLLNAKLITQRKFDNLTKAERGGLSELDKAGFIKRQLVETRQITKHVAQILDSRMNTKYDENDKLIREVKVITLKSKLVSDFRKDFQFYKVREINNYHHAHDAYLNAVVGTALIKKYPKLESEFVYGDYKVYDVRKMIAKSEQEIGKATAKYFFYSNIMNFFKTEITLANGEIRKRPLIETNGETGEIVWDKGRDFATVRKVLSMPQVNIVKKTEVQTGGFSKESILPKRNSDKLIARKKDWDPKKYGGFDSPTVAYSVLVVAKVEKGKSKKLKSVKELLGITIMERSSFEKNPIDFLEAKGYKEVKKDLIIKLPKYSLFELENGRKRMLASAGELQKGNELALPSKYVNFLYLASHYEKLKGSPEDNEQKQLFVEQHKHYLDEIIEQISEFSKRVILADANLDKVLSAYNKHRDKPIREQAENIIHLFTLTNLGAPAAFKYFDTTIDRKRYTSTKEVLDATLIHQSITGLYETRIDLSQLGGDGGGGGGGTLNIEDEYRLHETSKEPDVSLGSTWLSDFPQAWAETGGMGLAVRQAPLIIPLKATSTPVSIKQYPMSQEARLGIKPHIQRLLDQGILVPCQSPWNTPLLPVKKPGTNDYRPVQDLREVNKRVEDIHPTVPNPYNLLSGLPPSHQWYTVLDLKDAFFCLRLHPTSQPLFAFEWRDPEMGISGQLTWTRLPQGFKNSPTLFNEALHRDLADFRIQHPDLILLQYVDDLLLAATSELDCQQGTRALLQTLGNLGYRASAKKAQICQKQVKYLGYLLKEGQRWLTEARKETVMGQPTPKTPRQLREFLGKAGFCRLFIPGFAEMAAPLYPLTKPGTLFNWGPDQQKAYQEIKQALLTAPALGLPDLTKPFELFVDEKQGYAKGVLTQKLGPWRRPVAYLSKKLDPVAAGWPPCLRMVAAIAVLTKDAGKLTMGQPLVILAPHAVEALVKQPPDRWLSNARMTHYQALLLDTDRVQFGPVVALNPATLLPLPEEGLQHNCLDILAEAHGTRPDLTDQPLPDADHTWYTDGSSLLQEGQRKAGAAVTTETEVIWAKALPAGTSAQRAELIALTQALKMAEGKKLNVYTDSRYAFATAHIHGEIYRRRGWLTSEGKEIKNKDEILALLKALFLPKRLSIIHCPGHQKGHSAEARGNRMADQAARKAAITETPDTSTLLIENSSPSGGSKRTADGSEFEAGKRTADGSEFEKRTADGSEFESPKKKAKVE

SEQ ID NO: 2647 - protein, 2115 aa, synthetic construct
MPAAKRVKLDGGDKKYSIGLDIGTNSVGWAVITDEYKVPSKKFKVLGNTDRHSIKKNLIGALLFDSGETAEATRLKRTARRRYTRRKNRICYLQEIFSNEMAKVDDSFFHRLEESFLVEEDKKHERHPIFGNIVDEVAYHEKYPTIYHLRKKLVDSTDKADLRLIYLALAHMIKFRGHFLIEGDLNPDNSDVDKLFIQLVQTYNQLFEENPINASGVDAKAILSARLSKSRRLENLIAQLPGEKKNGLFGNLIALSLGLTPNFKSNFDLAEDAKLQLSKDTYDDDLDNLLAQIGDQYADLFLAAKNLSDAILLSDILRVNTEITKAPLSASMIKRYDEHHQDLTLLKALVRQQLPEKYKEIFFDQSKNGYAGYIDGGASQEEFYKFIKPILEKMDGTEELLVKLNREDLLRKQRTFDNGSIPHQIHLGELHAILRRQEDFYPFLKDNREKIEKILTFRIPYYVGPLARGNSRFAWMTRKSEETITPWNFEEVVDKGASAQSFIERMTNFDKNLPNEKVLPKHSLLYEYFTVYNELTKVKYVTEGMRKPAFLSGEQKKAIVDLLFKTNRKVTVKQLKEDYFKKIECFDSVEISGVEDRFNASLGTYHDLLKIIKDKDFLDNEENEDILEDIVLTLTLFEDREMIEERLKTYAHLFDDKVMKQLKRRRYTGWGRLSRKLINGIRDKQSGKTILDFLKSDGFANRNFMQLIHDDSLTFKEDIQKAQVSGQGDSLHEHIANLAGSPAIKKGILQTVKVVDELVKVMGRHKPENIVIEMARENQTTQKGQKNSRERMKRIEEGIKELGSQILKEHPVENTQLQNEKLYLYYLQNGRDMYVDQELDINRLSDYDVDHIVPQSFLKDDSIDNKVLTRSDKARGKSDNVPSEEVVKKMKNYWRQLLNAKLITQRKFDNLTKAERGGLSELDKAGFIKRQLVETRQITKHVAQILDSRMNTKYDENDKLIREVKVITLKSKLVSDFRKDFQFYKVREINNYHHAHDAYLNAVVGTALIKKYPKLESEFVYGDYKVYDVRKMIAKSEQEIGKATAKYFFYSNIMNFFKTEITLANGEIRKRPLIETNGETGEIVWDKGRDFATVRKVLSMPQVNIVKKTEVQTGGFSKESILPKRNSDKLIARKKDWDPKKYGGFDSPTVAYSVLVVAKVEKGKSKKLKSVKELLGITIMERSSFEKNPIDFLEAKGYKEVKKDLIIKLPKYSLFELENGRKRMLASAGELQKGNELALPSKYVNFLYLASHYEKLKGSPEDNEQKQLFVEQHKHYLDEIIEQISEFSKRVILADANLDKVLSAYNKHRDKPIREQAENIIHLFTLTNLGAPAAFKYFDTTIDRKRYTSTKEVLDATLIHQSITGLYETRIDLSQLGGDGGEAAAKEAAAKGGTLNIEDEYRLHETSKEPDVSLGSTWLSDFPQAWAETGGMGLAVRQAPLIIPLKATSTPVSIKQYPMSQEARLGIKPHIQRLLDQGILVPCQSPWNTPLLPVKKPGTNDYRPVQDLREVNKRVEDIHPTVPNPYNLLSGLPPSHQWYTVLDLKDAFFCLRLHPTSQPLFAFEWRDPEMGISGQLTWTRLPQGFKNSPTLFNEALHRDLADFRIQHPDLILLQYVDDLLLAATSELDCQQGTRALLQTLGNLGYRASAKKAQICQKQVKYLGYLLKEGQRWLTEARKETVMGQPTPKTPRQLREFLGKAGFCRLFIPGFAEMAAPLYPLTKPGTLFNWGPDQQKAYQEIKQALLTAPALGLPDLTKPFELFVDEKQGYAKGVLTQKLGPWRRPVAYLSKKLDPVAAGWPPCLRMVAAIAVLTKDAGKLTMGQPLVILAPHAVEALVKQPPDRWLSNARMTHYQALLLDTDRVQFGPVVALNPATLLPLPEEGLQHNCLDILAEAHGTRPDLTDQPLPDADHTWYTDGSSLLQEGQRKAGAAVTTETEVIWAKALPAGTSAQRAELIALTQALKMAEGKKLNVYTDSRYAFATAHIHGEIYRRRGWLTSEGKEIKNKDEILALLKALFLPKRLSIIHCPGHQKGHSAEARGNRMADQAARKAAITETPDTSTLLIENSSPSGGSKRTADGSEFEAGKRTADGSEFEKRTADGSEFESPKKKAKVE

SEQ ID NO: 2648 - protein, 2116 aa, synthetic construct
MPAAKRVKLDGGDKKYSIGLDIGTNSVGWAVITDEYKVPSKKFKVLGNTDRHSIKKNLIGALLFDSGETAEATRLKRTARRRYTRRKNRICYLQEIFSNEMAKVDDSFFHRLEESFLVEEDKKHERHPIFGNIVDEVAYHEKYPTIYHLRKKLVDSTDKADLRLIYLALAHMIKFRGHFLIEGDLNPDNSDVDKLFIQLVQTYNQLFEENPINASGVDAKAILSARLSKSRRLENLIAQLPGEKKNGLFGNLIALSLGLTPNFKSNFDLAEDAKLQLSKDTYDDDLDNLLAQIGDQYADLFLAAKNLSDAILLSDILRVNTEITKAPLSASMIKRYDEHHQDLTLLKALVRQQLPEKYKEIFFDQSKNGYAGYIDGGASQEEFYKFIKPILEKMDGTEELLVKLNREDLLRKQRTFDNGSIPHQIHLGELHAILRRQEDFYPFLKDNREKIEKILTFRIPYYVGPLARGNSRFAWMTRKSEETITPWNFEEVVDKGASAQSFIERMTNFDKNLPNEKVLPKHSLLYEYFTVYNELTKVKYVTEGMRKPAFLSGEQKKAIVDLLFKTNRKVTVKQLKEDYFKKIECFDSVEISGVEDRFNASLGTYHDLLKIIKDKDFLDNEENEDILEDIVLTLTLFEDREMIEERLKTYAHLFDDKVMKQLKRRRYTGWGRLSRKLINGIRDKQSGKTILDFLKSDGFANRNFMQLIHDDSLTFKEDIQKAQVSGQGDSLHEHIANLAGSPAIKKGILQTVKVVDELVKVMGRHKPENIVIEMARENQTTQKGQKNSRERMKRIEEGIKELGSQILKEHPVENTQLQNEKLYLYYLQNGRDMYVDQELDINRLSDYDVDHIVPQSFLKDDSIDNKVLTRSDKARGKSDNVPSEEVVKKMKNYWRQLLNAKLITQRKFDNLTKAERGGLSELDKAGFIKRQLVETRQITKHVAQILDSRMNTKYDENDKLIREVKVITLKSKLVSDFRKDFQFYKVREINNYHHAHDAYLNAVVGTALIKKYPKLESEFVYGDYKVYDVRKMIAKSEQEIGKATAKYFFYSNIMNFFKTEITLANGEIRKRPLIETNGETGEIVWDKGRDFATVRKVLSMPQVNIVKKTEVQTGGFSKESILPKRNSDKLIARKKDWDPKKYGGFDSPTVAYSVLVVAKVEKGKSKKLKSVKELLGITIMERSSFEKNPIDFLEAKGYKEVKKDLIIKLPKYSLFELENGRKRMLASAGELQKGNELALPSKYVNFLYLASHYEKLKGSPEDNEQKQLFVEQHKHYLDEIIEQISEFSKRVILADANLDKVLSAYNKHRDKPIREQAENIIHLFTLTNLGAPAAFKYFDTTIDRKRYTSTKEVLDATLIHQSITGLYETRIDLSQLGGDGGGSSPAPEAAAKGGTLNIEDEYRLHETSKEPDVSLGSTWLSDFPQAWAETGGMGLAVRQAPLIIPLKATSTPVSIKQYPMSQEARLGIKPHIQRLLDQGILVPCQSPWNTPLLPVKKPGTNDYRPVQDLREVNKRVEDIHPTVPNPYNLLSGLPPSHQWYTVLDLKDAFFCLRLHPTSQPLFAFEWRDPEMGISGQLTWTRLPQGFKNSPTLFNEALHRDLADFRIQHPDLILLQYVDDLLLAATSELDCQQGTRALLQTLGNLGYRASAKKAQICQKQVKYLGYLLKEGQRWLTEARKETVMGQPTPKTPRQLREFLGKAGFCRLFIPGFAEMAAPLYPLTKPGTLFNWGPDQQKAYQEIKQALLTAPALGLPDLTKPFELFVDEKQGYAKGVLTQKLGPWRRPVAYLSKKLDPVAAGWPPCLRMVAAIAVLTKDAGKLTMGQPLVILAPHAVEALVKQPPDRWLSNARMTHYQALLLDTDRVQFGPVVALNPATLLPLPEEGLQHNCLDILAEAHGTRPDLTDQPLPDADHTWYTDGSSLLQEGQRKAGAAVTTETEVIWAKALPAGTSAQRAELIALTQALKMAEGKKLNVYTDSRYAFATAHIHGEIYRRRGWLTSEGKEIKNKDEILALLKALFLPKRLSIIHCPGHQKGHSAEARGNRMADQAARKAAITETPDTSTLLIENSSPSGGSKRTADGSEFEAGKRTADGSEFEKRTADGSEFESPKKKAKVE

SEQ ID NO: 2649 - protein, 2114 aa, synthetic construct
MPAAKRVKLDGGDKKYSIGLDIGTNSVGWAVITDEYKVPSKKFKVLGNTDRHSIKKNLIGALLFDSGETAEATRLKRTARRRYTRRKNRICYLQEIFSNEMAKVDDSFFHRLEESFLVEEDKKHERHPIFGNIVDEVAYHEKYPTIYHLRKKLVDSTDKADLRLIYLALAHMIKFRGHFLIEGDLNPDNSDVDKLFIQLVQTYNQLFEENPINASGVDAKAILSARLSKSRRLENLIAQLPGEKKNGLFGNLIALSLGLTPNFKSNFDLAEDAKLQLSKDTYDDDLDNLLAQIGDQYADLFLAAKNLSDAILLSDILRVNTEITKAPLSASMIKRYDEHHQDLTLLKALVRQQLPEKYKEIFFDQSKNGYAGYIDGGASQEEFYKFIKPILEKMDGTEELLVKLNREDLLRKQRTFDNGSIPHQIHLGELHAILRRQEDFYPFLKDNREKIEKILTFRIPYYVGPLARGNSRFAWMTRKSEETITPWNFEEVVDKGASAQSFIERMTNFDKNLPNEKVLPKHSLLYEYFTVYNELTKVKYVTEGMRKPAFLSGEQKKAIVDLLFKTNRKVTVKQLKEDYFKKIECFDSVEISGVEDRFNASLGTYHDLLKIIKDKDFLDNEENEDILEDIVLTLTLFEDREMIEERLKTYAHLFDDKVMKQLKRRRYTGWGRLSRKLINGIRDKQSGKTILDFLKSDGFANRNFMQLIHDDSLTFKEDIQKAQVSGQGDSLHEHIANLAGSPAIKKGILQTVKVVDELVKVMGRHKPENIVIEMARENQTTQKGQKNSRERMKRIEEGIKELGSQILKEHPVENTQLQNEKLYLYYLQNGRDMYVDQELDINRLSDYDVDHIVPQSFLKDDSIDNKVLTRSDKARGKSDNVPSEEVVKKMKNYWRQLLNAKLITQRKFDNLTKAERGGLSELDKAGFIKRQLVETRQITKHVAQILDSRMNTKYDENDKLIREVKVITLKSKLVSDFRKDFQFYKVREINNYHHAHDAYLNAVVGTALIKKYPKLESEFVYGDYKVYDVRKMIAKSEQEIGKATAKYFFYSNIMNFFKTEITLANGEIRKRPLIETNGETGEIVWDKGRDFATVRKVLSMPQVNIVKKTEVQTGGFSKESILPKRNSDKLIARKKDWDPKKYGGFDSPTVAYSVLVVAKVEKGKSKKLKSVKELLGITIMERSSFEKNPIDFLEAKGYKEVKKDLIIKLPKYSLFELENGRKRMLASAGELQKGNELALPSKYVNFLYLASHYEKLKGSPEDNEQKQLFVEQHKHYLDEIIEQISEFSKRVILADANLDKVLSAYNKHRDKPIREQAENIIHLFTLTNLGAPAAFKYFDTTIDRKRYTSTKEVLDATLIHQSITGLYETRIDLSQLGGDGGPAPGGSGGGGGTLNIEDEYRLHETSKEPDVSLGSTWLSDFPQAWAETGGMGLAVRQAPLIIPLKATSTPVSIKQYPMSQEARLGIKPHIQRLLDQGILVPCQSPWNTPLLPVKKPGTNDYRPVQDLREVNKRVEDIHPTVPNPYNLLSGLPPSHQWYTVLDLKDAFFCLRLHPTSQPLFAFEWRDPEMGISGQLTWTRLPQGFKNSPTLFNEALHRDLADFRIQHPDLILLQYVDDLLLAATSELDCQQGTRALLQTLGNLGYRASAKKAQICQKQVKYLGYLLKEGQRWLTEARKETVMGQPTPKTPRQLREFLGKAGFCRLFIPGFAEMAAPLYPLTKPGTLFNWGPDQQKAYQEIKQALLTAPALGLPDLTKPFELFVDEKQGYAKGVLTQKLGPWRRPVAYLSKKLDPVAAGWPPCLRMVAAIAVLTKDAGKLTMGQPLVILAPHAVEALVKQPPDRWLSNARMTHYQALLLDTDRVQFGPVVALNPATLLPLPEEGLQHNCLDILAEAHGTRPDLTDQPLPDADHTWYTDGSSLLQEGQRKAGAAVTTETEVIWAKALPAGTSAQRAELIALTQALKMAEGKKLNVYTDSRYAFATAHIHGEIYRRRGWLTSEGKEIKNKDEILALLKALFLPKRLSIIHCPGHQKGHSAEARGNRMADQAARKAAITETPDTSTLLIENSSPSGGSKRTADGSEFEAGKRTADGSEFEKRTADGSEFESPKKKAKVE

SEQ ID NO: 2650 - protein, 2114 aa, synthetic construct
MPAAKRVKLDGGDKKYSIGLDIGTNSVGWAVITDEYKVPSKKFKVLGNTDRHSIKKNLIGALLFDSGETAEATRLKRTARRRYTRRKNRICYLQEIFSNEMAKVDDSFFHRLEESFLVEEDKKHERHPIFGNIVDEVAYHEKYPTIYHLRKKLVDSTDKADLRLIYLALAHMIKFRGHFLIEGDLNPDNSDVDKLFIQLVQTYNQLFEENPINASGVDAKAILSARLSKSRRLENLIAQLPGEKKNGLFGNLIALSLGLTPNFKSNFDLAEDAKLQLSKDTYDDDLDNLLAQIGDQYADLFLAAKNLSDAILLSDILRVNTEITKAPLSASMIKRYDEHHQDLTLLKALVRQQLPEKYKEIFFDQSKNGYAGYIDGGASQEEFYKFIKPILEKMDGTEELLVKLNREDLLRKQRTFDNGSIPHQIHLGELHAILRRQEDFYPFLKDNREKIEKILTFRIPYYVGPLARGNSRFAWMTRKSEETITPWNFEEVVDKGASAQSFIERMTNFDKNLPNEKVLPKHSLLYEYFTVYNELTKVKYVTEGMRKPAFLSGEQKKAIVDLLFKTNRKVTVKQLKEDYFKKIECFDSVEISGVEDRFNASLGTYHDLLKIIKDKDFLDNEENEDILEDIVLTLTLFEDREMIEERLKTYAHLFDDKVMKQLKRRRYTGWGRLSRKLINGIRDKQSGKTILDFLKSDGFANRNFMQLIHDDSLTFKEDIQKAQVSGQGDSLHEHIANLAGSPAIKKGILQTVKVVDELVKVMGRHKPENIVIEMARENQTTQKGQKNSRERMKRIEEGIKELGSQILKEHPVENTQLQNEKLYLYYLQNGRDMYVDQELDINRLSDYDVDHIVPQSFLKDDSIDNKVLTRSDKARGKSDNVPSEEVVKKMKNYWRQLLNAKLITQRKFDNLTKAERGGLSELDKAGFIKRQLVETRQITKHVAQILDSRMNTKYDENDKLIREVKVITLKSKLVSDFRKDFQFYKVREINNYHHAHDAYLNAVVGTALIKKYPKLESEFVYGDYKVYDVRKMIAKSEQEIGKATAKYFFYSNIMNFFKTEITLANGEIRKRPLIETNGETGEIVWDKGRDFATVRKVLSMPQVNIVKKTEVQTGGFSKESILPKRNSDKLIARKKDWDPKKYGGFDSPTVAYSVLVVAKVEKGKSKKLKSVKELLGITIMERSSFEKNPIDFLEAKGYKEVKKDLIIKLPKYSLFELENGRKRMLASAGELQKGNELALPSKYVNFLYLASHYEKLKGSPEDNEQKQLFVEQHKHYLDEIIEQISEFSKRVILADANLDKVLSAYNKHRDKPIREQAENIIHLFTLTNLGAPAAFKYFDTTIDRKRYTSTKEVLDATLIHQSITGLYETRIDLSQLGGDGGPAPGGGGGSGGTLNIEDEYRLHETSKEPDVSLGSTWLSDFPQAWAETGGMGLAVRQAPLIIPLKATSTPVSIKQYPMSQEARLGIKPHIQRLLDQGILVPCQSPWNTPLLPVKKPGTNDYRPVQDLREVNKRVEDIHPTVPNPYNLLSGLPPSHQWYTVLDLKDAFFCLRLHPTSQPLFAFEWRDPEMGISGQLTWTRLPQGFKNSPTLFNEALHRDLADFRIQHPDLILLQYVDDLLLAATSELDCQQGTRALLQTLGNLGYRASAKKAQICQKQVKYLGYLLKEGQRWLTEARKETVMGQPTPKTPRQLREFLGKAGFCRLFIPGFAEMAAPLYPLTKPGTLFNWGPDQQKAYQEIKQALLTAPALGLPDLTKPFELFVDEKQGYAKGVLTQKLGPWRRPVAYLSKKLDPVAAGWPPCLRMVAAIAVLTKDAGKLTMGQPLVILAPHAVEALVKQPPDRWLSNARMTHYQALLLDTDRVQFGPVVALNPATLLPLPEEGLQHNCLDILAEAHGTRPDLTDQPLPDADHTWYTDGSSLLQEGQRKAGAAVTTETEVIWAKALPAGTSAQRAELIALTQALKMAEGKKLNVYTDSRYAFATAHIHGEIYRRRGWLTSEGKEIKNKDEILALLKALFLPKRLSIIHCPGHQKGHSAEARGNRMADQAARKAAITETPDTSTLLIENSSPSGGSKRTADGSEFEAGKRTADGSEFEKRTADGSEFESPKKKAKVE

SEQ ID NO: 2651 - protein, 2116 aa, synthetic construct
MPAAKRVKLDGGDKKYSIGLDIGTNSVGWAVITDEYKVPSKKFKVLGNTDRHSIKKNLIGALLFDSGETAEATRLKRTARRRYTRRKNRICYLQEIFSNEMAKVDDSFFHRLEESFLVEEDKKHERHPIFGNIVDEVAYHEKYPTIYHLRKKLVDSTDKADLRLIYLALAHMIKFRGHFLIEGDLNPDNSDVDKLFIQLVQTYNQLFEENPINASGVDAKAILSARLSKSRRLENLIAQLPGEKKNGLFGNLIALSLGLTPNFKSNFDLAEDAKLQLSKDTYDDDLDNLLAQIGDQYADLFLAAKNLSDAILLSDILRVNTEITKAPLSASMIKRYDEHHQDLTLLKALVRQQLPEKYKEIFFDQSKNGYAGYIDGGASQEEFYKFIKPILEKMDGTEELLVKLNREDLLRKQRTFDNGSIPHQIHLGELHAILRRQEDFYPFLKDNREKIEKILTFRIPYYVGPLARGNSRFAWMTRKSEETITPWNFEEVVDKGASAQSFIERMTNFDKNLPNEKVLPKHSLLYEYFTVYNELTKVKYVTEGMRKPAFLSGEQKKAIVDLLFKTNRKVTVKQLKEDYFKKIECFDSVEISGVEDRFNASLGTYHDLLKIIKDKDFLDNEENEDILEDIVLTLTLFEDREMIEERLKTYAHLFDDKVMKQLKRRRYTGWGRLSRKLINGIRDKQSGKTILDFLKSDGFANRNFMQLIHDDSLTFKEDIQKAQVSGQGDSLHEHIANLAGSPAIKKGILQTVKVVDELVKVMGRHKPENIVIEMARENQTTQKGQKNSRERMKRIEEGIKELGSQILKEHPVENTQLQNEKLYLYYLQNGRDMYVDQELDINRLSDYDVDHIVPQSFLKDDSIDNKVLTRSDKARGKSDNVPSEEVVKKMKNYWRQLLNAKLITQRKFDNLTKAERGGLSELDKAGFIKRQLVETRQITKHVAQILDSRMNTKYDENDKLIREVKVITLKSKLVSDFRKDFQFYKVREINNYHHAHDAYLNAVVGTALIKKYPKLESEFVYGDYKVYDVRKMIAKSEQEIGKATAKYFFYSNIMNFFKTEITLANGEIRKRPLIETNGETGEIVWDKGRDFATVRKVLSMPQVNIVKKTEVQTGGFSKESILPKRNSDKLIARKKDWDPKKYGGFDSPTVAYSVLVVAKVEKGKSKKLKSVKELLGITIMERSSFEKNPIDFLEAKGYKEVKKDLIIKLPKYSLFELENGRKRMLASAGELQKGNELALPSKYVNFLYLASHYEKLKGSPEDNEQKQLFVEQHKHYLDEIIEQISEFSKRVILADANLDKVLSAYNKHRDKPIREQAENIIHLFTLTNLGAPAAFKYFDTTIDRKRYTSTKEVLDATLIHQSITGLYETRIDLSQLGGDGGPAPGSSEAAAKGGTLNIEDEYRLHETSKEPDVSLGSTWLSDFPQAWAETGGMGLAVRQAPLIIPLKATSTPVSIKQYPMSQEARLGIKPHIQRLLDQGILVPCQSPWNTPLLPVKKPGTNDYRPVQDLREVNKRVEDIHPTVPNPYNLLSGLPPSHQWYTVLDLKDAFFCLRLHPTSQPLFAFEWRDPEMGISGQLTWTRLPQGFKNSPTLFNEALHRDLADFRIQHPDLILLQYVDDLLLAATSELDCQQGTRALLQTLGNLGYRASAKKAQICQKQVKYLGYLLKEGQRWLTEARKETVMGQPTPKTPRQLREFLGKAGFCRLFIPGFAEMAAPLYPLTKPGTLFNWGPDQQKAYQEIKQALLTAPALGLPDLTKPFELFVDEKQGYAKGVLTQKLGPWRRPVAYLSKKLDPVAAGWPPCLRMVAAIAVLTKDAGKLTMGQPLVILAPHAVEALVKQPPDRWLSNARMTHYQALLLDTDRVQFGPVVALNPATLLPLPEEGLQHNCLDILAEAHGTRPDLTDQPLPDADHTWYTDGSSLLQEGQRKAGAAVTTETEVIWAKALPAGTSAQRAELIALTQALKMAEGKKLNVYTDSRYAFATAHIHGEIYRRRGWLTSEGKEIKNKDEILALLKALFLPKRLSIIHCPGHQKGHSAEARGNRMADQAARKAAITETPDTSTLLIENSSPSGGSKRTADGSEFEAGKRTADGSEFEKRTADGSEFESPKKKAKVE

SEQ ID NO: 2652 - protein, 2116 aa, synthetic construct
MPAAKRVKLDGGDKKYSIGLDIGTNSVGWAVITDEYKVPSKKFKVLGNTDRHSIKKNLIGALLFDSGETAEATRLKRTARRRYTRRKNRICYLQEIFSNEMAKVDDSFFHRLEESFLVEEDKKHERHPIFGNIVDEVAYHEKYPTIYHLRKKLVDSTDKADLRLIYLALAHMIKFRGHFLIEGDLNPDNSDVDKLFIQLVQTYNQLFEENPINASGVDAKAILSARLSKSRRLENLIAQLPGEKKNGLFGNLIALSLGLTPNFKSNFDLAEDAKLQLSKDTYDDDLDNLLAQIGDQYADLFLAAKNLSDAILLSDILRVNTEITKAPLSASMIKRYDEHHQDLTLLKALVRQQLPEKYKEIFFDQSKNGYAGYIDGGASQEEFYKFIKPILEKMDGTEELLVKLNREDLLRKQRTFDNGSIPHQIHLGELHAILRRQEDFYPFLKDNREKIEKILTFRIPYYVGPLARGNSRFAWMTRKSEETITPWNFEEVVDKGASAQSFIERMTNFDKNLPNEKVLPKHSLLYEYFTVYNELTKVKYVTEGMRKPAFLSGEQKKAIVDLLFKTNRKVTVKQLKEDYFKKIECFDSVEISGVEDRFNASLGTYHDLLKIIKDKDFLDNEENEDILEDIVLTLTLFEDREMIEERLKTYAHLFDDKVMKQLKRRRYTGWGRLSRKLINGIRDKQSGKTILDFLKSDGFANRNFMQLIHDDSLTFKEDIQKAQVSGQGDSLHEHIANLAGSPAIKKGILQTVKVVDELVKVMGRHKPENIVIEMARENQTTQKGQKNSRERMKRIEEGIKELGSQILKEHPVENTQLQNEKLYLYYLQNGRDMYVDQELDINRLSDYDVDHIVPQSFLKDDSIDNKVLTRSDKARGKSDNVPSEEVVKKMKNYWRQLLNAKLITQRKFDNLTKAERGGLSELDKAGFIKRQLVETRQITKHVAQILDSRMNTKYDENDKLIREVKVITLKSKLVSDFRKDFQFYKVREINNYHHAHDAYLNAVVGTALIKKYPKLESEFVYGDYKVYDVRKMIAKSEQEIGKATAKYFFYSNIMNFFKTEITLANGEIRKRPLIETNGETGEIVWDKGRDFATVRKVLSMPQVNIVKKTEVQTGGFSKESILPKRNSDKLIARKKDWDPKKYGGFDSPTVAYSVLVVAKVEKGKSKKLKSVKELLGITIMERSSFEKNPIDFLEAKGYKEVKKDLIIKLPKYSLFELENGRKRMLASAGELQKGNELALPSKYVNFLYLASHYEKLKGSPEDNEQKQLFVEQHKHYLDEIIEQISEFSKRVILADANLDKVLSAYNKHRDKPIREQAENIIHLFTLTNLGAPAAFKYFDTTIDRKRYTSTKEVLDATLIHQSITGLYETRIDLSQLGGDGGGSSGGGEAAAKGGTLNIEDEYRLHETSKEPDVSLGSTWLSDFPQAWAETGGMGLAVRQAPLIIPLKATSTPVSIKQYPMSQEARLGIKPHIQRLLDQGILVPCQSPWNTPLLPVKKPGTNDYRPVQDLREVNKRVEDIHPTVPNPYNLLSGLPPSHQWYTVLDLKDAFFCLRLHPTSQPLFAFEWRDPEMGISGQLTWTRLPQGFKNSPTLFNEALHRDLADFRIQHPDLILLQYVDDLLLAATSELDCQQGTRALLQTLGNLGYRASAKKAQICQKQVKYLGYLLKEGQRWLTEARKETVMGQPTPKTPRQLREFLGKAGFCRLFIPGFAEMAAPLYPLTKPGTLFNWGPDQQKAYQEIKQALLTAPALGLPDLTKPFELFVDEKQGYAKGVLTQKLGPWRRPVAYLSKKLDPVAAGWPPCLRMVAAIAVLTKDAGKLTMGQPLVILAPHAVEALVKQPPDRWLSNARMTHYQALLLDTDRVQFGPVVALNPATLLPLPEEGLQHNCLDILAEAHGTRPDLTDQPLPDADHTWYTDGSSLLQEGQRKAGAAVTTETEVIWAKALPAGTSAQRAELIALTQALKMAEGKKLNVYTDSRYAFATAHIHGEIYRRRGWLTSEGKEIKNKDEILALLKALFLPKRLSIIHCPGHQKGHSAEARGNRMADQAARKAAITETPDTSTLLIENSSPSGGSKRTADGSEFEAGKRTADGSEFEKRTADGSEFESPKKKAKVE

SEQ ID NO: 2653 - protein, 2111 aa, synthetic construct
MPAAKRVKLDGGDKKYSIGLDIGTNSVGWAVITDEYKVPSKKFKVLGNTDRHSIKKNLIGALLFDSGETAEATRLKRTARRRYTRRKNRICYLQEIFSNEMAKVDDSFFHRLEESFLVEEDKKHERHPIFGNIVDEVAYHEKYPTIYHLRKKLVDSTDKADLRLIYLALAHMIKFRGHFLIEGDLNPDNSDVDKLFIQLVQTYNQLFEENPINASGVDAKAILSARLSKSRRLENLIAQLPGEKKNGLFGNLIALSLGLTPNFKSNFDLAEDAKLQLSKDTYDDDLDNLLAQIGDQYADLFLAAKNLSDAILLSDILRVNTEITKAPLSASMIKRYDEHHQDLTLLKALVRQQLPEKYKEIFFDQSKNGYAGYIDGGASQEEFYKFIKPILEKMDGTEELLVKLNREDLLRKQRTFDNGSIPHQIHLGELHAILRRQEDFYPFLKDNREKIEKILTFRIPYYVGPLARGNSRFAWMTRKSEETITPWNFEEVVDKGASAQSFIERMTNFDKNLPNEKVLPKHSLLYEYFTVYNELTKVKYVTEGMRKPAFLSGEQKKAIVDLLFKTNRKVTVKQLKEDYFKKIECFDSVEISGVEDRFNASLGTYHDLLKIIKDKDFLDNEENEDILEDIVLTLTLFEDREMIEERLKTYAHLFDDKVMKQLKRRRYTGWGRLSRKLINGIRDKQSGKTILDFLKSDGFANRNFMQLIHDDSLTFKEDIQKAQVSGQGDSLHEHIANLAGSPAIKKGILQTVKVVDELVKVMGRHKPENIVIEMARENQTTQKGQKNSRERMKRIEEGIKELGSQILKEHPVENTQLQNEKLYLYYLQNGRDMYVDQELDINRLSDYDVDHIVPQSFLKDDSIDNKVLTRSDKARGKSDNVPSEEVVKKMKNYWRQLLNAKLITQRKFDNLTKAERGGLSELDKAGFIKRQLVETRQITKHVAQILDSRMNTKYDENDKLIREVKVITLKSKLVSDFRKDFQFYKVREINNYHHAHDAYLNAVVGTALIKKYPKLESEFVYGDYKVYDVRKMIAKSEQEIGKATAKYFFYSNIMNFFKTEITLANGEIRKRPLIETNGETGEIVWDKGRDFATVRKVLSMPQVNIVKKTEVQTGGFSKESILPKRNSDKLIARKKDWDPKKYGGFDSPTVAYSVLVVAKVEKGKSKKLKSVKELLGITIMERSSFEKNPIDFLEAKGYKEVKKDLIIKLPKYSLFELENGRKRMLASAGELQKGNELALPSKYVNFLYLASHYEKLKGSPEDNEQKQLFVEQHKHYLDEIIEQISEFSKRVILADANLDKVLSAYNKHRDKPIREQAENIIHLFTLTNLGAPAAFKYFDTTIDRKRYTSTKEVLDATLIHQSITGLYETRIDLSQLGGDGGGGSGGGGGTLNIEDEYRLHETSKEPDVSLGSTWLSDFPQAWAETGGMGLAVRQAPLIIPLKATSTPVSIKQYPMSQEARLGIKPHIQRLLDQGILVPCQSPWNTPLLPVKKPGTNDYRPVQDLREVNKRVEDIHPTVPNPYNLLSGLPPSHQWYTVLDLKDAFFCLRLHPTSQPLFAFEWRDPEMGISGQLTWTRLPQGFKNSPTLFNEALHRDLADFRIQHPDLILLQYVDDLLLAATSELDCQQGTRALLQTLGNLGYRASAKKAQICQKQVKYLGYLLKEGQRWLTEARKETVMGQPTPKTPRQLREFLGKAGFCRLFIPGFAEMAAPLYPLTKPGTLFNWGPDQQKAYQEIKQALLTAPALGLPDLTKPFELFVDEKQGYAKGVLTQKLGPWRRPVAYLSKKLDPVAAGWPPCLRMVAAIAVLTKDAGKLTMGQPLVILAPHAVEALVKQPPDRWLSNARMTHYQALLLDTDRVQFGPVVALNPATLLPLPEEGLQHNCLDILAEAHGTRPDLTDQPLPDADHTWYTDGSSLLQEGQRKAGAAVTTETEVIWAKALPAGTSAQRAELIALTQALKMAEGKKLNVYTDSRYAFATAHIHGEIYRRRGWLTSEGKEIKNKDEILALLKALFLPKRLSIIHCPGHQKGHSAEARGNRMADQAARKAAITETPDTSTLLIENSSPSGGSKRTADGSEFEAGKRTADGSEFEKRTADGSEFESPKKKAKVE

SEQ ID NO: 2654 - protein, 2116 aa, synthetic construct
MPAAKRVKLDGGDKKYSIGLDIGTNSVGWAVITDEYKVPSKKFKVLGNTDRHSIKKNLIGALLFDSGETAEATRLKRTARRRYTRRKNRICYLQEIFSNEMAKVDDSFFHRLEESFLVEEDKKHERHPIFGNIVDEVAYHEKYPTIYHLRKKLVDSTDKADLRLIYLALAHMIKFRGHFLIEGDLNPDNSDVDKLFIQLVQTYNQLFEENPINASGVDAKAILSARLSKSRRLENLIAQLPGEKKNGLFGNLIALSLGLTPNFKSNFDLAEDAKLQLSKDTYDDDLDNLLAQIGDQYADLFLAAKNLSDAILLSDILRVNTEITKAPLSASMIKRYDEHHQDLTLLKALVRQQLPEKYKEIFFDQSKNGYAGYIDGGASQEEFYKFIKPILEKMDGTEELLVKLNREDLLRKQRTFDNGSIPHQIHLGELHAILRRQEDFYPFLKDNREKIEKILTFRIPYYVGPLARGNSRFAWMTRKSEETITPWNFEEVVDKGASAQSFIERMTNFDKNLPNEKVLPKHSLLYEYFTVYNELTKVKYVTEGMRKPAFLSGEQKKAIVDLLFKTNRKVTVKQLKEDYFKKIECFDSVEISGVEDRFNASLGTYHDLLKIIKDKDFLDNEENEDILEDIVLTLTLFEDREMIEERLKTYAHLFDDKVMKQLKRRRYTGWGRLSRKLINGIRDKQSGKTILDFLKSDGFANRNFMQLIHDDSLTFKEDIQKAQVSGQGDSLHEHIANLAGSPAIKKGILQTVKVVDELVKVMGRHKPENIVIEMARENQTTQKGQKNSRERMKRIEEGIKELGSQILKEHPVENTQLQNEKLYLYYLQNGRDMYVDQELDINRLSDYDVDHIVPQSFLKDDSIDNKVLTRSDKARGKSDNVPSEEVVKKMKNYWRQLLNAKLITQRKFDNLTKAERGGLSELDKAGFIKRQLVETRQITKHVAQILDSRMNTKYDENDKLIREVKVITLKSKLVSDFRKDFQFYKVREINNYHHAHDAYLNAVVGTALIKKYPKLESEFVYGDYKVYDVRKMIAKSEQEIGKATAKYFFYSNIMNFFKTEITLANGEIRKRPLIETNGETGEIVWDKGRDFATVRKVLSMPQVNIVKKTEVQTGGFSKESILPKRNSDKLIARKKDWDPKKYGGFDSPTVAYSVLVVAKVEKGKSKKLKSVKELLGITIMERSSFEKNPIDFLEAKGYKEVKKDLIIKLPKYSLFELENGRKRMLASAGELQKGNELALPSKYVNFLYLASHYEKLKGSPEDNEQKQLFVEQHKHYLDEIIEQISEFSKRVILADANLDKVLSAYNKHRDKPIREQAENIIHLFTLTNLGAPAAFKYFDTTIDRKRYTSTKEVLDATLIHQSITGLYETRIDLSQLGGDGGEAAAKGGSPAPGGTLNIEDEYRLHETSKEPDVSLGSTWLSDFPQAWAETGGMGLAVRQAPLIIPLKATSTPVSIKQYPMSQEARLGIKPHIQRLLDQGILVPCQSPWNTPLLPVKKPGTNDYRPVQDLREVNKRVEDIHPTVPNPYNLLSGLPPSHQWYTVLDLKDAFFCLRLHPTSQPLFAFEWRDPEMGISGQLTWTRLPQGFKNSPTLFNEALHRDLADFRIQHPDLILLQYVDDLLLAATSELDCQQGTRALLQTLGNLGYRASAKKAQICQKQVKYLGYLLKEGQRWLTEARKETVMGQPTPKTPRQLREFLGKAGFCRLFIPGFAEMAAPLYPLTKPGTLFNWGPDQQKAYQEIKQALLTAPALGLPDLTKPFELFVDEKQGYAKGVLTQKLGPWRRPVAYLSKKLDPVAAGWPPCLRMVAAIAVLTKDAGKLTMGQPLVILAPHAVEALVKQPPDRWLSNARMTHYQALLLDTDRVQFGPVVALNPATLLPLPEEGLQHNCLDILAEAHGTRPDLTDQPLPDADHTWYTDGSSLLQEGQRKAGAAVTTETEVIWAKALPAGTSAQRAELIALTQALKMAEGKKLNVYTDSRYAFATAHIHGEIYRRRGWLTSEGKEIKNKDEILALLKALFLPKRLSIIHCPGHQKGHSAEARGNRMADQAARKAAITETPDTSTLLIENSSPSGGSKRTADGSEFEAGKRTADGSEFEKRTADGSEFESPKKKAKVE

SEQ ID NO: 2655 - protein, 2108 aa, synthetic construct
MPAAKRVKLDGGDKKYSIGLDIGTNSVGWAVITDEYKVPSKKFKVLGNTDRHSIKKNLIGALLFDSGETAEATRLKRTARRRYTRRKNRICYLQEIFSNEMAKVDDSFFHRLEESFLVEEDKKHERHPIFGNIVDEVAYHEKYPTIYHLRKKLVDSTDKADLRLIYLALAHMIKFRGHFLIEGDLNPDNSDVDKLFIQLVQTYNQLFEENPINASGVDAKAILSARLSKSRRLENLIAQLPGEKKNGLFGNLIALSLGLTPNFKSNFDLAEDAKLQLSKDTYDDDLDNLLAQIGDQYADLFLAAKNLSDAILLSDILRVNTEITKAPLSASMIKRYDEHHQDLTLLKALVRQQLPEKYKEIFFDQSKNGYAGYIDGGASQEEFYKFIKPILEKMDGTEELLVKLNREDLLRKQRTFDNGSIPHQIHLGELHAILRRQEDFYPFLKDNREKIEKILTFRIPYYVGPLARGNSRFAWMTRKSEETITPWNFEEVVDKGASAQSFIERMTNFDKNLPNEKVLPKHSLLYEYFTVYNELTKVKYVTEGMRKPAFLSGEQKKAIVDLLFKTNRKVTVKQLKEDYFKKIECFDSVEISGVEDRFNASLGTYHDLLKIIKDKDFLDNEENEDILEDIVLTLTLFEDREMIEERLKTYAHLFDDKVMKQLKRRRYTGWGRLSRKLINGIRDKQSGKTILDFLKSDGFANRNFMQLIHDDSLTFKEDIQKAQVSGQGDSLHEHIANLAGSPAIKKGILQTVKVVDELVKVMGRHKPENIVIEMARENQTTQKGQKNSRERMKRIEEGIKELGSQILKEHPVENTQLQNEKLYLYYLQNGRDMYVDQELDINRLSDYDVDHIVPQSFLKDDSIDNKVLTRSDKARGKSDNVPSEEVVKKMKNYWRQLLNAKLITQRKFDNLTKAERGGLSELDKAGFIKRQLVETRQITKHVAQILDSRMNTKYDENDKLIREVKVITLKSKLVSDFRKDFQFYKVREINNYHHAHDAYLNAVVGTALIKKYPKLESEFVYGDYKVYDVRKMIAKSEQEIGKATAKYFFYSNIMNFFKTEITLANGEIRKRPLIETNGETGEIVWDKGRDFATVRKVLSMPQVNIVKKTEVQTGGFSKESILPKRNSDKLIARKKDWDPKKYGGFDSPTVAYSVLVVAKVEKGKSKKLKSVKELLGITIMERSSFEKNPIDFLEAKGYKEVKKDLIIKLPKYSLFELENGRKRMLASAGELQKGNELALPSKYVNFLYLASHYEKLKGSPEDNEQKQLFVEQHKHYLDEIIEQISEFSKRVILADANLDKVLSAYNKHRDKPIREQAENIIHLFTLTNLGAPAAFKYFDTTIDRKRYTSTKEVLDATLIHQSITGLYETRIDLSQLGGDGGGSSGGTLNIEDEYRLHETSKEPDVSLGSTWLSDFPQAWAETGGMGLAVRQAPLIIPLKATSTPVSIKQYPMSQEARLGIKPHIQRLLDQGILVPCQSPWNTPLLPVKKPGTNDYRPVQDLREVNKRVEDIHPTVPNPYNLLSGLPPSHQWYTVLDLKDAFFCLRLHPTSQPLFAFEWRDPEMGISGQLTWTRLPQGFKNSPTLFNEALHRDLADFRIQHPDLILLQYVDDLLLAATSELDCQQGTRALLQTLGNLGYRASAKKAQICQKQVKYLGYLLKEGQRWLTEARKETVMGQPTPKTPRQLREFLGKAGFCRLFIPGFAEMAAPLYPLTKPGTLFNWGPDQQKAYQEIKQALLTAPALGLPDLTKPFELFVDEKQGYAKGVLTQKLGPWRRPVAYLSKKLDPVAAGWPPCLRMVAAIAVLTKDAGKLTMGQPLVILAPHAVEALVKQPPDRWLSNARMTHYQALLLDTDRVQFGPVVALNPATLLPLPEEGLQHNCLDILAEAHGTRPDLTDQPLPDADHTWYTDGSSLLQEGQRKAGAAVTTETEVIWAKALPAGTSAQRAELIALTQALKMAEGKKLNVYTDSRYAFATAHIHGEIYRRRGWLTSEGKEIKNKDEILALLKALFLPKRLSIIHCPGHQKGHSAEARGNRMADQAARKAAITETPDTSTLLIENSSPSGGSKRTADGSEFEAGKRTADGSEFEKRTADGSEFESPKKKAKVE

SEQ ID NO: 2656 - protein, 2114 aa, synthetic construct
MPAAKRVKLDGGDKKYSIGLDIGTNSVGWAVITDEYKVPSKKFKVLGNTDRHSIKKNLIGALLFDSGETAEATRLKRTARRRYTRRKNRICYLQEIFSNEMAKVDDSFFHRLEESFLVEEDKKHERHPIFGNIVDEVAYHEKYPTIYHLRKKLVDSTDKADLRLIYLALAHMIKFRGHFLIEGDLNPDNSDVDKLFIQLVQTYNQLFEENPINASGVDAKAILSARLSKSRRLENLIAQLPGEKKNGLFGNLIALSLGLTPNFKSNFDLAEDAKLQLSKDTYDDDLDNLLAQIGDQYADLFLAAKNLSDAILLSDILRVNTEITKAPLSASMIKRYDEHHQDLTLLKALVRQQLPEKYKEIFFDQSKNGYAGYIDGGASQEEFYKFIKPILEKMDGTEELLVKLNREDLLRKQRTFDNGSIPHQIHLGELHAILRRQEDFYPFLKDNREKIEKILTFRIPYYVGPLARGNSRFAWMTRKSEETITPWNFEEVVDKGASAQSFIERMTNFDKNLPNEKVLPKHSLLYEYFTVYNELTKVKYVTEGMRKPAFLSGEQKKAIVDLLFKTNRKVTVKQLKEDYFKKIECFDSVEISGVEDRFNASLGTYHDLLKIIKDKDFLDNEENEDILEDIVLTLTLFEDREMIEERLKTYAHLFDDKVMKQLKRRRYTGWGRLSRKLINGIRDKQSGKTILDFLKSDGFANRNFMQLIHDDSLTFKEDIQKAQVSGQGDSLHEHIANLAGSPAIKKGILQTVKVVDELVKVMGRHKPENIVIEMARENQTTQKGQKNSRERMKRIEEGIKELGSQILKEHPVENTQLQNEKLYLYYLQNGRDMYVDQELDINRLSDYDVDHIVPQSFLKDDSIDNKVLTRSDKARGKSDNVPSEEVVKKMKNYWRQLLNAKLITQRKFDNLTKAERGGLSELDKAGFIKRQLVETRQITKHVAQILDSRMNTKYDENDKLIREVKVITLKSKLVSDFRKDFQFYKVREINNYHHAHDAYLNAVVGTALIKKYPKLESEFVYGDYKVYDVRKMIAKSEQEIGKATAKYFFYSNIMNFFKTEITLANGEIRKRPLIETNGETGEIVWDKGRDFATVRKVLSMPQVNIVKKTEVQTGGFSKESILPKRNSDKLIARKKDWDPKKYGGFDSPTVAYSVLVVAKVEKGKSKKLKSVKELLGITIMERSSFEKNPIDFLEAKGYKEVKKDLIIKLPKYSLFELENGRKRMLASAGELQKGNELALPSKYVNFLYLASHYEKLKGSPEDNEQKQLFVEQHKHYLDEIIEQISEFSKRVILADANLDKVLSAYNKHRDKPIREQAENIIHLFTLTNLGAPAAFKYFDTTIDRKRYTSTKEVLDATLIHQSITGLYETRIDLSQLGGDGGPAPAPAPAPGGTLNIEDEYRLHETSKEPDVSLGSTWLSDFPQAWAETGGMGLAVRQAPLIIPLKATSTPVSIKQYPMSQEARLGIKPHIQRLLDQGILVPCQSPWNTPLLPVKKPGTNDYRPVQDLREVNKRVEDIHPTVPNPYNLLSGLPPSHQWYTVLDLKDAFFCLRLHPTSQPLFAFEWRDPEMGISGQLTWTRLPQGFKNSPTLFNEALHRDLADFRIQHPDLILLQYVDDLLLAATSELDCQQGTRALLQTLGNLGYRASAKKAQICQKQVKYLGYLLKEGQRWLTEARKETVMGQPTPKTPRQLREFLGKAGFCRLFIPGFAEMAAPLYPLTKPGTLFNWGPDQQKAYQEIKQALLTAPALGLPDLTKPFELFVDEKQGYAKGVLTQKLGPWRRPVAYLSKKLDPVAAGWPPCLRMVAAIAVLTKDAGKLTMGQPLVILAPHAVEALVKQPPDRWLSNARMTHYQALLLDTDRVQFGPVVALNPATLLPLPEEGLQHNCLDILAEAHGTRPDLTDQPLPDADHTWYTDGSSLLQEGQRKAGAAVTTETEVIWAKALPAGTSAQRAELIALTQALKMAEGKKLNVYTDSRYAFATAHIHGEIYRRRGWLTSEGKEIKNKDEILALLKALFLPKRLSIIHCPGHQKGHSAEARGNRMADQAARKAAITETPDTSTLLIENSSPSGGSKRTADGSEFEAGKRTADGSEFEKRTADGSEFESPKKKAKVE

SEQ ID NO: 2657 - protein, 2113 aa, synthetic construct
MPAAKRVKLDGGDKKYSIGLDIGTNSVGWAVITDEYKVPSKKFKVLGNTDRHSIKKNLIGALLFDSGETAEATRLKRTARRRYTRRKNRICYLQEIFSNEMAKVDDSFFHRLEESFLVEEDKKHERHPIFGNIVDEVAYHEKYPTIYHLRKKLVDSTDKADLRLIYLALAHMIKFRGHFLIEGDLNPDNSDVDKLFIQLVQTYNQLFEENPINASGVDAKAILSARLSKSRRLENLIAQLPGEKKNGLFGNLIALSLGLTPNFKSNFDLAEDAKLQLSKDTYDDDLDNLLAQIGDQYADLFLAAKNLSDAILLSDILRVNTEITKAPLSASMIKRYDEHHQDLTLLKALVRQQLPEKYKEIFFDQSKNGYAGYIDGGASQEEFYKFIKPILEKMDGTEELLVKLNREDLLRKQRTFDNGSIPHQIHLGELHAILRRQEDFYPFLKDNREKIEKILTFRIPYYVGPLARGNSRFAWMTRKSEETITPWNFEEVVDKGASAQSFIERMTNFDKNLPNEKVLPKHSLLYEYFTVYNELTKVKYVTEGMRKPAFLSGEQKKAIVDLLFKTNRKVTVKQLKEDYFKKIECFDSVEISGVEDRFNASLGTYHDLLKIIKDKDFLDNEENEDILEDIVLTLTLFEDREMIEERLKTYAHLFDDKVMKQLKRRRYTGWGRLSRKLINGIRDKQSGKTILDFLKSDGFANRNFMQLIHDDSLTFKEDIQKAQVSGQGDSLHEHIANLAGSPAIKKGILQTVKVVDELVKVMGRHKPENIVIEMARENQTTQKGQKNSRERMKRIEEGIKELGSQILKEHPVENTQLQNEKLYLYYLQNGRDMYVDQELDINRLSDYDVDHIVPQSFLKDDSIDNKVLTRSDKARGKSDNVPSEEVVKKMKNYWRQLLNAKLITQRKFDNLTKAERGGLSELDKAGFIKRQLVETRQITKHVAQILDSRMNTKYDENDKLIREVKVITLKSKLVSDFRKDFQFYKVREINNYHHAHDAYLNAVVGTALIKKYPKLESEFVYGDYKVYDVRKMIAKSEQEIGKATAKYFFYSNIMNFFKTEITLANGEIRKRPLIETNGETGEIVWDKGRDFATVRKVLSMPQVNIVKKTEVQTGGFSKESILPKRNSDKLIARKKDWDPKKYGGFDSPTVAYSVLVVAKVEKGKSKKLKSVKELLGITIMERSSFEKNPIDFLEAKGYKEVKKDLIIKLPKYSLFELENGRKRMLASAGELQKGNELALPSKYVNFLYLASHYEKLKGSPEDNEQKQLFVEQHKHYLDEIIEQISEFSKRVILADANLDKVLSAYNKHRDKPIREQAENIIHLFTLTNLGAPAAFKYFDTTIDRKRYTSTKEVLDATLIHQSITGLYETRIDLSQLGGDGGEAAAKGGSGGTLNIEDEYRLHETSKEPDVSLGSTWLSDFPQAWAETGGMGLAVRQAPLIIPLKATSTPVSIKQYPMSQEARLGIKPHIQRLLDQGILVPCQSPWNTPLLPVKKPGTNDYRPVQDLREVNKRVEDIHPTVPNPYNLLSGLPPSHQWYTVLDLKDAFFCLRLHPTSQPLFAFEWRDPEMGISGQLTWTRLPQGFKNSPTLFNEALHRDLADFRIQHPDLILLQYVDDLLLAATSELDCQQGTRALLQTLGNLGYRASAKKAQICQKQVKYLGYLLKEGQRWLTEARKETVMGQPTPKTPRQLREFLGKAGFCRLFIPGFAEMAAPLYPLTKPGTLFNWGPDQQKAYQEIKQALLTAPALGLPDLTKPFELFVDEKQGYAKGVLTQKLGPWRRPVAYLSKKLDPVAAGWPPCLRMVAAIAVLTKDAGKLTMGQPLVILAPHAVEALVKQPPDRWLSNARMTHYQALLLDTDRVQFGPVVALNPATLLPLPEEGLQHNCLDILAEAHGTRPDLTDQPLPDADHTWYTDGSSLLQEGQRKAGAAVTTETEVIWAKALPAGTSAQRAELIALTQALKMAEGKKLNVYTDSRYAFATAHIHGEIYRRRGWLTSEGKEIKNKDEILALLKALFLPKRLSIIHCPGHQKGHSAEARGNRMADQAARKAAITETPDTSTLLIENSSPSGGSKRTADGSEFEAGKRTADGSEFEKRTADGSEFESPKKKAKVE

SEQ ID NO: 2658 - protein, 2116 aa, synthetic construct
MPAAKRVKLDGGDKKYSIGLDIGTNSVGWAVITDEYKVPSKKFKVLGNTDRHSIKKNLIGALLFDSGETAEATRLKRTARRRYTRRKNRICYLQEIFSNEMAKVDDSFFHRLEESFLVEEDKKHERHPIFGNIVDEVAYHEKYPTIYHLRKKLVDSTDKADLRLIYLALAHMIKFRGHFLIEGDLNPDNSDVDKLFIQLVQTYNQLFEENPINASGVDAKAILSARLSKSRRLENLIAQLPGEKKNGLFGNLIALSLGLTPNFKSNFDLAEDAKLQLSKDTYDDDLDNLLAQIGDQYADLFLAAKNLSDAILLSDILRVNTEITKAPLSASMIKRYDEHHQDLTLLKALVRQQLPEKYKEIFFDQSKNGYAGYIDGGASQEEFYKFIKPILEKMDGTEELLVKLNREDLLRKQRTFDNGSIPHQIHLGELHAILRRQEDFYPFLKDNREKIEKILTFRIPYYVGPLARGNSRFAWMTRKSEETITPWNFEEVVDKGASAQSFIERMTNFDKNLPNEKVLPKHSLLYEYFTVYNELTKVKYVTEGMRKPAFLSGEQKKAIVDLLFKTNRKVTVKQLKEDYFKKIECFDSVEISGVEDRFNASLGTYHDLLKIIKDKDFLDNEENEDILEDIVLTLTLFEDREMIEERLKTYAHLFDDKVMKQLKRRRYTGWGRLSRKLINGIRDKQSGKTILDFLKSDGFANRNFMQLIHDDSLTFKEDIQKAQVSGQGDSLHEHIANLAGSPAIKKGILQTVKVVDELVKVMGRHKPENIVIEMARENQTTQKGQKNSRERMKRIEEGIKELGSQILKEHPVENTQLQNEKLYLYYLQNGRDMYVDQELDINRLSDYDVDHIVPQSFLKDDSIDNKVLTRSDKARGKSDNVPSEEVVKKMKNYWRQLLNAKLITQRKFDNLTKAERGGLSELDKAGFIKRQLVETRQITKHVAQILDSRMNTKYDENDKLIREVKVITLKSKLVSDFRKDFQFYKVREINNYHHAHDAYLNAVVGTALIKKYPKLESEFVYGDYKVYDVRKMIAKSEQEIGKATAKYFFYSNIMNFFKTEITLANGEIRKRPLIETNGETGEIVWDKGRDFATVRKVLSMPQVNIVKKTEVQTGGFSKESILPKRNSDKLIARKKDWDPKKYGGFDSPTVAYSVLVVAKVEKGKSKKLKSVKELLGITIMERSSFEKNPIDFLEAKGYKEVKKDLIIKLPKYSLFELENGRKRMLASAGELQKGNELALPSKYVNFLYLASHYEKLKGSPEDNEQKQLFVEQHKHYLDEIIEQISEFSKRVILADANLDKVLSAYNKHRDKPIREQAENIIHLFTLTNLGAPAAFKYFDTTIDRKRYTSTKEVLDATLIHQSITGLYETRIDLSQLGGDGGEAAAKGSSPAPGGTLNIEDEYRLHETSKEPDVSLGSTWLSDFPQAWAETGGMGLAVRQAPLIIPLKATSTPVSIKQYPMSQEARLGIKPHIQRLLDQGILVPCQSPWNTPLLPVKKPGTNDYRPVQDLREVNKRVEDIHPTVPNPYNLLSGLPPSHQWYTVLDLKDAFFCLRLHPTSQPLFAFEWRDPEMGISGQLTWTRLPQGFKNSPTLFNEALHRDLADFRIQHPDLILLQYVDDLLLAATSELDCQQGTRALLQTLGNLGYRASAKKAQICQKQVKYLGYLLKEGQRWLTEARKETVMGQPTPKTPRQLREFLGKAGFCRLFIPGFAEMAAPLYPLTKPGTLFNWGPDQQKAYQEIKQALLTAPALGLPDLTKPFELFVDEKQGYAKGVLTQKLGPWRRPVAYLSKKLDPVAAGWPPCLRMVAAIAVLTKDAGKLTMGQPLVILAPHAVEALVKQPPDRWLSNARMTHYQALLLDTDRVQFGPVVALNPATLLPLPEEGLQHNCLDILAEAHGTRPDLTDQPLPDADHTWYTDGSSLLQEGQRKAGAAVTTETEVIWAKALPAGTSAQRAELIALTQALKMAEGKKLNVYTDSRYAFATAHIHGEIYRRRGWLTSEGKEIKNKDEILALLKALFLPKRLSIIHCPGHQKGHSAEARGNRMADQAARKAAITETPDTSTLLIENSSPSGGSKRTADGSEFEAGKRTADGSEFEKRTADGSEFESPKKKAKVE

SEQ ID NO: 2659 - protein, 2113 aa, synthetic construct
MPAAKRVKLDGGDKKYSIGLDIGTNSVGWAVITDEYKVPSKKFKVLGNTDRHSIKKNLIGALLFDSGETAEATRLKRTARRRYTRRKNRICYLQEIFSNEMAKVDDSFFHRLEESFLVEEDKKHERHPIFGNIVDEVAYHEKYPTIYHLRKKLVDSTDKADLRLIYLALAHMIKFRGHFLIEGDLNPDNSDVDKLFIQLVQTYNQLFEENPINASGVDAKAILSARLSKSRRLENLIAQLPGEKKNGLFGNLIALSLGLTPNFKSNFDLAEDAKLQLSKDTYDDDLDNLLAQIGDQYADLFLAAKNLSDAILLSDILRVNTEITKAPLSASMIKRYDEHHQDLTLLKALVRQQLPEKYKEIFFDQSKNGYAGYIDGGASQEEFYKFIKPILEKMDGTEELLVKLNREDLLRKQRTFDNGSIPHQIHLGELHAILRRQEDFYPFLKDNREKIEKILTFRIPYYVGPLARGNSRFAWMTRKSEETITPWNFEEVVDKGASAQSFIERMTNFDKNLPNEKVLPKHSLLYEYFTVYNELTKVKYVTEGMRKPAFLSGEQKKAIVDLLFKTNRKVTVKQLKEDYFKKIECFDSVEISGVEDRFNASLGTYHDLLKIIKDKDFLDNEENEDILEDIVLTLTLFEDREMIEERLKTYAHLFDDKVMKQLKRRRYTGWGRLSRKLINGIRDKQSGKTILDFLKSDGFANRNFMQLIHDDSLTFKEDIQKAQVSGQGDSLHEHIANLAGSPAIKKGILQTVKVVDELVKVMGRHKPENIVIEMARENQTTQKGQKNSRERMKRIEEGIKELGSQILKEHPVENTQLQNEKLYLYYLQNGRDMYVDQELDINRLSDYDVDHIVPQSFLKDDSIDNKVLTRSDKARGKSDNVPSEEVVKKMKNYWRQLLNAKLITQRKFDNLTKAERGGLSELDKAGFIKRQLVETRQITKHVAQILDSRMNTKYDENDKLIREVKVITLKSKLVSDFRKDFQFYKVREINNYHHAHDAYLNAVVGTALIKKYPKLESEFVYGDYKVYDVRKMIAKSEQEIGKATAKYFFYSNIMNFFKTEITLANGEIRKRPLIETNGETGEIVWDKGRDFATVRKVLSMPQVNIVKKTEVQTGGFSKESILPKRNSDKLIARKKDWDPKKYGGFDSPTVAYSVLVVAKVEKGKSKKLKSVKELLGITIMERSSFEKNPIDFLEAKGYKEVKKDLIIKLPKYSLFELENGRKRMLASAGELQKGNELALPSKYVNFLYLASHYEKLKGSPEDNEQKQLFVEQHKHYLDEIIEQISEFSKRVILADANLDKVLSAYNKHRDKPIREQAENIIHLFTLTNLGAPAAFKYFDTTIDRKRYTSTKEVLDATLIHQSITGLYETRIDLSQLGGDGGEAAAKGGGGGTLNIEDEYRLHETSKEPDVSLGSTWLSDFPQAWAETGGMGLAVRQAPLIIPLKATSTPVSIKQYPMSQEARLGIKPHIQRLLDQGILVPCQSPWNTPLLPVKKPGTNDYRPVQDLREVNKRVEDIHPTVPNPYNLLSGLPPSHQWYTVLDLKDAFFCLRLHPTSQPLFAFEWRDPEMGISGQLTWTRLPQGFKNSPTLFNEALHRDLADFRIQHPDLILLQYVDDLLLAATSELDCQQGTRALLQTLGNLGYRASAKKAQICQKQVKYLGYLLKEGQRWLTEARKETVMGQPTPKTPRQLREFLGKAGFCRLFIPGFAEMAAPLYPLTKPGTLFNWGPDQQKAYQEIKQALLTAPALGLPDLTKPFELFVDEKQGYAKGVLTQKLGPWRRPVAYLSKKLDPVAAGWPPCLRMVAAIAVLTKDAGKLTMGQPLVILAPHAVEALVKQPPDRWLSNARMTHYQALLLDTDRVQFGPVVALNPATLLPLPEEGLQHNCLDILAEAHGTRPDLTDQPLPDADHTWYTDGSSLLQEGQRKAGAAVTTETEVIWAKALPAGTSAQRAELIALTQALKMAEGKKLNVYTDSRYAFATAHIHGEIYRRRGWLTSEGKEIKNKDEILALLKALFLPKRLSIIHCPGHQKGHSAEARGNRMADQAARKAAITETPDTSTLLIENSSPSGGSKRTADGSEFEAGKRTADGSEFEKRTADGSEFESPKKKAKVE

SEQ ID NO: 2660 - protein, 2116 aa, synthetic construct
MPAAKRVKLDGGDKKYSIGLDIGTNSVGWAVITDEYKVPSKKFKVLGNTDRHSIKKNLIGALLFDSGETAEATRLKRTARRRYTRRKNRICYLQEIFSNEMAKVDDSFFHRLEESFLVEEDKKHERHPIFGNIVDEVAYHEKYPTIYHLRKKLVDSTDKADLRLIYLALAHMIKFRGHFLIEGDLNPDNSDVDKLFIQLVQTYNQLFEENPINASGVDAKAILSARLSKSRRLENLIAQLPGEKKNGLFGNLIALSLGLTPNFKSNFDLAEDAKLQLSKDTYDDDLDNLLAQIGDQYADLFLAAKNLSDAILLSDILRVNTEITKAPLSASMIKRYDEHHQDLTLLKALVRQQLPEKYKEIFFDQSKNGYAGYIDGGASQEEFYKFIKPILEKMDGTEELLVKLNREDLLRKQRTFDNGSIPHQIHLGELHAILRRQEDFYPFLKDNREKIEKILTFRIPYYVGPLARGNSRFAWMTRKSEETITPWNFEEVVDKGASAQSFIERMTNFDKNLPNEKVLPKHSLLYEYFTVYNELTKVKYVTEGMRKPAFLSGEQKKAIVDLLFKTNRKVTVKQLKEDYFKKIECFDSVEISGVEDRFNASLGTYHDLLKIIKDKDFLDNEENEDILEDIVLTLTLFEDREMIEERLKTYAHLFDDKVMKQLKRRRYTGWGRLSRKLINGIRDKQSGKTILDFLKSDGFANRNFMQLIHDDSLTFKEDIQKAQVSGQGDSLHEHIANLAGSPAIKKGILQTVKVVDELVKVMGRHKPENIVIEMARENQTTQKGQKNSRERMKRIEEGIKELGSQILKEHPVENTQLQNEKLYLYYLQNGRDMYVDQELDINRLSDYDVDHIVPQSFLKDDSIDNKVLTRSDKARGKSDNVPSEEVVKKMKNYWRQLLNAKLITQRKFDNLTKAERGGLSELDKAGFIKRQLVETRQITKHVAQILDSRMNTKYDENDKLIREVKVITLKSKLVSDFRKDFQFYKVREINNYHHAHDAYLNAVVGTALIKKYPKLESEFVYGDYKVYDVRKMIAKSEQEIGKATAKYFFYSNIMNFFKTEITLANGEIRKRPLIETNGETGEIVWDKGRDFATVRKVLSMPQVNIVKKTEVQTGGFSKESILPKRNSDKLIARKKDWDPKKYGGFDSPTVAYSVLVVAKVEKGKSKKLKSVKELLGITIMERSSFEKNPIDFLEAKGYKEVKKDLIIKLPKYSLFELENGRKRMLASAGELQKGNELALPSKYVNFLYLASHYEKLKGSPEDNEQKQLFVEQHKHYLDEIIEQISEFSKRVILADANLDKVLSAYNKHRDKPIREQAENIIHLFTLTNLGAPAAFKYFDTTIDRKRYTSTKEVLDATLIHQSITGLYETRIDLSQLGGDGGGGSGSSEAAAKGGTLNIEDEYRLHETSKEPDVSLGSTWLSDFPQAWAETGGMGLAVRQAPLIIPLKATSTPVSIKQYPMSQEARLGIKPHIQRLLDQGILVPCQSPWNTPLLPVKKPGTNDYRPVQDLREVNKRVEDIHPTVPNPYNLLSGLPPSHQWYTVLDLKDAFFCLRLHPTSQPLFAFEWRDPEMGISGQLTWTRLPQGFKNSPTLFNEALHRDLADFRIQHPDLILLQYVDDLLLAATSELDCQQGTRALLQTLGNLGYRASAKKAQICQKQVKYLGYLLKEGQRWLTEARKETVMGQPTPKTPRQLREFLGKAGFCRLFIPGFAEMAAPLYPLTKPGTLFNWGPDQQKAYQEIKQALLTAPALGLPDLTKPFELFVDEKQGYAKGVLTQKLGPWRRPVAYLSKKLDPVAAGWPPCLRMVAAIAVLTKDAGKLTMGQPLVILAPHAVEALVKQPPDRWLSNARMTHYQALLLDTDRVQFGPVVALNPATLLPLPEEGLQHNCLDILAEAHGTRPDLTDQPLPDADHTWYTDGSSLLQEGQRKAGAAVTTETEVIWAKALPAGTSAQRAELIALTQALKMAEGKKLNVYTDSRYAFATAHIHGEIYRRRGWLTSEGKEIKNKDEILALLKALFLPKRLSIIHCPGHQKGHSAEARGNRMADQAARKAAITETPDTSTLLIENSSPSGGSKRTADGSEFEAGKRTADGSEFEKRTADGSEFESPKKKAKVE

SEQ ID NO: 2661 - protein, 2116 aa, synthetic construct
MPAAKRVKLDGGDKKYSIGLDIGTNSVGWAVITDEYKVPSKKFKVLGNTDRHSIKKNLIGALLFDSGETAEATRLKRTARRRYTRRKNRICYLQEIFSNEMAKVDDSFFHRLEESFLVEEDKKHERHPIFGNIVDEVAYHEKYPTIYHLRKKLVDSTDKADLRLIYLALAHMIKFRGHFLIEGDLNPDNSDVDKLFIQLVQTYNQLFEENPINASGVDAKAILSARLSKSRRLENLIAQLPGEKKNGLFGNLIALSLGLTPNFKSNFDLAEDAKLQLSKDTYDDDLDNLLAQIGDQYADLFLAAKNLSDAILLSDILRVNTEITKAPLSASMIKRYDEHHQDLTLLKALVRQQLPEKYKEIFFDQSKNGYAGYIDGGASQEEFYKFIKPILEKMDGTEELLVKLNREDLLRKQRTFDNGSIPHQIHLGELHAILRRQEDFYPFLKDNREKIEKILTFRIPYYVGPLARGNSRFAWMTRKSEETITPWNFEEVVDKGASAQSFIERMTNFDKNLPNEKVLPKHSLLYEYFTVYNELTKVKYVTEGMRKPAFLSGEQKKAIVDLLFKTNRKVTVKQLKEDYFKKIECFDSVEISGVEDRFNASLGTYHDLLKIIKDKDFLDNEENEDILEDIVLTLTLFEDREMIEERLKTYAHLFDDKVMKQLKRRRYTGWGRLSRKLINGIRDKQSGKTILDFLKSDGFANRNFMQLIHDDSLTFKEDIQKAQVSGQGDSLHEHIANLAGSPAIKKGILQTVKVVDELVKVMGRHKPENIVIEMARENQTTQKGQKNSRERMKRIEEGIKELGSQILKEHPVENTQLQNEKLYLYYLQNGRDMYVDQELDINRLSDYDVDHIVPQSFLKDDSIDNKVLTRSDKARGKSDNVPSEEVVKKMKNYWRQLLNAKLITQRKFDNLTKAERGGLSELDKAGFIKRQLVETRQITKHVAQILDSRMNTKYDENDKLIREVKVITLKSKLVSDFRKDFQFYKVREINNYHHAHDAYLNAVVGTALIKKYPKLESEFVYGDYKVYDVRKMIAKSEQEIGKATAKYFFYSNIMNFFKTEITLANGEIRKRPLIETNGETGEIVWDKGRDFATVRKVLSMPQVNIVKKTEVQTGGFSKESILPKRNSDKLIARKKDWDPKKYGGFDSPTVAYSVLVVAKVEKGKSKKLKSVKELLGITIMERSSFEKNPIDFLEAKGYKEVKKDLIIKLPKYSLFELENGRKRMLASAGELQKGNELALPSKYVNFLYLASHYEKLKGSPEDNEQKQLFVEQHKHYLDEIIEQISEFSKRVILADANLDKVLSAYNKHRDKPIREQAENIIHLFTLTNLGAPAAFKYFDTTIDRKRYTSTKEVLDATLIHQSITGLYETRIDLSQLGGDGGGSSGGSEAAAKGGTLNIEDEYRLHETSKEPDVSLGSTWLSDFPQAWAETGGMGLAVRQAPLIIPLKATSTPVSIKQYPMSQEARLGIKPHIQRLLDQGILVPCQSPWNTPLLPVKKPGTNDYRPVQDLREVNKRVEDIHPTVPNPYNLLSGLPPSHQWYTVLDLKDAFFCLRLHPTSQPLFAFEWRDPEMGISGQLTWTRLPQGFKNSPTLFNEALHRDLADFRIQHPDLILLQYVDDLLLAATSELDCQQGTRALLQTLGNLGYRASAKKAQICQKQVKYLGYLLKEGQRWLTEARKETVMGQPTPKTPRQLREFLGKAGFCRLFIPGFAEMAAPLYPLTKPGTLFNWGPDQQKAYQEIKQALLTAPALGLPDLTKPFELFVDEKQGYAKGVLTQKLGPWRRPVAYLSKKLDPVAAGWPPCLRMVAAIAVLTKDAGKLTMGQPLVILAPHAVEALVKQPPDRWLSNARMTHYQALLLDTDRVQFGPVVALNPATLLPLPEEGLQHNCLDILAEAHGTRPDLTDQPLPDADHTWYTDGSSLLQEGQRKAGAAVTTETEVIWAKALPAGTSAQRAELIALTQALKMAEGKKLNVYTDSRYAFATAHIHGEIYRRRGWLTSEGKEIKNKDEILALLKALFLPKRLSIIHCPGHQKGHSAEARGNRMADQAARKAAITETPDTSTLLIENSSPSGGSKRTADGSEFEAGKRTADGSEFEKRTADGSEFESPKKKAKVE

SEQ ID NO: 2662 - protein, 2120 aa, synthetic construct
MPAAKRVKLDGGDKKYSIGLDIGTNSVGWAVITDEYKVPSKKFKVLGNTDRHSIKKNLIGALLFDSGETAEATRLKRTARRRYTRRKNRICYLQEIFSNEMAKVDDSFFHRLEESFLVEEDKKHERHPIFGNIVDEVAYHEKYPTIYHLRKKLVDSTDKADLRLIYLALAHMIKFRGHFLIEGDLNPDNSDVDKLFIQLVQTYNQLFEENPINASGVDAKAILSARLSKSRRLENLIAQLPGEKKNGLFGNLIALSLGLTPNFKSNFDLAEDAKLQLSKDTYDDDLDNLLAQIGDQYADLFLAAKNLSDAILLSDILRVNTEITKAPLSASMIKRYDEHHQDLTLLKALVRQQLPEKYKEIFFDQSKNGYAGYIDGGASQEEFYKFIKPILEKMDGTEELLVKLNREDLLRKQRTFDNGSIPHQIHLGELHAILRRQEDFYPFLKDNREKIEKILTFRIPYYVGPLARGNSRFAWMTRKSEETITPWNFEEVVDKGASAQSFIERMTNFDKNLPNEKVLPKHSLLYEYFTVYNELTKVKYVTEGMRKPAFLSGEQKKAIVDLLFKTNRKVTVKQLKEDYFKKIECFDSVEISGVEDRFNASLGTYHDLLKIIKDKDFLDNEENEDILEDIVLTLTLFEDREMIEERLKTYAHLFDDKVMKQLKRRRYTGWGRLSRKLINGIRDKQSGKTILDFLKSDGFANRNFMQLIHDDSLTFKEDIQKAQVSGQGDSLHEHIANLAGSPAIKKGILQTVKVVDELVKVMGRHKPENIVIEMARENQTTQKGQKNSRERMKRIEEGIKELGSQILKEHPVENTQLQNEKLYLYYLQNGRDMYVDQELDINRLSDYDVDHIVPQSFLKDDSIDNKVLTRSDKARGKSDNVPSEEVVKKMKNYWRQLLNAKLITQRKFDNLTKAERGGLSELDKAGFIKRQLVETRQITKHVAQILDSRMNTKYDENDKLIREVKVITLKSKLVSDFRKDFQFYKVREINNYHHAHDAYLNAVVGTALIKKYPKLESEFVYGDYKVYDVRKMIAKSEQEIGKATAKYFFYSNIMNFFKTEITLANGEIRKRPLIETNGETGEIVWDKGRDFATVRKVLSMPQVNIVKKTEVQTGGFSKESILPKRNSDKLIARKKDWDPKKYGGFDSPTVAYSVLVVAKVEKGKSKKLKSVKELLGITIMERSSFEKNPIDFLEAKGYKEVKKDLIIKLPKYSLFELENGRKRMLASAGELQKGNELALPSKYVNFLYLASHYEKLKGSPEDNEQKQLFVEQHKHYLDEIIEQISEFSKRVILADANLDKVLSAYNKHRDKPIREQAENIIHLFTLTNLGAPAAFKYFDTTIDRKRYTSTKEVLDATLIHQSITGLYETRIDLSQLGGDGGGGGGSGGGGSGGGGSGGTLNIEDEYRLHETSKEPDVSLGSTWLSDFPQAWAETGGMGLAVRQAPLIIPLKATSTPVSIKQYPMSQEARLGIKPHIQRLLDQGILVPCQSPWNTPLLPVKKPGTNDYRPVQDLREVNKRVEDIHPTVPNPYNLLSGLPPSHQWYTVLDLKDAFFCLRLHPTSQPLFAFEWRDPEMGISGQLTWTRLPQGFKNSPTLFNEALHRDLADFRIQHPDLILLQYVDDLLLAATSELDCQQGTRALLQTLGNLGYRASAKKAQICQKQVKYLGYLLKEGQRWLTEARKETVMGQPTPKTPRQLREFLGKAGFCRLFIPGFAEMAAPLYPLTKPGTLFNWGPDQQKAYQEIKQALLTAPALGLPDLTKPFELFVDEKQGYAKGVLTQKLGPWRRPVAYLSKKLDPVAAGWPPCLRMVAAIAVLTKDAGKLTMGQPLVILAPHAVEALVKQPPDRWLSNARMTHYQALLLDTDRVQFGPVVALNPATLLPLPEEGLQHNCLDILAEAHGTRPDLTDQPLPDADHTWYTDGSSLLQEGQRKAGAAVTTETEVIWAKALPAGTSAQRAELIALTQALKMAEGKKLNVYTDSRYAFATAHIHGEIYRRRGWLTSEGKEIKNKDEILALLKALFLPKRLSIIHCPGHQKGHSAEARGNRMADQAARKAAITETPDTSTLLIENSSPSGGSKRTADGSEFEAGKRTADGSEFEKRTADGSEFESPKKKAKVE

SEQ ID NO: 2663 - protein, 2121 aa, synthetic construct
MPAAKRVKLDGGDKKYSIGLDIGTNSVGWAVITDEYKVPSKKFKVLGNTDRHSIKKNLIGALLFDSGETAEATRLKRTARRRYTRRKNRICYLQEIFSNEMAKVDDSFFHRLEESFLVEEDKKHERHPIFGNIVDEVAYHEKYPTIYHLRKKLVDSTDKADLRLIYLALAHMIKFRGHFLIEGDLNPDNSDVDKLFIQLVQTYNQLFEENPINASGVDAKAILSARLSKSRRLENLIAQLPGEKKNGLFGNLIALSLGLTPNFKSNFDLAEDAKLQLSKDTYDDDLDNLLAQIGDQYADLFLAAKNLSDAILLSDILRVNTEITKAPLSASMIKRYDEHHQDLTLLKALVRQQLPEKYKEIFFDQSKNGYAGYIDGGASQEEFYKFIKPILEKMDGTEELLVKLNREDLLRKQRTFDNGSIPHQIHLGELHAILRRQEDFYPFLKDNREKIEKILTFRIPYYVGPLARGNSRFAWMTRKSEETITPWNFEEVVDKGASAQSFIERMTNFDKNLPNEKVLPKHSLLYEYFTVYNELTKVKYVTEGMRKPAFLSGEQKKAIVDLLFKTNRKVTVKQLKEDYFKKIECFDSVEISGVEDRFNASLGTYHDLLKIIKDKDFLDNEENEDILEDIVLTLTLFEDREMIEERLKTYAHLFDDKVMKQLKRRRYTGWGRLSRKLINGIRDKQSGKTILDFLKSDGFANRNFMQLIHDDSLTFKEDIQKAQVSGQGDSLHEHIANLAGSPAIKKGILQTVKVVDELVKVMGRHKPENIVIEMARENQTTQKGQKNSRERMKRIEEGIKELGSQILKEHPVENTQLQNEKLYLYYLQNGRDMYVDQELDINRLSDYDVDHIVPQSFLKDDSIDNKVLTRSDKARGKSDNVPSEEVVKKMKNYWRQLLNAKLITQRKFDNLTKAERGGLSELDKAGFIKRQLVETRQITKHVAQILDSRMNTKYDENDKLIREVKVITLKSKLVSDFRKDFQFYKVREINNYHHAHDAYLNAVVGTALIKKYPKLESEFVYGDYKVYDVRKMIAKSEQEIGKATAKYFFYSNIMNFFKTEITLANGEIRKRPLIETNGETGEIVWDKGRDFATVRKVLSMPQVNIVKKTEVQTGGFSKESILPKRNSDKLIARKKDWDPKKYGGFDSPTVAYSVLVVAKVEKGKSKKLKSVKELLGITIMERSSFEKNPIDFLEAKGYKEVKKDLIIKLPKYSLFELENGRKRMLASAGELQKGNELALPSKYVNFLYLASHYEKLKGSPEDNEQKQLFVEQHKHYLDEIIEQISEFSKRVILADANLDKVLSAYNKHRDKPIREQAENIIHLFTLTNLGAPAAFKYFDTTIDRKRYTSTKEVLDATLIHQSITGLYETRIDLSQLGGDGGSGSETPGTSESATPESGGTLNIEDEYRLHETSKEPDVSLGSTWLSDFPQAWAETGGMGLAVRQAPLIIPLKATSTPVSIKQYPMSQEARLGIKPHIQRLLDQGILVPCQSPWNTPLLPVKKPGTNDYRPVQDLREVNKRVEDIHPTVPNPYNLLSGLPPSHQWYTVLDLKDAFFCLRLHPTSQPLFAFEWRDPEMGISGQLTWTRLPQGFKNSPTLFNEALHRDLADFRIQHPDLILLQYVDDLLLAATSELDCQQGTRALLQTLGNLGYRASAKKAQICQKQVKYLGYLLKEGQRWLTEARKETVMGQPTPKTPRQLREFLGKAGFCRLFIPGFAEMAAPLYPLTKPGTLFNWGPDQQKAYQEIKQALLTAPALGLPDLTKPFELFVDEKQGYAKGVLTQKLGPWRRPVAYLSKKLDPVAAGWPPCLRMVAAIAVLTKDAGKLTMGQPLVILAPHAVEALVKQPPDRWLSNARMTHYQALLLDTDRVQFGPVVALNPATLLPLPEEGLQHNCLDILAEAHGTRPDLTDQPLPDADHTWYTDGSSLLQEGQRKAGAAVTTETEVIWAKALPAGTSAQRAELIALTQALKMAEGKKLNVYTDSRYAFATAHIHGEIYRRRGWLTSEGKEIKNKDEILALLKALFLPKRLSIIHCPGHQKGHSAEARGNRMADQAARKAAITETPDTSTLLIENSSPSGGSKRTADGSEFEAGKRTADGSEFEKRTADGSEFESPKKKAKVE

SEQ ID NO: 2664 - protein, 2114 aa, synthetic construct
MPAAKRVKLDGGDKKYSIGLDIGTNSVGWAVITDEYKVPSKKFKVLGNTDRHSIKKNLIGALLFDSGETAEATRLKRTARRRYTRRKNRICYLQEIFSNEMAKVDDSFFHRLEESFLVEEDKKHERHPIFGNIVDEVAYHEKYPTIYHLRKKLVDSTDKADLRLIYLALAHMIKFRGHFLIEGDLNPDNSDVDKLFIQLVQTYNQLFEENPINASGVDAKAILSARLSKSRRLENLIAQLPGEKKNGLFGNLIALSLGLTPNFKSNFDLAEDAKLQLSKDTYDDDLDNLLAQIGDQYADLFLAAKNLSDAILLSDILRVNTEITKAPLSASMIKRYDEHHQDLTLLKALVRQQLPEKYKEIFFDQSKNGYAGYIDGGASQEEFYKFIKPILEKMDGTEELLVKLNREDLLRKQRTFDNGSIPHQIHLGELHAILRRQEDFYPFLKDNREKIEKILTFRIPYYVGPLARGNSRFAWMTRKSEETITPWNFEEVVDKGASAQSFIERMTNFDKNLPNEKVLPKHSLLYEYFTVYNELTKVKYVTEGMRKPAFLSGEQKKAIVDLLFKTNRKVTVKQLKEDYFKKIECFDSVEISGVEDRFNASLGTYHDLLKIIKDKDFLDNEENEDILEDIVLTLTLFEDREMIEERLKTYAHLFDDKVMKQLKRRRYTGWGRLSRKLINGIRDKQSGKTILDFLKSDGFANRNFMQLIHDDSLTFKEDIQKAQVSGQGDSLHEHIANLAGSPAIKKGILQTVKVVDELVKVMGRHKPENIVIEMARENQTTQKGQKNSRERMKRIEEGIKELGSQILKEHPVENTQLQNEKLYLYYLQNGRDMYVDQELDINRLSDYDVDHIVPQSFLKDDSIDNKVLTRSDKARGKSDNVPSEEVVKKMKNYWRQLLNAKLITQRKFDNLTKAERGGLSELDKAGFIKRQLVETRQITKHVAQILDSRMNTKYDENDKLIREVKVITLKSKLVSDFRKDFQFYKVREINNYHHAHDAYLNAVVGTALIKKYPKLESEFVYGDYKVYDVRKMIAKSEQEIGKATAKYFFYSNIMNFFKTEITLANGEIRKRPLIETNGETGEIVWDKGRDFATVRKVLSMPQVNIVKKTEVQTGGFSKESILPKRNSDKLIARKKDWDPKKYGGFDSPTVAYSVLVVAKVEKGKSKKLKSVKELLGITIMERSSFEKNPIDFLEAKGYKEVKKDLIIKLPKYSLFELENGRKRMLASAGELQKGNELALPSKYVNFLYLASHYEKLKGSPEDNEQKQLFVEQHKHYLDEIIEQISEFSKRVILADANLDKVLSAYNKHRDKPIREQAENIIHLFTLTNLGAPAAFKYFDTTIDRKRYTSTKEVLDATLIHQSITGLYETRIDLSQLGGDGGGGGGSSPAPGGTLNIEDEYRLHETSKEPDVSLGSTWLSDFPQAWAETGGMGLAVRQAPLIIPLKATSTPVSIKQYPMSQEARLGIKPHIQRLLDQGILVPCQSPWNTPLLPVKKPGTNDYRPVQDLREVNKRVEDIHPTVPNPYNLLSGLPPSHQWYTVLDLKDAFFCLRLHPTSQPLFAFEWRDPEMGISGQLTWTRLPQGFKNSPTLFNEALHRDLADFRIQHPDLILLQYVDDLLLAATSELDCQQGTRALLQTLGNLGYRASAKKAQICQKQVKYLGYLLKEGQRWLTEARKETVMGQPTPKTPRQLREFLGKAGFCRLFIPGFAEMAAPLYPLTKPGTLFNWGPDQQKAYQEIKQALLTAPALGLPDLTKPFELFVDEKQGYAKGVLTQKLGPWRRPVAYLSKKLDPVAAGWPPCLRMVAAIAVLTKDAGKLTMGQPLVILAPHAVEALVKQPPDRWLSNARMTHYQALLLDTDRVQFGPVVALNPATLLPLPEEGLQHNCLDILAEAHGTRPDLTDQPLPDADHTWYTDGSSLLQEGQRKAGAAVTTETEVIWAKALPAGTSAQRAELIALTQALKMAEGKKLNVYTDSRYAFATAHIHGEIYRRRGWLTSEGKEIKNKDEILALLKALFLPKRLSIIHCPGHQKGHSAEARGNRMADQAARKAAITETPDTSTLLIENSSPSGGSKRTADGSEFEAGKRTADGSEFEKRTADGSEFESPKKKAKVE

SEQ ID NO: 2665 - protein, 2117 aa, synthetic construct
MPAAKRVKLDGGDKKYSIGLDIGTNSVGWAVITDEYKVPSKKFKVLGNTDRHSIKKNLIGALLFDSGETAEATRLKRTARRRYTRRKNRICYLQEIFSNEMAKVDDSFFHRLEESFLVEEDKKHERHPIFGNIVDEVAYHEKYPTIYHLRKKLVDSTDKADLRLIYLALAHMIKFRGHFLIEGDLNPDNSDVDKLFIQLVQTYNQLFEENPINASGVDAKAILSARLSKSRRLENLIAQLPGEKKNGLFGNLIALSLGLTPNFKSNFDLAEDAKLQLSKDTYDDDLDNLLAQIGDQYADLFLAAKNLSDAILLSDILRVNTEITKAPLSASMIKRYDEHHQDLTLLKALVRQQLPEKYKEIFFDQSKNGYAGYIDGGASQEEFYKFIKPILEKMDGTEELLVKLNREDLLRKQRTFDNGSIPHQIHLGELHAILRRQEDFYPFLKDNREKIEKILTFRIPYYVGPLARGNSRFAWMTRKSEETITPWNFEEVVDKGASAQSFIERMTNFDKNLPNEKVLPKHSLLYEYFTVYNELTKVKYVTEGMRKPAFLSGEQKKAIVDLLFKTNRKVTVKQLKEDYFKKIECFDSVEISGVEDRFNASLGTYHDLLKIIKDKDFLDNEENEDILEDIVLTLTLFEDREMIEERLKTYAHLFDDKVMKQLKRRRYTGWGRLSRKLINGIRDKQSGKTILDFLKSDGFANRNFMQLIHDDSLTFKEDIQKAQVSGQGDSLHEHIANLAGSPAIKKGILQTVKVVDELVKVMGRHKPENIVIEMARENQTTQKGQKNSRERMKRIEEGIKELGSQILKEHPVENTQLQNEKLYLYYLQNGRDMYVDQELDINRLSDYDVDHIVPQSFLKDDSIDNKVLTRSDKARGKSDNVPSEEVVKKMKNYWRQLLNAKLITQRKFDNLTKAERGGLSELDKAGFIKRQLVETRQITKHVAQILDSRMNTKYDENDKLIREVKVITLKSKLVSDFRKDFQFYKVREINNYHHAHDAYLNAVVGTALIKKYPKLESEFVYGDYKVYDVRKMIAKSEQEIGKATAKYFFYSNIMNFFKTEITLANGEIRKRPLIETNGETGEIVWDKGRDFATVRKVLSMPQVNIVKKTEVQTGGFSKESILPKRNSDKLIARKKDWDPKKYGGFDSPTVAYSVLVVAKVEKGKSKKLKSVKELLGITIMERSSFEKNPIDFLEAKGYKEVKKDLIIKLPKYSLFELENGRKRMLASAGELQKGNELALPSKYVNFLYLASHYEKLKGSPEDNEQKQLFVEQHKHYLDEIIEQISEFSKRVILADANLDKVLSAYNKHRDKPIREQAENIIHLFTLTNLGAPAAFKYFDTTIDRKRYTSTKEVLDATLIHQSITGLYETRIDLSQLGGDGGGSSGSSGSSGSSGGTLNIEDEYRLHETSKEPDVSLGSTWLSDFPQAWAETGGMGLAVRQAPLIIPLKATSTPVSIKQYPMSQEARLGIKPHIQRLLDQGILVPCQSPWNTPLLPVKKPGTNDYRPVQDLREVNKRVEDIHPTVPNPYNLLSGLPPSHQWYTVLDLKDAFFCLRLHPTSQPLFAFEWRDPEMGISGQLTWTRLPQGFKNSPTLFNEALHRDLADFRIQHPDLILLQYVDDLLLAATSELDCQQGTRALLQTLGNLGYRASAKKAQICQKQVKYLGYLLKEGQRWLTEARKETVMGQPTPKTPRQLREFLGKAGFCRLFIPGFAEMAAPLYPLTKPGTLFNWGPDQQKAYQEIKQALLTAPALGLPDLTKPFELFVDEKQGYAKGVLTQKLGPWRRPVAYLSKKLDPVAAGWPPCLRMVAAIAVLTKDAGKLTMGQPLVILAPHAVEALVKQPPDRWLSNARMTHYQALLLDTDRVQFGPVVALNPATLLPLPEEGLQHNCLDILAEAHGTRPDLTDQPLPDADHTWYTDGSSLLQEGQRKAGAAVTTETEVIWAKALPAGTSAQRAELIALTQALKMAEGKKLNVYTDSRYAFATAHIHGEIYRRRGWLTSEGKEIKNKDEILALLKALFLPKRLSIIHCPGHQKGHSAEARGNRMADQAARKAAITETPDTSTLLIENSSPSGGSKRTADGSEFEAGKRTADGSEFEKRTADGSEFESPKKKAKVE

SEQ ID NO: 2666 - protein, 2116 aa, synthetic construct
MPAAKRVKLDGGDKKYSIGLDIGTNSVGWAVITDEYKVPSKKFKVLGNTDRHSIKKNLIGALLFDSGETAEATRLKRTARRRYTRRKNRICYLQEIFSNEMAKVDDSFFHRLEESFLVEEDKKHERHPIFGNIVDEVAYHEKYPTIYHLRKKLVDSTDKADLRLIYLALAHMIKFRGHFLIEGDLNPDNSDVDKLFIQLVQTYNQLFEENPINASGVDAKAILSARLSKSRRLENLIAQLPGEKKNGLFGNLIALSLGLTPNFKSNFDLAEDAKLQLSKDTYDDDLDNLLAQIGDQYADLFLAAKNLSDAILLSDILRVNTEITKAPLSASMIKRYDEHHQDLTLLKALVRQQLPEKYKEIFFDQSKNGYAGYIDGGASQEEFYKFIKPILEKMDGTEELLVKLNREDLLRKQRTFDNGSIPHQIHLGELHAILRRQEDFYPFLKDNREKIEKILTFRIPYYVGPLARGNSRFAWMTRKSEETITPWNFEEVVDKGASAQSFIERMTNFDKNLPNEKVLPKHSLLYEYFTVYNELTKVKYVTEGMRKPAFLSGEQKKAIVDLLFKTNRKVTVKQLKEDYFKKIECFDSVEISGVEDRFNASLGTYHDLLKIIKDKDFLDNEENEDILEDIVLTLTLFEDREMIEERLKTYAHLFDDKVMKQLKRRRYTGWGRLSRKLINGIRDKQSGKTILDFLKSDGFANRNFMQLIHDDSLTFKEDIQKAQVSGQGDSLHEHIANLAGSPAIKKGILQTVKVVDELVKVMGRHKPENIVIEMARENQTTQKGQKNSRERMKRIEEGIKELGSQILKEHPVENTQLQNEKLYLYYLQNGRDMYVDQELDINRLSDYDVDHIVPQSFLKDDSIDNKVLTRSDKARGKSDNVPSEEVVKKMKNYWRQLLNAKLITQRKFDNLTKAERGGLSELDKAGFIKRQLVETRQITKHVAQILDSRMNTKYDENDKLIREVKVITLKSKLVSDFRKDFQFYKVREINNYHHAHDAYLNAVVGTALIKKYPKLESEFVYGDYKVYDVRKMIAKSEQEIGKATAKYFFYSNIMNFFKTEITLANGEIRKRPLIETNGETGEIVWDKGRDFATVRKVLSMPQVNIVKKTEVQTGGFSKESILPKRNSDKLIARKKDWDPKKYGGFDSPTVAYSVLVVAKVEKGKSKKLKSVKELLGITIMERSSFEKNPIDFLEAKGYKEVKKDLIIKLPKYSLFELENGRKRMLASAGELQKGNELALPSKYVNFLYLASHYEKLKGSPEDNEQKQLFVEQHKHYLDEIIEQISEFSKRVILADANLDKVLSAYNKHRDKPIREQAENIIHLFTLTNLGAPAAFKYFDTTIDRKRYTSTKEVLDATLIHQSITGLYETRIDLSQLGGDGGEAAAKGGSGSSGGTLNIEDEYRLHETSKEPDVSLGSTWLSDFPQAWAETGGMGLAVRQAPLIIPLKATSTPVSIKQYPMSQEARLGIKPHIQRLLDQGILVPCQSPWNTPLLPVKKPGTNDYRPVQDLREVNKRVEDIHPTVPNPYNLLSGLPPSHQWYTVLDLKDAFFCLRLHPTSQPLFAFEWRDPEMGISGQLTWTRLPQGFKNSPTLFNEALHRDLADFRIQHPDLILLQYVDDLLLAATSELDCQQGTRALLQTLGNLGYRASAKKAQICQKQVKYLGYLLKEGQRWLTEARKETVMGQPTPKTPRQLREFLGKAGFCRLFIPGFAEMAAPLYPLTKPGTLFNWGPDQQKAYQEIKQALLTAPALGLPDLTKPFELFVDEKQGYAKGVLTQKLGPWRRPVAYLSKKLDPVAAGWPPCLRMVAAIAVLTKDAGKLTMGQPLVILAPHAVEALVKQPPDRWLSNARMTHYQALLLDTDRVQFGPVVALNPATLLPLPEEGLQHNCLDILAEAHGTRPDLTDQPLPDADHTWYTDGSSLLQEGQRKAGAAVTTETEVIWAKALPAGTSAQRAELIALTQALKMAEGKKLNVYTDSRYAFATAHIHGEIYRRRGWLTSEGKEIKNKDEILALLKALFLPKRLSIIHCPGHQKGHSAEARGNRMADQAARKAAITETPDTSTLLIENSSPSGGSKRTADGSEFEAGKRTADGSEFEKRTADGSEFESPKKKAKVE

SEQ ID NO: 2667 - protein, 2114 aa, synthetic construct
MPAAKRVKLDGGDKKYSIGLDIGTNSVGWAVITDEYKVPSKKFKVLGNTDRHSIKKNLIGALLFDSGETAEATRLKRTARRRYTRRKNRICYLQEIFSNEMAKVDDSFFHRLEESFLVEEDKKHERHPIFGNIVDEVAYHEKYPTIYHLRKKLVDSTDKADLRLIYLALAHMIKFRGHFLIEGDLNPDNSDVDKLFIQLVQTYNQLFEENPINASGVDAKAILSARLSKSRRLENLIAQLPGEKKNGLFGNLIALSLGLTPNFKSNFDLAEDAKLQLSKDTYDDDLDNLLAQIGDQYADLFLAAKNLSDAILLSDILRVNTEITKAPLSASMIKRYDEHHQDLTLLKALVRQQLPEKYKEIFFDQSKNGYAGYIDGGASQEEFYKFIKPILEKMDGTEELLVKLNREDLLRKQRTFDNGSIPHQIHLGELHAILRRQEDFYPFLKDNREKIEKILTFRIPYYVGPLARGNSRFAWMTRKSEETITPWNFEEVVDKGASAQSFIERMTNFDKNLPNEKVLPKHSLLYEYFTVYNELTKVKYVTEGMRKPAFLSGEQKKAIVDLLFKTNRKVTVKQLKEDYFKKIECFDSVEISGVEDRFNASLGTYHDLLKIIKDKDFLDNEENEDILEDIVLTLTLFEDREMIEERLKTYAHLFDDKVMKQLKRRRYTGWGRLSRKLINGIRDKQSGKTILDFLKSDGFANRNFMQLIHDDSLTFKEDIQKAQVSGQGDSLHEHIANLAGSPAIKKGILQTVKVVDELVKVMGRHKPENIVIEMARENQTTQKGQKNSRERMKRIEEGIKELGSQILKEHPVENTQLQNEKLYLYYLQNGRDMYVDQELDINRLSDYDVDHIVPQSFLKDDSIDNKVLTRSDKARGKSDNVPSEEVVKKMKNYWRQLLNAKLITQRKFDNLTKAERGGLSELDKAGFIKRQLVETRQITKHVAQILDSRMNTKYDENDKLIREVKVITLKSKLVSDFRKDFQFYKVREINNYHHAHDAYLNAVVGTALIKKYPKLESEFVYGDYKVYDVRKMIAKSEQEIGKATAKYFFYSNIMNFFKTEITLANGEIRKRPLIETNGETGEIVWDKGRDFATVRKVLSMPQVNIVKKTEVQTGGFSKESILPKRNSDKLIARKKDWDPKKYGGFDSPTVAYSVLVVAKVEKGKSKKLKSVKELLGITIMERSSFEKNPIDFLEAKGYKEVKKDLIIKLPKYSLFELENGRKRMLASAGELQKGNELALPSKYVNFLYLASHYEKLKGSPEDNEQKQLFVEQHKHYLDEIIEQISEFSKRVILADANLDKVLSAYNKHRDKPIREQAENIIHLFTLTNLGAPAAFKYFDTTIDRKRYTSTKEVLDATLIHQSITGLYETRIDLSQLGGDGGGGSPAPGGGGGTLNIEDEYRLHETSKEPDVSLGSTWLSDFPQAWAETGGMGLAVRQAPLIIPLKATSTPVSIKQYPMSQEARLGIKPHIQRLLDQGILVPCQSPWNTPLLPVKKPGTNDYRPVQDLREVNKRVEDIHPTVPNPYNLLSGLPPSHQWYTVLDLKDAFFCLRLHPTSQPLFAFEWRDPEMGISGQLTWTRLPQGFKNSPTLFNEALHRDLADFRIQHPDLILLQYVDDLLLAATSELDCQQGTRALLQTLGNLGYRASAKKAQICQKQVKYLGYLLKEGQRWLTEARKETVMGQPTPKTPRQLREFLGKAGFCRLFIPGFAEMAAPLYPLTKPGTLFNWGPDQQKAYQEIKQALLTAPALGLPDLTKPFELFVDEKQGYAKGVLTQKLGPWRRPVAYLSKKLDPVAAGWPPCLRMVAAIAVLTKDAGKLTMGQPLVILAPHAVEALVKQPPDRWLSNARMTHYQALLLDTDRVQFGPVVALNPATLLPLPEEGLQHNCLDILAEAHGTRPDLTDQPLPDADHTWYTDGSSLLQEGQRKAGAAVTTETEVIWAKALPAGTSAQRAELIALTQALKMAEGKKLNVYTDSRYAFATAHIHGEIYRRRGWLTSEGKEIKNKDEILALLKALFLPKRLSIIHCPGHQKGHSAEARGNRMADQAARKAAITETPDTSTLLIENSSPSGGSKRTADGSEFEAGKRTADGSEFEKRTADGSEFESPKKKAKVE

SEQ ID NO: 2668 - protein, 2116 aa, synthetic construct
MPAAKRVKLDGGDKKYSIGLDIGTNSVGWAVITDEYKVPSKKFKVLGNTDRHSIKKNLIGALLFDSGETAEATRLKRTARRRYTRRKNRICYLQEIFSNEMAKVDDSFFHRLEESFLVEEDKKHERHPIFGNIVDEVAYHEKYPTIYHLRKKLVDSTDKADLRLIYLALAHMIKFRGHFLIEGDLNPDNSDVDKLFIQLVQTYNQLFEENPINASGVDAKAILSARLSKSRRLENLIAQLPGEKKNGLFGNLIALSLGLTPNFKSNFDLAEDAKLQLSKDTYDDDLDNLLAQIGDQYADLFLAAKNLSDAILLSDILRVNTEITKAPLSASMIKRYDEHHQDLTLLKALVRQQLPEKYKEIFFDQSKNGYAGYIDGGASQEEFYKFIKPILEKMDGTEELLVKLNREDLLRKQRTFDNGSIPHQIHLGELHAILRRQEDFYPFLKDNREKIEKILTFRIPYYVGPLARGNSRFAWMTRKSEETITPWNFEEVVDKGASAQSFIERMTNFDKNLPNEKVLPKHSLLYEYFTVYNELTKVKYVTEGMRKPAFLSGEQKKAIVDLLFKTNRKVTVKQLKEDYFKKIECFDSVEISGVEDRFNASLGTYHDLLKIIKDKDFLDNEENEDILEDIVLTLTLFEDREMIEERLKTYAHLFDDKVMKQLKRRRYTGWGRLSRKLINGIRDKQSGKTILDFLKSDGFANRNFMQLIHDDSLTFKEDIQKAQVSGQGDSLHEHIANLAGSPAIKKGILQTVKVVDELVKVMGRHKPENIVIEMARENQTTQKGQKNSRERMKRIEEGIKELGSQILKEHPVENTQLQNEKLYLYYLQNGRDMYVDQELDINRLSDYDVDHIVPQSFLKDDSIDNKVLTRSDKARGKSDNVPSEEVVKKMKNYWRQLLNAKLITQRKFDNLTKAERGGLSELDKAGFIKRQLVETRQITKHVAQILDSRMNTKYDENDKLIREVKVITLKSKLVSDFRKDFQFYKVREINNYHHAHDAYLNAVVGTALIKKYPKLESEFVYGDYKVYDVRKMIAKSEQEIGKATAKYFFYSNIMNFFKTEITLANGEIRKRPLIETNGETGEIVWDKGRDFATVRKVLSMPQVNIVKKTEVQTGGFSKESILPKRNSDKLIARKKDWDPKKYGGFDSPTVAYSVLVVAKVEKGKSKKLKSVKELLGITIMERSSFEKNPIDFLEAKGYKEVKKDLIIKLPKYSLFELENGRKRMLASAGELQKGNELALPSKYVNFLYLASHYEKLKGSPEDNEQKQLFVEQHKHYLDEIIEQISEFSKRVILADANLDKVLSAYNKHRDKPIREQAENIIHLFTLTNLGAPAAFKYFDTTIDRKRYTSTKEVLDATLIHQSITGLYETRIDLSQLGGDGGPAPEAAAKGGGGGTLNIEDEYRLHETSKEPDVSLGSTWLSDFPQAWAETGGMGLAVRQAPLIIPLKATSTPVSIKQYPMSQEARLGIKPHIQRLLDQGILVPCQSPWNTPLLPVKKPGTNDYRPVQDLREVNKRVEDIHPTVPNPYNLLSGLPPSHQWYTVLDLKDAFFCLRLHPTSQPLFAFEWRDPEMGISGQLTWTRLPQGFKNSPTLFNEALHRDLADFRIQHPDLILLQYVDDLLLAATSELDCQQGTRALLQTLGNLGYRASAKKAQICQKQVKYLGYLLKEGQRWLTEARKETVMGQPTPKTPRQLREFLGKAGFCRLFIPGFAEMAAPLYPLTKPGTLFNWGPDQQKAYQEIKQALLTAPALGLPDLTKPFELFVDEKQGYAKGVLTQKLGPWRRPVAYLSKKLDPVAAGWPPCLRMVAAIAVLTKDAGKLTMGQPLVILAPHAVEALVKQPPDRWLSNARMTHYQALLLDTDRVQFGPVVALNPATLLPLPEEGLQHNCLDILAEAHGTRPDLTDQPLPDADHTWYTDGSSLLQEGQRKAGAAVTTETEVIWAKALPAGTSAQRAELIALTQALKMAEGKKLNVYTDSRYAFATAHIHGEIYRRRGWLTSEGKEIKNKDEILALLKALFLPKRLSIIHCPGHQKGHSAEARGNRMADQAARKAAITETPDTSTLLIENSSPSGGSKRTADGSEFEAGKRTADGSEFEKRTADGSEFESPKKKAKVE

SEQ ID NO: 2669 - protein, 2120 aa, synthetic construct
MPAAKRVKLDGGDKKYSIGLDIGTNSVGWAVITDEYKVPSKKFKVLGNTDRHSIKKNLIGALLFDSGETAEATRLKRTARRRYTRRKNRICYLQEIFSNEMAKVDDSFFHRLEESFLVEEDKKHERHPIFGNIVDEVAYHEKYPTIYHLRKKLVDSTDKADLRLIYLALAHMIKFRGHFLIEGDLNPDNSDVDKLFIQLVQTYNQLFEENPINASGVDAKAILSARLSKSRRLENLIAQLPGEKKNGLFGNLIALSLGLTPNFKSNFDLAEDAKLQLSKDTYDDDLDNLLAQIGDQYADLFLAAKNLSDAILLSDILRVNTEITKAPLSASMIKRYDEHHQDLTLLKALVRQQLPEKYKEIFFDQSKNGYAGYIDGGASQEEFYKFIKPILEKMDGTEELLVKLNREDLLRKQRTFDNGSIPHQIHLGELHAILRRQEDFYPFLKDNREKIEKILTFRIPYYVGPLARGNSRFAWMTRKSEETITPWNFEEVVDKGASAQSFIERMTNFDKNLPNEKVLPKHSLLYEYFTVYNELTKVKYVTEGMRKPAFLSGEQKKAIVDLLFKTNRKVTVKQLKEDYFKKIECFDSVEISGVEDRFNASLGTYHDLLKIIKDKDFLDNEENEDILEDIVLTLTLFEDREMIEERLKTYAHLFDDKVMKQLKRRRYTGWGRLSRKLINGIRDKQSGKTILDFLKSDGFANRNFMQLIHDDSLTFKEDIQKAQVSGQGDSLHEHIANLAGSPAIKKGILQTVKVVDELVKVMGRHKPENIVIEMARENQTTQKGQKNSRERMKRIEEGIKELGSQILKEHPVENTQLQNEKLYLYYLQNGRDMYVDQELDINRLSDYDVDHIVPQSFLKDDSIDNKVLTRSDKARGKSDNVPSEEVVKKMKNYWRQLLNAKLITQRKFDNLTKAERGGLSELDKAGFIKRQLVETRQITKHVAQILDSRMNTKYDENDKLIREVKVITLKSKLVSDFRKDFQFYKVREINNYHHAHDAYLNAVVGTALIKKYPKLESEFVYGDYKVYDVRKMIAKSEQEIGKATAKYFFYSNIMNFFKTEITLANGEIRKRPLIETNGETGEIVWDKGRDFATVRKVLSMPQVNIVKKTEVQTGGFSKESILPKRNSDKLIARKKDWDPKKYGGFDSPTVAYSVLVVAKVEKGKSKKLKSVKELLGITIMERSSFEKNPIDFLEAKGYKEVKKDLIIKLPKYSLFELENGRKRMLASAGELQKGNELALPSKYVNFLYLASHYEKLKGSPEDNEQKQLFVEQHKHYLDEIIEQISEFSKRVILADANLDKVLSAYNKHRDKPIREQAENIIHLFTLTNLGAPAAFKYFDTTIDRKRYTSTKEVLDATLIHQSITGLYETRIDLSQLGGDGGGSSGSSGSSGSSGSSGGTLNIEDEYRLHETSKEPDVSLGSTWLSDFPQAWAETGGMGLAVRQAPLIIPLKATSTPVSIKQYPMSQEARLGIKPHIQRLLDQGILVPCQSPWNTPLLPVKKPGTNDYRPVQDLREVNKRVEDIHPTVPNPYNLLSGLPPSHQWYTVLDLKDAFFCLRLHPTSQPLFAFEWRDPEMGISGQLTWTRLPQGFKNSPTLFNEALHRDLADFRIQHPDLILLQYVDDLLLAATSELDCQQGTRALLQTLGNLGYRASAKKAQICQKQVKYLGYLLKEGQRWLTEARKETVMGQPTPKTPRQLREFLGKAGFCRLFIPGFAEMAAPLYPLTKPGTLFNWGPDQQKAYQEIKQALLTAPALGLPDLTKPFELFVDEKQGYAKGVLTQKLGPWRRPVAYLSKKLDPVAAGWPPCLRMVAAIAVLTKDAGKLTMGQPLVILAPHAVEALVKQPPDRWLSNARMTHYQALLLDTDRVQFGPVVALNPATLLPLPEEGLQHNCLDILAEAHGTRPDLTDQPLPDADHTWYTDGSSLLQEGQRKAGAAVTTETEVIWAKALPAGTSAQRAELIALTQALKMAEGKKLNVYTDSRYAFATAHIHGEIYRRRGWLTSEGKEIKNKDEILALLKALFLPKRLSIIHCPGHQKGHSAEARGNRMADQAARKAAITETPDTSTLLIENSSPSGGSKRTADGSEFEAGKRTADGSEFEKRTADGSEFESPKKKAKVE

SEQ ID NO: 2670 - protein, 2114 aa, synthetic construct
MPAAKRVKLDGGDKKYSIGLDIGTNSVGWAVITDEYKVPSKKFKVLGNTDRHSIKKNLIGALLFDSGETAEATRLKRTARRRYTRRKNRICYLQEIFSNEMAKVDDSFFHRLEESFLVEEDKKHERHPIFGNIVDEVAYHEKYPTIYHLRKKLVDSTDKADLRLIYLALAHMIKFRGHFLIEGDLNPDNSDVDKLFIQLVQTYNQLFEENPINASGVDAKAILSARLSKSRRLENLIAQLPGEKKNGLFGNLIALSLGLTPNFKSNFDLAEDAKLQLSKDTYDDDLDNLLAQIGDQYADLFLAAKNLSDAILLSDILRVNTEITKAPLSASMIKRYDEHHQDLTLLKALVRQQLPEKYKEIFFDQSKNGYAGYIDGGASQEEFYKFIKPILEKMDGTEELLVKLNREDLLRKQRTFDNGSIPHQIHLGELHAILRRQEDFYPFLKDNREKIEKILTFRIPYYVGPLARGNSRFAWMTRKSEETITPWNFEEVVDKGASAQSFIERMTNFDKNLPNEKVLPKHSLLYEYFTVYNELTKVKYVTEGMRKPAFLSGEQKKAIVDLLFKTNRKVTVKQLKEDYFKKIECFDSVEISGVEDRFNASLGTYHDLLKIIKDKDFLDNEENEDILEDIVLTLTLFEDREMIEERLKTYAHLFDDKVMKQLKRRRYTGWGRLSRKLINGIRDKQSGKTILDFLKSDGFANRNFMQLIHDDSLTFKEDIQKAQVSGQGDSLHEHIANLAGSPAIKKGILQTVKVVDELVKVMGRHKPENIVIEMARENQTTQKGQKNSRERMKRIEEGIKELGSQILKEHPVENTQLQNEKLYLYYLQNGRDMYVDQELDINRLSDYDVDHIVPQSFLKDDSIDNKVLTRSDKARGKSDNVPSEEVVKKMKNYWRQLLNAKLITQRKFDNLTKAERGGLSELDKAGFIKRQLVETRQITKHVAQILDSRMNTKYDENDKLIREVKVITLKSKLVSDFRKDFQFYKVREINNYHHAHDAYLNAVVGTALIKKYPKLESEFVYGDYKVYDVRKMIAKSEQEIGKATAKYFFYSNIMNFFKTEITLANGEIRKRPLIETNGETGEIVWDKGRDFATVRKVLSMPQVNIVKKTEVQTGGFSKESILPKRNSDKLIARKKDWDPKKYGGFDSPTVAYSVLVVAKVEKGKSKKLKSVKELLGITIMERSSFEKNPIDFLEAKGYKEVKKDLIIKLPKYSLFELENGRKRMLASAGELQKGNELALPSKYVNFLYLASHYEKLKGSPEDNEQKQLFVEQHKHYLDEIIEQISEFSKRVILADANLDKVLSAYNKHRDKPIREQAENIIHLFTLTNLGAPAAFKYFDTTIDRKRYTSTKEVLDATLIHQSITGLYETRIDLSQLGGDGGGGGGGSGSSGGTLNIEDEYRLHETSKEPDVSLGSTWLSDFPQAWAETGGMGLAVRQAPLIIPLKATSTPVSIKQYPMSQEARLGIKPHIQRLLDQGILVPCQSPWNTPLLPVKKPGTNDYRPVQDLREVNKRVEDIHPTVPNPYNLLSGLPPSHQWYTVLDLKDAFFCLRLHPTSQPLFAFEWRDPEMGISGQLTWTRLPQGFKNSPTLFNEALHRDLADFRIQHPDLILLQYVDDLLLAATSELDCQQGTRALLQTLGNLGYRASAKKAQICQKQVKYLGYLLKEGQRWLTEARKETVMGQPTPKTPRQLREFLGKAGFCRLFIPGFAEMAAPLYPLTKPGTLFNWGPDQQKAYQEIKQALLTAPALGLPDLTKPFELFVDEKQGYAKGVLTQKLGPWRRPVAYLSKKLDPVAAGWPPCLRMVAAIAVLTKDAGKLTMGQPLVILAPHAVEALVKQPPDRWLSNARMTHYQALLLDTDRVQFGPVVALNPATLLPLPEEGLQHNCLDILAEAHGTRPDLTDQPLPDADHTWYTDGSSLLQEGQRKAGAAVTTETEVIWAKALPAGTSAQRAELIALTQALKMAEGKKLNVYTDSRYAFATAHIHGEIYRRRGWLTSEGKEIKNKDEILALLKALFLPKRLSIIHCPGHQKGHSAEARGNRMADQAARKAAITETPDTSTLLIENSSPSGGSKRTADGSEFEAGKRTADGSEFEKRTADGSEFESPKKKAKVE

SEQ ID NO: 2671 - protein, 2111 aa, synthetic construct
MPAAKRVKLDGGDKKYSIGLDIGTNSVGWAVITDEYKVPSKKFKVLGNTDRHSIKKNLIGALLFDSGETAEATRLKRTARRRYTRRKNRICYLQEIFSNEMAKVDDSFFHRLEESFLVEEDKKHERHPIFGNIVDEVAYHEKYPTIYHLRKKLVDSTDKADLRLIYLALAHMIKFRGHFLIEGDLNPDNSDVDKLFIQLVQTYNQLFEENPINASGVDAKAILSARLSKSRRLENLIAQLPGEKKNGLFGNLIALSLGLTPNFKSNFDLAEDAKLQLSKDTYDDDLDNLLAQIGDQYADLFLAAKNLSDAILLSDILRVNTEITKAPLSASMIKRYDEHHQDLTLLKALVRQQLPEKYKEIFFDQSKNGYAGYIDGGASQEEFYKFIKPILEKMDGTEELLVKLNREDLLRKQRTFDNGSIPHQIHLGELHAILRRQEDFYPFLKDNREKIEKILTFRIPYYVGPLARGNSRFAWMTRKSEETITPWNFEEVVDKGASAQSFIERMTNFDKNLPNEKVLPKHSLLYEYFTVYNELTKVKYVTEGMRKPAFLSGEQKKAIVDLLFKTNRKVTVKQLKEDYFKKIECFDSVEISGVEDRFNASLGTYHDLLKIIKDKDFLDNEENEDILEDIVLTLTLFEDREMIEERLKTYAHLFDDKVMKQLKRRRYTGWGRLSRKLINGIRDKQSGKTILDFLKSDGFANRNFMQLIHDDSLTFKEDIQKAQVSGQGDSLHEHIANLAGSPAIKKGILQTVKVVDELVKVMGRHKPENIVIEMARENQTTQKGQKNSRERMKRIEEGIKELGSQILKEHPVENTQLQNEKLYLYYLQNGRDMYVDQELDINRLSDYDVDHIVPQSFLKDDSIDNKVLTRSDKARGKSDNVPSEEVVKKMKNYWRQLLNAKLITQRKFDNLTKAERGGLSELDKAGFIKRQLVETRQITKHVAQILDSRMNTKYDENDKLIREVKVITLKSKLVSDFRKDFQFYKVREINNYHHAHDAYLNAVVGTALIKKYPKLESEFVYGDYKVYDVRKMIAKSEQEIGKATAKYFFYSNIMNFFKTEITLANGEIRKRPLIETNGETGEIVWDKGRDFATVRKVLSMPQVNIVKKTEVQTGGFSKESILPKRNSDKLIARKKDWDPKKYGGFDSPTVAYSVLVVAKVEKGKSKKLKSVKELLGITIMERSSFEKNPIDFLEAKGYKEVKKDLIIKLPKYSLFELENGRKRMLASAGELQKGNELALPSKYVNFLYLASHYEKLKGSPEDNEQKQLFVEQHKHYLDEIIEQISEFSKRVILADANLDKVLSAYNKHRDKPIREQAENIIHLFTLTNLGAPAAFKYFDTTIDRKRYTSTKEVLDATLIHQSITGLYETRIDLSQLGGDGGGGSPAPGGTLNIEDEYRLHETSKEPDVSLGSTWLSDFPQAWAETGGMGLAVRQAPLIIPLKATSTPVSIKQYPMSQEARLGIKPHIQRLLDQGILVPCQSPWNTPLLPVKKPGTNDYRPVQDLREVNKRVEDIHPTVPNPYNLLSGLPPSHQWYTVLDLKDAFFCLRLHPTSQPLFAFEWRDPEMGISGQLTWTRLPQGFKNSPTLFNEALHRDLADFRIQHPDLILLQYVDDLLLAATSELDCQQGTRALLQTLGNLGYRASAKKAQICQKQVKYLGYLLKEGQRWLTEARKETVMGQPTPKTPRQLREFLGKAGFCRLFIPGFAEMAAPLYPLTKPGTLFNWGPDQQKAYQEIKQALLTAPALGLPDLTKPFELFVDEKQGYAKGVLTQKLGPWRRPVAYLSKKLDPVAAGWPPCLRMVAAIAVLTKDAGKLTMGQPLVILAPHAVEALVKQPPDRWLSNARMTHYQALLLDTDRVQFGPVVALNPATLLPLPEEGLQHNCLDILAEAHGTRPDLTDQPLPDADHTWYTDGSSLLQEGQRKAGAAVTTETEVIWAKALPAGTSAQRAELIALTQALKMAEGKKLNVYTDSRYAFATAHIHGEIYRRRGWLTSEGKEIKNKDEILALLKALFLPKRLSIIHCPGHQKGHSAEARGNRMADQAARKAAITETPDTSTLLIENSSPSGGSKRTADGSEFEAGKRTADGSEFEKRTADGSEFESPKKKAKVE

SEQ ID NO: 2672 - protein, 2111 aa, synthetic construct
MPAAKRVKLDGGDKKYSIGLDIGTNSVGWAVITDEYKVPSKKFKVLGNTDRHSIKKNLIGALLFDSGETAEATRLKRTARRRYTRRKNRICYLQEIFSNEMAKVDDSFFHRLEESFLVEEDKKHERHPIFGNIVDEVAYHEKYPTIYHLRKKLVDSTDKADLRLIYLALAHMIKFRGHFLIEGDLNPDNSDVDKLFIQLVQTYNQLFEENPINASGVDAKAILSARLSKSRRLENLIAQLPGEKKNGLFGNLIALSLGLTPNFKSNFDLAEDAKLQLSKDTYDDDLDNLLAQIGDQYADLFLAAKNLSDAILLSDILRVNTEITKAPLSASMIKRYDEHHQDLTLLKALVRQQLPEKYKEIFFDQSKNGYAGYIDGGASQEEFYKFIKPILEKMDGTEELLVKLNREDLLRKQRTFDNGSIPHQIHLGELHAILRRQEDFYPFLKDNREKIEKILTFRIPYYVGPLARGNSRFAWMTRKSEETITPWNFEEVVDKGASAQSFIERMTNFDKNLPNEKVLPKHSLLYEYFTVYNELTKVKYVTEGMRKPAFLSGEQKKAIVDLLFKTNRKVTVKQLKEDYFKKIECFDSVEISGVEDRFNASLGTYHDLLKIIKDKDFLDNEENEDILEDIVLTLTLFEDREMIEERLKTYAHLFDDKVMKQLKRRRYTGWGRLSRKLINGIRDKQSGKTILDFLKSDGFANRNFMQLIHDDSLTFKEDIQKAQVSGQGDSLHEHIANLAGSPAIKKGILQTVKVVDELVKVMGRHKPENIVIEMARENQTTQKGQKNSRERMKRIEEGIKELGSQILKEHPVENTQLQNEKLYLYYLQNGRDMYVDQELDINRLSDYDVDHIVPQSFLKDDSIDNKVLTRSDKARGKSDNVPSEEVVKKMKNYWRQLLNAKLITQRKFDNLTKAERGGLSELDKAGFIKRQLVETRQITKHVAQILDSRMNTKYDENDKLIREVKVITLKSKLVSDFRKDFQFYKVREINNYHHAHDAYLNAVVGTALIKKYPKLESEFVYGDYKVYDVRKMIAKSEQEIGKATAKYFFYSNIMNFFKTEITLANGEIRKRPLIETNGETGEIVWDKGRDFATVRKVLSMPQVNIVKKTEVQTGGFSKESILPKRNSDKLIARKKDWDPKKYGGFDSPTVAYSVLVVAKVEKGKSKKLKSVKELLGITIMERSSFEKNPIDFLEAKGYKEVKKDLIIKLPKYSLFELENGRKRMLASAGELQKGNELALPSKYVNFLYLASHYEKLKGSPEDNEQKQLFVEQHKHYLDEIIEQISEFSKRVILADANLDKVLSAYNKHRDKPIREQAENIIHLFTLTNLGAPAAFKYFDTTIDRKRYTSTKEVLDATLIHQSITGLYETRIDLSQLGGDGGGGGPAPGGTLNIEDEYRLHETSKEPDVSLGSTWLSDFPQAWAETGGMGLAVRQAPLIIPLKATSTPVSIKQYPMSQEARLGIKPHIQRLLDQGILVPCQSPWNTPLLPVKKPGTNDYRPVQDLREVNKRVEDIHPTVPNPYNLLSGLPPSHQWYTVLDLKDAFFCLRLHPTSQPLFAFEWRDPEMGISGQLTWTRLPQGFKNSPTLFNEALHRDLADFRIQHPDLILLQYVDDLLLAATSELDCQQGTRALLQTLGNLGYRASAKKAQICQKQVKYLGYLLKEGQRWLTEARKETVMGQPTPKTPRQLREFLGKAGFCRLFIPGFAEMAAPLYPLTKPGTLFNWGPDQQKAYQEIKQALLTAPALGLPDLTKPFELFVDEKQGYAKGVLTQKLGPWRRPVAYLSKKLDPVAAGWPPCLRMVAAIAVLTKDAGKLTMGQPLVILAPHAVEALVKQPPDRWLSNARMTHYQALLLDTDRVQFGPVVALNPATLLPLPEEGLQHNCLDILAEAHGTRPDLTDQPLPDADHTWYTDGSSLLQEGQRKAGAAVTTETEVIWAKALPAGTSAQRAELIALTQALKMAEGKKLNVYTDSRYAFATAHIHGEIYRRRGWLTSEGKEIKNKDEILALLKALFLPKRLSIIHCPGHQKGHSAEARGNRMADQAARKAAITETPDTSTLLIENSSPSGGSKRTADGSEFEAGKRTADGSEFEKRTADGSEFESPKKKAKVE

SEQ ID NO: 2673 - protein, 2116 aa, synthetic construct
MPAAKRVKLDGGDKKYSIGLDIGTNSVGWAVITDEYKVPSKKFKVLGNTDRHSIKKNLIGALLFDSGETAEATRLKRTARRRYTRRKNRICYLQEIFSNEMAKVDDSFFHRLEESFLVEEDKKHERHPIFGNIVDEVAYHEKYPTIYHLRKKLVDSTDKADLRLIYLALAHMIKFRGHFLIEGDLNPDNSDVDKLFIQLVQTYNQLFEENPINASGVDAKAILSARLSKSRRLENLIAQLPGEKKNGLFGNLIALSLGLTPNFKSNFDLAEDAKLQLSKDTYDDDLDNLLAQIGDQYADLFLAAKNLSDAILLSDILRVNTEITKAPLSASMIKRYDEHHQDLTLLKALVRQQLPEKYKEIFFDQSKNGYAGYIDGGASQEEFYKFIKPILEKMDGTEELLVKLNREDLLRKQRTFDNGSIPHQIHLGELHAILRRQEDFYPFLKDNREKIEKILTFRIPYYVGPLARGNSRFAWMTRKSEETITPWNFEEVVDKGASAQSFIERMTNFDKNLPNEKVLPKHSLLYEYFTVYNELTKVKYVTEGMRKPAFLSGEQKKAIVDLLFKTNRKVTVKQLKEDYFKKIECFDSVEISGVEDRFNASLGTYHDLLKIIKDKDFLDNEENEDILEDIVLTLTLFEDREMIEERLKTYAHLFDDKVMKQLKRRRYTGWGRLSRKLINGIRDKQSGKTILDFLKSDGFANRNFMQLIHDDSLTFKEDIQKAQVSGQGDSLHEHIANLAGSPAIKKGILQTVKVVDELVKVMGRHKPENIVIEMARENQTTQKGQKNSRERMKRIEEGIKELGSQILKEHPVENTQLQNEKLYLYYLQNGRDMYVDQELDINRLSDYDVDHIVPQSFLKDDSIDNKVLTRSDKARGKSDNVPSEEVVKKMKNYWRQLLNAKLITQRKFDNLTKAERGGLSELDKAGFIKRQLVETRQITKHVAQILDSRMNTKYDENDKLIREVKVITLKSKLVSDFRKDFQFYKVREINNYHHAHDAYLNAVVGTALIKKYPKLESEFVYGDYKVYDVRKMIAKSEQEIGKATAKYFFYSNIMNFFKTEITLANGEIRKRPLIETNGETGEIVWDKGRDFATVRKVLSMPQVNIVKKTEVQTGGFSKESILPKRNSDKLIARKKDWDPKKYGGFDSPTVAYSVLVVAKVEKGKSKKLKSVKELLGITIMERSSFEKNPIDFLEAKGYKEVKKDLIIKLPKYSLFELENGRKRMLASAGELQKGNELALPSKYVNFLYLASHYEKLKGSPEDNEQKQLFVEQHKHYLDEIIEQISEFSKRVILADANLDKVLSAYNKHRDKPIREQAENIIHLFTLTNLGAPAAFKYFDTTIDRKRYTSTKEVLDATLIHQSITGLYETRIDLSQLGGDGGGGSEAAAKGSSGGTLNIEDEYRLHETSKEPDVSLGSTWLSDFPQAWAETGGMGLAVRQAPLIIPLKATSTPVSIKQYPMSQEARLGIKPHIQRLLDQGILVPCQSPWNTPLLPVKKPGTNDYRPVQDLREVNKRVEDIHPTVPNPYNLLSGLPPSHQWYTVLDLKDAFFCLRLHPTSQPLFAFEWRDPEMGISGQLTWTRLPQGFKNSPTLFNEALHRDLADFRIQHPDLILLQYVDDLLLAATSELDCQQGTRALLQTLGNLGYRASAKKAQICQKQVKYLGYLLKEGQRWLTEARKETVMGQPTPKTPRQLREFLGKAGFCRLFIPGFAEMAAPLYPLTKPGTLFNWGPDQQKAYQEIKQALLTAPALGLPDLTKPFELFVDEKQGYAKGVLTQKLGPWRRPVAYLSKKLDPVAAGWPPCLRMVAAIAVLTKDAGKLTMGQPLVILAPHAVEALVKQPPDRWLSNARMTHYQALLLDTDRVQFGPVVALNPATLLPLPEEGLQHNCLDILAEAHGTRPDLTDQPLPDADHTWYTDGSSLLQEGQRKAGAAVTTETEVIWAKALPAGTSAQRAELIALTQALKMAEGKKLNVYTDSRYAFATAHIHGEIYRRRGWLTSEGKEIKNKDEILALLKALFLPKRLSIIHCPGHQKGHSAEARGNRMADQAARKAAITETPDTSTLLIENSSPSGGSKRTADGSEFEAGKRTADGSEFEKRTADGSEFESPKKKAKVE

SEQ ID NO: 2674 - protein, 2116 aa, synthetic construct
MPAAKRVKLDGGDKKYSIGLDIGTNSVGWAVITDEYKVPSKKFKVLGNTDRHSIKKNLIGALLFDSGETAEATRLKRTARRRYTRRKNRICYLQEIFSNEMAKVDDSFFHRLEESFLVEEDKKHERHPIFGNIVDEVAYHEKYPTIYHLRKKLVDSTDKADLRLIYLALAHMIKFRGHFLIEGDLNPDNSDVDKLFIQLVQTYNQLFEENPINASGVDAKAILSARLSKSRRLENLIAQLPGEKKNGLFGNLIALSLGLTPNFKSNFDLAEDAKLQLSKDTYDDDLDNLLAQIGDQYADLFLAAKNLSDAILLSDILRVNTEITKAPLSASMIKRYDEHHQDLTLLKALVRQQLPEKYKEIFFDQSKNGYAGYIDGGASQEEFYKFIKPILEKMDGTEELLVKLNREDLLRKQRTFDNGSIPHQIHLGELHAILRRQEDFYPFLKDNREKIEKILTFRIPYYVGPLARGNSRFAWMTRKSEETITPWNFEEVVDKGASAQSFIERMTNFDKNLPNEKVLPKHSLLYEYFTVYNELTKVKYVTEGMRKPAFLSGEQKKAIVDLLFKTNRKVTVKQLKEDYFKKIECFDSVEISGVEDRFNASLGTYHDLLKIIKDKDFLDNEENEDILEDIVLTLTLFEDREMIEERLKTYAHLFDDKVMKQLKRRRYTGWGRLSRKLINGIRDKQSGKTILDFLKSDGFANRNFMQLIHDDSLTFKEDIQKAQVSGQGDSLHEHIANLAGSPAIKKGILQTVKVVDELVKVMGRHKPENIVIEMARENQTTQKGQKNSRERMKRIEEGIKELGSQILKEHPVENTQLQNEKLYLYYLQNGRDMYVDQELDINRLSDYDVDHIVPQSFLKDDSIDNKVLTRSDKARGKSDNVPSEEVVKKMKNYWRQLLNAKLITQRKFDNLTKAERGGLSELDKAGFIKRQLVETRQITKHVAQILDSRMNTKYDENDKLIREVKVITLKSKLVSDFRKDFQFYKVREINNYHHAHDAYLNAVVGTALIKKYPKLESEFVYGDYKVYDVRKMIAKSEQEIGKATAKYFFYSNIMNFFKTEITLANGEIRKRPLIETNGETGEIVWDKGRDFATVRKVLSMPQVNIVKKTEVQTGGFSKESILPKRNSDKLIARKKDWDPKKYGGFDSPTVAYSVLVVAKVEKGKSKKLKSVKELLGITIMERSSFEKNPIDFLEAKGYKEVKKDLIIKLPKYSLFELENGRKRMLASAGELQKGNELALPSKYVNFLYLASHYEKLKGSPEDNEQKQLFVEQHKHYLDEIIEQISEFSKRVILADANLDKVLSAYNKHRDKPIREQAENIIHLFTLTNLGAPAAFKYFDTTIDRKRYTSTKEVLDATLIHQSITGLYETRIDLSQLGGDGGEAAAKPAPGGSGGTLNIEDEYRLHETSKEPDVSLGSTWLSDFPQAWAETGGMGLAVRQAPLIIPLKATSTPVSIKQYPMSQEARLGIKPHIQRLLDQGILVPCQSPWNTPLLPVKKPGTNDYRPVQDLREVNKRVEDIHPTVPNPYNLLSGLPPSHQWYTVLDLKDAFFCLRLHPTSQPLFAFEWRDPEMGISGQLTWTRLPQGFKNSPTLFNEALHRDLADFRIQHPDLILLQYVDDLLLAATSELDCQQGTRALLQTLGNLGYRASAKKAQICQKQVKYLGYLLKEGQRWLTEARKETVMGQPTPKTPRQLREFLGKAGFCRLFIPGFAEMAAPLYPLTKPGTLFNWGPDQQKAYQEIKQALLTAPALGLPDLTKPFELFVDEKQGYAKGVLTQKLGPWRRPVAYLSKKLDPVAAGWPPCLRMVAAIAVLTKDAGKLTMGQPLVILAPHAVEALVKQPPDRWLSNARMTHYQALLLDTDRVQFGPVVALNPATLLPLPEEGLQHNCLDILAEAHGTRPDLTDQPLPDADHTWYTDGSSLLQEGQRKAGAAVTTETEVIWAKALPAGTSAQRAELIALTQALKMAEGKKLNVYTDSRYAFATAHIHGEIYRRRGWLTSEGKEIKNKDEILALLKALFLPKRLSIIHCPGHQKGHSAEARGNRMADQAARKAAITETPDTSTLLIENSSPSGGSKRTADGSEFEAGKRTADGSEFEKRTADGSEFESPKKKAKVE

SEQ ID NO: 2675 - protein, 2114 aa, synthetic construct
MPAAKRVKLDGGDKKYSIGLDIGTNSVGWAVITDEYKVPSKKFKVLGNTDRHSIKKNLIGALLFDSGETAEATRLKRTARRRYTRRKNRICYLQEIFSNEMAKVDDSFFHRLEESFLVEEDKKHERHPIFGNIVDEVAYHEKYPTIYHLRKKLVDSTDKADLRLIYLALAHMIKFRGHFLIEGDLNPDNSDVDKLFIQLVQTYNQLFEENPINASGVDAKAILSARLSKSRRLENLIAQLPGEKKNGLFGNLIALSLGLTPNFKSNFDLAEDAKLQLSKDTYDDDLDNLLAQIGDQYADLFLAAKNLSDAILLSDILRVNTEITKAPLSASMIKRYDEHHQDLTLLKALVRQQLPEKYKEIFFDQSKNGYAGYIDGGASQEEFYKFIKPILEKMDGTEELLVKLNREDLLRKQRTFDNGSIPHQIHLGELHAILRRQEDFYPFLKDNREKIEKILTFRIPYYVGPLARGNSRFAWMTRKSEETITPWNFEEVVDKGASAQSFIERMTNFDKNLPNEKVLPKHSLLYEYFTVYNELTKVKYVTEGMRKPAFLSGEQKKAIVDLLFKTNRKVTVKQLKEDYFKKIECFDSVEISGVEDRFNASLGTYHDLLKIIKDKDFLDNEENEDILEDIVLTLTLFEDREMIEERLKTYAHLFDDKVMKQLKRRRYTGWGRLSRKLINGIRDKQSGKTILDFLKSDGFANRNFMQLIHDDSLTFKEDIQKAQVSGQGDSLHEHIANLAGSPAIKKGILQTVKVVDELVKVMGRHKPENIVIEMARENQTTQKGQKNSRERMKRIEEGIKELGSQILKEHPVENTQLQNEKLYLYYLQNGRDMYVDQELDINRLSDYDVDHIVPQSFLKDDSIDNKVLTRSDKARGKSDNVPSEEVVKKMKNYWRQLLNAKLITQRKFDNLTKAERGGLSELDKAGFIKRQLVETRQITKHVAQILDSRMNTKYDENDKLIREVKVITLKSKLVSDFRKDFQFYKVREINNYHHAHDAYLNAVVGTALIKKYPKLESEFVYGDYKVYDVRKMIAKSEQEIGKATAKYFFYSNIMNFFKTEITLANGEIRKRPLIETNGETGEIVWDKGRDFATVRKVLSMPQVNIVKKTEVQTGGFSKESILPKRNSDKLIARKKDWDPKKYGGFDSPTVAYSVLVVAKVEKGKSKKLKSVKELLGITIMERSSFEKNPIDFLEAKGYKEVKKDLIIKLPKYSLFELENGRKRMLASAGELQKGNELALPSKYVNFLYLASHYEKLKGSPEDNEQKQLFVEQHKHYLDEIIEQISEFSKRVILADANLDKVLSAYNKHRDKPIREQAENIIHLFTLTNLGAPAAFKYFDTTIDRKRYTSTKEVLDATLIHQSITGLYETRIDLSQLGGDGGGGSGSSGGGGGTLNIEDEYRLHETSKEPDVSLGSTWLSDFPQAWAETGGMGLAVRQAPLIIPLKATSTPVSIKQYPMSQEARLGIKPHIQRLLDQGILVPCQSPWNTPLLPVKKPGTNDYRPVQDLREVNKRVEDIHPTVPNPYNLLSGLPPSHQWYTVLDLKDAFFCLRLHPTSQPLFAFEWRDPEMGISGQLTWTRLPQGFKNSPTLFNEALHRDLADFRIQHPDLILLQYVDDLLLAATSELDCQQGTRALLQTLGNLGYRASAKKAQICQKQVKYLGYLLKEGQRWLTEARKETVMGQPTPKTPRQLREFLGKAGFCRLFIPGFAEMAAPLYPLTKPGTLFNWGPDQQKAYQEIKQALLTAPALGLPDLTKPFELFVDEKQGYAKGVLTQKLGPWRRPVAYLSKKLDPVAAGWPPCLRMVAAIAVLTKDAGKLTMGQPLVILAPHAVEALVKQPPDRWLSNARMTHYQALLLDTDRVQFGPVVALNPATLLPLPEEGLQHNCLDILAEAHGTRPDLTDQPLPDADHTWYTDGSSLLQEGQRKAGAAVTTETEVIWAKALPAGTSAQRAELIALTQALKMAEGKKLNVYTDSRYAFATAHIHGEIYRRRGWLTSEGKEIKNKDEILALLKALFLPKRLSIIHCPGHQKGHSAEARGNRMADQAARKAAITETPDTSTLLIENSSPSGGSKRTADGSEFEAGKRTADGSEFEKRTADGSEFESPKKKAKVE

SEQ ID NO: 2676 - protein, 2111 aa, synthetic construct
MPAAKRVKLDGGDKKYSIGLDIGTNSVGWAVITDEYKVPSKKFKVLGNTDRHSIKKNLIGALLFDSGETAEATRLKRTARRRYTRRKNRICYLQEIFSNEMAKVDDSFFHRLEESFLVEEDKKHERHPIFGNIVDEVAYHEKYPTIYHLRKKLVDSTDKADLRLIYLALAHMIKFRGHFLIEGDLNPDNSDVDKLFIQLVQTYNQLFEENPINASGVDAKAILSARLSKSRRLENLIAQLPGEKKNGLFGNLIALSLGLTPNFKSNFDLAEDAKLQLSKDTYDDDLDNLLAQIGDQYADLFLAAKNLSDAILLSDILRVNTEITKAPLSASMIKRYDEHHQDLTLLKALVRQQLPEKYKEIFFDQSKNGYAGYIDGGASQEEFYKFIKPILEKMDGTEELLVKLNREDLLRKQRTFDNGSIPHQIHLGELHAILRRQEDFYPFLKDNREKIEKILTFRIPYYVGPLARGNSRFAWMTRKSEETITPWNFEEVVDKGASAQSFIERMTNFDKNLPNEKVLPKHSLLYEYFTVYNELTKVKYVTEGMRKPAFLSGEQKKAIVDLLFKTNRKVTVKQLKEDYFKKIECFDSVEISGVEDRFNASLGTYHDLLKIIKDKDFLDNEENEDILEDIVLTLTLFEDREMIEERLKTYAHLFDDKVMKQLKRRRYTGWGRLSRKLINGIRDKQSGKTILDFLKSDGFANRNFMQLIHDDSLTFKEDIQKAQVSGQGDSLHEHIANLAGSPAIKKGILQTVKVVDELVKVMGRHKPENIVIEMARENQTTQKGQKNSRERMKRIEEGIKELGSQILKEHPVENTQLQNEKLYLYYLQNGRDMYVDQELDINRLSDYDVDHIVPQSFLKDDSIDNKVLTRSDKARGKSDNVPSEEVVKKMKNYWRQLLNAKLITQRKFDNLTKAERGGLSELDKAGFIKRQLVETRQITKHVAQILDSRMNTKYDENDKLIREVKVITLKSKLVSDFRKDFQFYKVREINNYHHAHDAYLNAVVGTALIKKYPKLESEFVYGDYKVYDVRKMIAKSEQEIGKATAKYFFYSNIMNFFKTEITLANGEIRKRPLIETNGETGEIVWDKGRDFATVRKVLSMPQVNIVKKTEVQTGGFSKESILPKRNSDKLIARKKDWDPKKYGGFDSPTVAYSVLVVAKVEKGKSKKLKSVKELLGITIMERSSFEKNPIDFLEAKGYKEVKKDLIIKLPKYSLFELENGRKRMLASAGELQKGNELALPSKYVNFLYLASHYEKLKGSPEDNEQKQLFVEQHKHYLDEIIEQISEFSKRVILADANLDKVLSAYNKHRDKPIREQAENIIHLFTLTNLGAPAAFKYFDTTIDRKRYTSTKEVLDATLIHQSITGLYETRIDLSQLGGDGGGSSGGGGGTLNIEDEYRLHETSKEPDVSLGSTWLSDFPQAWAETGGMGLAVRQAPLIIPLKATSTPVSIKQYPMSQEARLGIKPHIQRLLDQGILVPCQSPWNTPLLPVKKPGTNDYRPVQDLREVNKRVEDIHPTVPNPYNLLSGLPPSHQWYTVLDLKDAFFCLRLHPTSQPLFAFEWRDPEMGISGQLTWTRLPQGFKNSPTLFNEALHRDLADFRIQHPDLILLQYVDDLLLAATSELDCQQGTRALLQTLGNLGYRASAKKAQICQKQVKYLGYLLKEGQRWLTEARKETVMGQPTPKTPRQLREFLGKAGFCRLFIPGFAEMAAPLYPLTKPGTLFNWGPDQQKAYQEIKQALLTAPALGLPDLTKPFELFVDEKQGYAKGVLTQKLGPWRRPVAYLSKKLDPVAAGWPPCLRMVAAIAVLTKDAGKLTMGQPLVILAPHAVEALVKQPPDRWLSNARMTHYQALLLDTDRVQFGPVVALNPATLLPLPEEGLQHNCLDILAEAHGTRPDLTDQPLPDADHTWYTDGSSLLQEGQRKAGAAVTTETEVIWAKALPAGTSAQRAELIALTQALKMAEGKKLNVYTDSRYAFATAHIHGEIYRRRGWLTSEGKEIKNKDEILALLKALFLPKRLSIIHCPGHQKGHSAEARGNRMADQAARKAAITETPDTSTLLIENSSPSGGSKRTADGSEFEAGKRTADGSEFEKRTADGSEFESPKKKAKVE

SEQ ID NO: 2677 - protein, 2116 aa, synthetic construct
MPAAKRVKLDGGDKKYSIGLDIGTNSVGWAVITDEYKVPSKKFKVLGNTDRHSIKKNLIGALLFDSGETAEATRLKRTARRRYTRRKNRICYLQEIFSNEMAKVDDSFFHRLEESFLVEEDKKHERHPIFGNIVDEVAYHEKYPTIYHLRKKLVDSTDKADLRLIYLALAHMIKFRGHFLIEGDLNPDNSDVDKLFIQLVQTYNQLFEENPINASGVDAKAILSARLSKSRRLENLIAQLPGEKKNGLFGNLIALSLGLTPNFKSNFDLAEDAKLQLSKDTYDDDLDNLLAQIGDQYADLFLAAKNLSDAILLSDILRVNTEITKAPLSASMIKRYDEHHQDLTLLKALVRQQLPEKYKEIFFDQSKNGYAGYIDGGASQEEFYKFIKPILEKMDGTEELLVKLNREDLLRKQRTFDNGSIPHQIHLGELHAILRRQEDFYPFLKDNREKIEKILTFRIPYYVGPLARGNSRFAWMTRKSEETITPWNFEEVVDKGASAQSFIERMTNFDKNLPNEKVLPKHSLLYEYFTVYNELTKVKYVTEGMRKPAFLSGEQKKAIVDLLFKTNRKVTVKQLKEDYFKKIECFDSVEISGVEDRFNASLGTYHDLLKIIKDKDFLDNEENEDILEDIVLTLTLFEDREMIEERLKTYAHLFDDKVMKQLKRRRYTGWGRLSRKLINGIRDKQSGKTILDFLKSDGFANRNFMQLIHDDSLTFKEDIQKAQVSGQGDSLHEHIANLAGSPAIKKGILQTVKVVDELVKVMGRHKPENIVIEMARENQTTQKGQKNSRERMKRIEEGIKELGSQILKEHPVENTQLQNEKLYLYYLQNGRDMYVDQELDINRLSDYDVDHIVPQSFLKDDSIDNKVLTRSDKARGKSDNVPSEEVVKKMKNYWRQLLNAKLITQRKFDNLTKAERGGLSELDKAGFIKRQLVETRQITKHVAQILDSRMNTKYDENDKLIREVKVITLKSKLVSDFRKDFQFYKVREINNYHHAHDAYLNAVVGTALIKKYPKLESEFVYGDYKVYDVRKMIAKSEQEIGKATAKYFFYSNIMNFFKTEITLANGEIRKRPLIETNGETGEIVWDKGRDFATVRKVLSMPQVNIVKKTEVQTGGFSKESILPKRNSDKLIARKKDWDPKKYGGFDSPTVAYSVLVVAKVEKGKSKKLKSVKELLGITIMERSSFEKNPIDFLEAKGYKEVKKDLIIKLPKYSLFELENGRKRMLASAGELQKGNELALPSKYVNFLYLASHYEKLKGSPEDNEQKQLFVEQHKHYLDEIIEQISEFSKRVILADANLDKVLSAYNKHRDKPIREQAENIIHLFTLTNLGAPAAFKYFDTTIDRKRYTSTKEVLDATLIHQSITGLYETRIDLSQLGGDGGGGGEAAAKGSSGGTLNIEDEYRLHETSKEPDVSLGSTWLSDFPQAWAETGGMGLAVRQAPLIIPLKATSTPVSIKQYPMSQEARLGIKPHIQRLLDQGILVPCQSPWNTPLLPVKKPGTNDYRPVQDLREVNKRVEDIHPTVPNPYNLLSGLPPSHQWYTVLDLKDAFFCLRLHPTSQPLFAFEWRDPEMGISGQLTWTRLPQGFKNSPTLFNEALHRDLADFRIQHPDLILLQYVDDLLLAATSELDCQQGTRALLQTLGNLGYRASAKKAQICQKQVKYLGYLLKEGQRWLTEARKETVMGQPTPKTPRQLREFLGKAGFCRLFIPGFAEMAAPLYPLTKPGTLFNWGPDQQKAYQEIKQALLTAPALGLPDLTKPFELFVDEKQGYAKGVLTQKLGPWRRPVAYLSKKLDPVAAGWPPCLRMVAAIAVLTKDAGKLTMGQPLVILAPHAVEALVKQPPDRWLSNARMTHYQALLLDTDRVQFGPVVALNPATLLPLPEEGLQHNCLDILAEAHGTRPDLTDQPLPDADHTWYTDGSSLLQEGQRKAGAAVTTETEVIWAKALPAGTSAQRAELIALTQALKMAEGKKLNVYTDSRYAFATAHIHGEIYRRRGWLTSEGKEIKNKDEILALLKALFLPKRLSIIHCPGHQKGHSAEARGNRMADQAARKAAITETPDTSTLLIENSSPSGGSKRTADGSEFEAGKRTADGSEFEKRTADGSEFESPKKKAKVE

SEQ ID NO: 2678 - protein, 2130 aa, synthetic construct
MPAAKRVKLDGGDKKYSIGLDIGTNSVGWAVITDEYKVPSKKFKVLGNTDRHSIKKNLIGALLFDSGETAEATRLKRTARRRYTRRKNRICYLQEIFSNEMAKVDDSFFHRLEESFLVEEDKKHERHPIFGNIVDEVAYHEKYPTIYHLRKKLVDSTDKADLRLIYLALAHMIKFRGHFLIEGDLNPDNSDVDKLFIQLVQTYNQLFEENPINASGVDAKAILSARLSKSRRLENLIAQLPGEKKNGLFGNLIALSLGLTPNFKSNFDLAEDAKLQLSKDTYDDDLDNLLAQIGDQYADLFLAAKNLSDAILLSDILRVNTEITKAPLSASMIKRYDEHHQDLTLLKALVRQQLPEKYKEIFFDQSKNGYAGYIDGGASQEEFYKFIKPILEKMDGTEELLVKLNREDLLRKQRTFDNGSIPHQIHLGELHAILRRQEDFYPFLKDNREKIEKILTFRIPYYVGPLARGNSRFAWMTRKSEETITPWNFEEVVDKGASAQSFIERMTNFDKNLPNEKVLPKHSLLYEYFTVYNELTKVKYVTEGMRKPAFLSGEQKKAIVDLLFKTNRKVTVKQLKEDYFKKIECFDSVEISGVEDRFNASLGTYHDLLKIIKDKDFLDNEENEDILEDIVLTLTLFEDREMIEERLKTYAHLFDDKVMKQLKRRRYTGWGRLSRKLINGIRDKQSGKTILDFLKSDGFANRNFMQLIHDDSLTFKEDIQKAQVSGQGDSLHEHIANLAGSPAIKKGILQTVKVVDELVKVMGRHKPENIVIEMARENQTTQKGQKNSRERMKRIEEGIKELGSQILKEHPVENTQLQNEKLYLYYLQNGRDMYVDQELDINRLSDYDVDHIVPQSFLKDDSIDNKVLTRSDKARGKSDNVPSEEVVKKMKNYWRQLLNAKLITQRKFDNLTKAERGGLSELDKAGFIKRQLVETRQITKHVAQILDSRMNTKYDENDKLIREVKVITLKSKLVSDFRKDFQFYKVREINNYHHAHDAYLNAVVGTALIKKYPKLESEFVYGDYKVYDVRKMIAKSEQEIGKATAKYFFYSNIMNFFKTEITLANGEIRKRPLIETNGETGEIVWDKGRDFATVRKVLSMPQVNIVKKTEVQTGGFSKESILPKRNSDKLIARKKDWDPKKYGGFDSPTVAYSVLVVAKVEKGKSKKLKSVKELLGITIMERSSFEKNPIDFLEAKGYKEVKKDLIIKLPKYSLFELENGRKRMLASAGELQKGNELALPSKYVNFLYLASHYEKLKGSPEDNEQKQLFVEQHKHYLDEIIEQISEFSKRVILADANLDKVLSAYNKHRDKPIREQAENIIHLFTLTNLGAPAAFKYFDTTIDRKRYTSTKEVLDATLIHQSITGLYETRIDLSQLGGDGGEAAAKEAAAKEAAAKEAAAKEAAAKGGTLNIEDEYRLHETSKEPDVSLGSTWLSDFPQAWAETGGMGLAVRQAPLIIPLKATSTPVSIKQYPMSQEARLGIKPHIQRLLDQGILVPCQSPWNTPLLPVKKPGTNDYRPVQDLREVNKRVEDIHPTVPNPYNLLSGLPPSHQWYTVLDLKDAFFCLRLHPTSQPLFAFEWRDPEMGISGQLTWTRLPQGFKNSPTLFNEALHRDLADFRIQHPDLILLQYVDDLLLAATSELDCQQGTRALLQTLGNLGYRASAKKAQICQKQVKYLGYLLKEGQRWLTEARKETVMGQPTPKTPRQLREFLGKAGFCRLFIPGFAEMAAPLYPLTKPGTLFNWGPDQQKAYQEIKQALLTAPALGLPDLTKPFELFVDEKQGYAKGVLTQKLGPWRRPVAYLSKKLDPVAAGWPPCLRMVAAIAVLTKDAGKLTMGQPLVILAPHAVEALVKQPPDRWLSNARMTHYQALLLDTDRVQFGPVVALNPATLLPLPEEGLQHNCLDILAEAHGTRPDLTDQPLPDADHTWYTDGSSLLQEGQRKAGAAVTTETEVIWAKALPAGTSAQRAELIALTQALKMAEGKKLNVYTDSRYAFATAHIHGEIYRRRGWLTSEGKEIKNKDEILALLKALFLPKRLSIIHCPGHQKGHSAEARGNRMADQAARKAAITETPDTSTLLIENSSPSGGSKRTADGSEFEAGKRTADGSEFEKRTADGSEFESPKKKAKVE

SEQ ID NO: 2679 - protein, 2114 aa, synthetic construct
MPAAKRVKLDGGDKKYSIGLDIGTNSVGWAVITDEYKVPSKKFKVLGNTDRHSIKKNLIGALLFDSGETAEATRLKRTARRRYTRRKNRICYLQEIFSNEMAKVDDSFFHRLEESFLVEEDKKHERHPIFGNIVDEVAYHEKYPTIYHLRKKLVDSTDKADLRLIYLALAHMIKFRGHFLIEGDLNPDNSDVDKLFIQLVQTYNQLFEENPINASGVDAKAILSARLSKSRRLENLIAQLPGEKKNGLFGNLIALSLGLTPNFKSNFDLAEDAKLQLSKDTYDDDLDNLLAQIGDQYADLFLAAKNLSDAILLSDILRVNTEITKAPLSASMIKRYDEHHQDLTLLKALVRQQLPEKYKEIFFDQSKNGYAGYIDGGASQEEFYKFIKPILEKMDGTEELLVKLNREDLLRKQRTFDNGSIPHQIHLGELHAILRRQEDFYPFLKDNREKIEKILTFRIPYYVGPLARGNSRFAWMTRKSEETITPWNFEEVVDKGASAQSFIERMTNFDKNLPNEKVLPKHSLLYEYFTVYNELTKVKYVTEGMRKPAFLSGEQKKAIVDLLFKTNRKVTVKQLKEDYFKKIECFDSVEISGVEDRFNASLGTYHDLLKIIKDKDFLDNEENEDILEDIVLTLTLFEDREMIEERLKTYAHLFDDKVMKQLKRRRYTGWGRLSRKLINGIRDKQSGKTILDFLKSDGFANRNFMQLIHDDSLTFKEDIQKAQVSGQGDSLHEHIANLAGSPAIKKGILQTVKVVDELVKVMGRHKPENIVIEMARENQTTQKGQKNSRERMKRIEEGIKELGSQILKEHPVENTQLQNEKLYLYYLQNGRDMYVDQELDINRLSDYDVDHIVPQSFLKDDSIDNKVLTRSDKARGKSDNVPSEEVVKKMKNYWRQLLNAKLITQRKFDNLTKAERGGLSELDKAGFIKRQLVETRQITKHVAQILDSRMNTKYDENDKLIREVKVITLKSKLVSDFRKDFQFYKVREINNYHHAHDAYLNAVVGTALIKKYPKLESEFVYGDYKVYDVRKMIAKSEQEIGKATAKYFFYSNIMNFFKTEITLANGEIRKRPLIETNGETGEIVWDKGRDFATVRKVLSMPQVNIVKKTEVQTGGFSKESILPKRNSDKLIARKKDWDPKKYGGFDSPTVAYSVLVVAKVEKGKSKKLKSVKELLGITIMERSSFEKNPIDFLEAKGYKEVKKDLIIKLPKYSLFELENGRKRMLASAGELQKGNELALPSKYVNFLYLASHYEKLKGSPEDNEQKQLFVEQHKHYLDEIIEQISEFSKRVILADANLDKVLSAYNKHRDKPIREQAENIIHLFTLTNLGAPAAFKYFDTTIDRKRYTSTKEVLDATLIHQSITGLYETRIDLSQLGGDGGGGSGSSPAPGGTLNIEDEYRLHETSKEPDVSLGSTWLSDFPQAWAETGGMGLAVRQAPLIIPLKATSTPVSIKQYPMSQEARLGIKPHIQRLLDQGILVPCQSPWNTPLLPVKKPGTNDYRPVQDLREVNKRVEDIHPTVPNPYNLLSGLPPSHQWYTVLDLKDAFFCLRLHPTSQPLFAFEWRDPEMGISGQLTWTRLPQGFKNSPTLFNEALHRDLADFRIQHPDLILLQYVDDLLLAATSELDCQQGTRALLQTLGNLGYRASAKKAQICQKQVKYLGYLLKEGQRWLTEARKETVMGQPTPKTPRQLREFLGKAGFCRLFIPGFAEMAAPLYPLTKPGTLFNWGPDQQKAYQEIKQALLTAPALGLPDLTKPFELFVDEKQGYAKGVLTQKLGPWRRPVAYLSKKLDPVAAGWPPCLRMVAAIAVLTKDAGKLTMGQPLVILAPHAVEALVKQPPDRWLSNARMTHYQALLLDTDRVQFGPVVALNPATLLPLPEEGLQHNCLDILAEAHGTRPDLTDQPLPDADHTWYTDGSSLLQEGQRKAGAAVTTETEVIWAKALPAGTSAQRAELIALTQALKMAEGKKLNVYTDSRYAFATAHIHGEIYRRRGWLTSEGKEIKNKDEILALLKALFLPKRLSIIHCPGHQKGHSAEARGNRMADQAARKAAITETPDTSTLLIENSSPSGGSKRTADGSEFEAGKRTADGSEFEKRTADGSEFESPKKKAKVE

SEQ ID NO: 2680 - protein, 2120 aa, synthetic construct
MPAAKRVKLDGGDKKYSIGLDIGTNSVGWAVITDEYKVPSKKFKVLGNTDRHSIKKNLIGALLFDSGETAEATRLKRTARRRYTRRKNRICYLQEIFSNEMAKVDDSFFHRLEESFLVEEDKKHERHPIFGNIVDEVAYHEKYPTIYHLRKKLVDSTDKADLRLIYLALAHMIKFRGHFLIEGDLNPDNSDVDKLFIQLVQTYNQLFEENPINASGVDAKAILSARLSKSRRLENLIAQLPGEKKNGLFGNLIALSLGLTPNFKSNFDLAEDAKLQLSKDTYDDDLDNLLAQIGDQYADLFLAAKNLSDAILLSDILRVNTEITKAPLSASMIKRYDEHHQDLTLLKALVRQQLPEKYKEIFFDQSKNGYAGYIDGGASQEEFYKFIKPILEKMDGTEELLVKLNREDLLRKQRTFDNGSIPHQIHLGELHAILRRQEDFYPFLKDNREKIEKILTFRIPYYVGPLARGNSRFAWMTRKSEETITPWNFEEVVDKGASAQSFIERMTNFDKNLPNEKVLPKHSLLYEYFTVYNELTKVKYVTEGMRKPAFLSGEQKKAIVDLLFKTNRKVTVKQLKEDYFKKIECFDSVEISGVEDRFNASLGTYHDLLKIIKDKDFLDNEENEDILEDIVLTLTLFEDREMIEERLKTYAHLFDDKVMKQLKRRRYTGWGRLSRKLINGIRDKQSGKTILDFLKSDGFANRNFMQLIHDDSLTFKEDIQKAQVSGQGDSLHEHIANLAGSPAIKKGILQTVKVVDELVKVMGRHKPENIVIEMARENQTTQKGQKNSRERMKRIEEGIKELGSQILKEHPVENTQLQNEKLYLYYLQNGRDMYVDQELDINRLSDYDVDHIVPQSFLKDDSIDNKVLTRSDKARGKSDNVPSEEVVKKMKNYWRQLLNAKLITQRKFDNLTKAERGGLSELDKAGFIKRQLVETRQITKHVAQILDSRMNTKYDENDKLIREVKVITLKSKLVSDFRKDFQFYKVREINNYHHAHDAYLNAVVGTALIKKYPKLESEFVYGDYKVYDVRKMIAKSEQEIGKATAKYFFYSNIMNFFKTEITLANGEIRKRPLIETNGETGEIVWDKGRDFATVRKVLSMPQVNIVKKTEVQTGGFSKESILPKRNSDKLIARKKDWDPKKYGGFDSPTVAYSVLVVAKVEKGKSKKLKSVKELLGITIMERSSFEKNPIDFLEAKGYKEVKKDLIIKLPKYSLFELENGRKRMLASAGELQKGNELALPSKYVNFLYLASHYEKLKGSPEDNEQKQLFVEQHKHYLDEIIEQISEFSKRVILADANLDKVLSAYNKHRDKPIREQAENIIHLFTLTNLGAPAAFKYFDTTIDRKRYTSTKEVLDATLIHQSITGLYETRIDLSQLGGDGGGGSGGSGGSGGSGGSGGTLNIEDEYRLHETSKEPDVSLGSTWLSDFPQAWAETGGMGLAVRQAPLIIPLKATSTPVSIKQYPMSQEARLGIKPHIQRLLDQGILVPCQSPWNTPLLPVKKPGTNDYRPVQDLREVNKRVEDIHPTVPNPYNLLSGLPPSHQWYTVLDLKDAFFCLRLHPTSQPLFAFEWRDPEMGISGQLTWTRLPQGFKNSPTLFNEALHRDLADFRIQHPDLILLQYVDDLLLAATSELDCQQGTRALLQTLGNLGYRASAKKAQICQKQVKYLGYLLKEGQRWLTEARKETVMGQPTPKTPRQLREFLGKAGFCRLFIPGFAEMAAPLYPLTKPGTLFNWGPDQQKAYQEIKQALLTAPALGLPDLTKPFELFVDEKQGYAKGVLTQKLGPWRRPVAYLSKKLDPVAAGWPPCLRMVAAIAVLTKDAGKLTMGQPLVILAPHAVEALVKQPPDRWLSNARMTHYQALLLDTDRVQFGPVVALNPATLLPLPEEGLQHNCLDILAEAHGTRPDLTDQPLPDADHTWYTDGSSLLQEGQRKAGAAVTTETEVIWAKALPAGTSAQRAELIALTQALKMAEGKKLNVYTDSRYAFATAHIHGEIYRRRGWLTSEGKEIKNKDEILALLKALFLPKRLSIIHCPGHQKGHSAEARGNRMADQAARKAAITETPDTSTLLIENSSPSGGSKRTADGSEFEAGKRTADGSEFEKRTADGSEFESPKKKAKVE

SEQ ID NO: 2681 - protein, 2116 aa, synthetic construct
MPAAKRVKLDGGDKKYSIGLDIGTNSVGWAVITDEYKVPSKKFKVLGNTDRHSIKKNLIGALLFDSGETAEATRLKRTARRRYTRRKNRICYLQEIFSNEMAKVDDSFFHRLEESFLVEEDKKHERHPIFGNIVDEVAYHEKYPTIYHLRKKLVDSTDKADLRLIYLALAHMIKFRGHFLIEGDLNPDNSDVDKLFIQLVQTYNQLFEENPINASGVDAKAILSARLSKSRRLENLIAQLPGEKKNGLFGNLIALSLGLTPNFKSNFDLAEDAKLQLSKDTYDDDLDNLLAQIGDQYADLFLAAKNLSDAILLSDILRVNTEITKAPLSASMIKRYDEHHQDLTLLKALVRQQLPEKYKEIFFDQSKNGYAGYIDGGASQEEFYKFIKPILEKMDGTEELLVKLNREDLLRKQRTFDNGSIPHQIHLGELHAILRRQEDFYPFLKDNREKIEKILTFRIPYYVGPLARGNSRFAWMTRKSEETITPWNFEEVVDKGASAQSFIERMTNFDKNLPNEKVLPKHSLLYEYFTVYNELTKVKYVTEGMRKPAFLSGEQKKAIVDLLFKTNRKVTVKQLKEDYFKKIECFDSVEISGVEDRFNASLGTYHDLLKIIKDKDFLDNEENEDILEDIVLTLTLFEDREMIEERLKTYAHLFDDKVMKQLKRRRYTGWGRLSRKLINGIRDKQSGKTILDFLKSDGFANRNFMQLIHDDSLTFKEDIQKAQVSGQGDSLHEHIANLAGSPAIKKGILQTVKVVDELVKVMGRHKPENIVIEMARENQTTQKGQKNSRERMKRIEEGIKELGSQILKEHPVENTQLQNEKLYLYYLQNGRDMYVDQELDINRLSDYDVDHIVPQSFLKDDSIDNKVLTRSDKARGKSDNVPSEEVVKKMKNYWRQLLNAKLITQRKFDNLTKAERGGLSELDKAGFIKRQLVETRQITKHVAQILDSRMNTKYDENDKLIREVKVITLKSKLVSDFRKDFQFYKVREINNYHHAHDAYLNAVVGTALIKKYPKLESEFVYGDYKVYDVRKMIAKSEQEIGKATAKYFFYSNIMNFFKTEITLANGEIRKRPLIETNGETGEIVWDKGRDFATVRKVLSMPQVNIVKKTEVQTGGFSKESILPKRNSDKLIARKKDWDPKKYGGFDSPTVAYSVLVVAKVEKGKSKKLKSVKELLGITIMERSSFEKNPIDFLEAKGYKEVKKDLIIKLPKYSLFELENGRKRMLASAGELQKGNELALPSKYVNFLYLASHYEKLKGSPEDNEQKQLFVEQHKHYLDEIIEQISEFSKRVILADANLDKVLSAYNKHRDKPIREQAENIIHLFTLTNLGAPAAFKYFDTTIDRKRYTSTKEVLDATLIHQSITGLYETRIDLSQLGGDGGEAAAKPAPGGGGGTLNIEDEYRLHETSKEPDVSLGSTWLSDFPQAWAETGGMGLAVRQAPLIIPLKATSTPVSIKQYPMSQEARLGIKPHIQRLLDQGILVPCQSPWNTPLLPVKKPGTNDYRPVQDLREVNKRVEDIHPTVPNPYNLLSGLPPSHQWYTVLDLKDAFFCLRLHPTSQPLFAFEWRDPEMGISGQLTWTRLPQGFKNSPTLFNEALHRDLADFRIQHPDLILLQYVDDLLLAATSELDCQQGTRALLQTLGNLGYRASAKKAQICQKQVKYLGYLLKEGQRWLTEARKETVMGQPTPKTPRQLREFLGKAGFCRLFIPGFAEMAAPLYPLTKPGTLFNWGPDQQKAYQEIKQALLTAPALGLPDLTKPFELFVDEKQGYAKGVLTQKLGPWRRPVAYLSKKLDPVAAGWPPCLRMVAAIAVLTKDAGKLTMGQPLVILAPHAVEALVKQPPDRWLSNARMTHYQALLLDTDRVQFGPVVALNPATLLPLPEEGLQHNCLDILAEAHGTRPDLTDQPLPDADHTWYTDGSSLLQEGQRKAGAAVTTETEVIWAKALPAGTSAQRAELIALTQALKMAEGKKLNVYTDSRYAFATAHIHGEIYRRRGWLTSEGKEIKNKDEILALLKALFLPKRLSIIHCPGHQKGHSAEARGNRMADQAARKAAITETPDTSTLLIENSSPSGGSKRTADGSEFEAGKRTADGSEFEKRTADGSEFESPKKKAKVE

SEQ ID NO: 2682 - protein, 2111 aa, synthetic construct
MPAAKRVKLDGGDKKYSIGLDIGTNSVGWAVITDEYKVPSKKFKVLGNTDRHSIKKNLIGALLFDSGETAEATRLKRTARRRYTRRKNRICYLQEIFSNEMAKVDDSFFHRLEESFLVEEDKKHERHPIFGNIVDEVAYHEKYPTIYHLRKKLVDSTDKADLRLIYLALAHMIKFRGHFLIEGDLNPDNSDVDKLFIQLVQTYNQLFEENPINASGVDAKAILSARLSKSRRLENLIAQLPGEKKNGLFGNLIALSLGLTPNFKSNFDLAEDAKLQLSKDTYDDDLDNLLAQIGDQYADLFLAAKNLSDAILLSDILRVNTEITKAPLSASMIKRYDEHHQDLTLLKALVRQQLPEKYKEIFFDQSKNGYAGYIDGGASQEEFYKFIKPILEKMDGTEELLVKLNREDLLRKQRTFDNGSIPHQIHLGELHAILRRQEDFYPFLKDNREKIEKILTFRIPYYVGPLARGNSRFAWMTRKSEETITPWNFEEVVDKGASAQSFIERMTNFDKNLPNEKVLPKHSLLYEYFTVYNELTKVKYVTEGMRKPAFLSGEQKKAIVDLLFKTNRKVTVKQLKEDYFKKIECFDSVEISGVEDRFNASLGTYHDLLKIIKDKDFLDNEENEDILEDIVLTLTLFEDREMIEERLKTYAHLFDDKVMKQLKRRRYTGWGRLSRKLINGIRDKQSGKTILDFLKSDGFANRNFMQLIHDDSLTFKEDIQKAQVSGQGDSLHEHIANLAGSPAIKKGILQTVKVVDELVKVMGRHKPENIVIEMARENQTTQKGQKNSRERMKRIEEGIKELGSQILKEHPVENTQLQNEKLYLYYLQNGRDMYVDQELDINRLSDYDVDHIVPQSFLKDDSIDNKVLTRSDKARGKSDNVPSEEVVKKMKNYWRQLLNAKLITQRKFDNLTKAERGGLSELDKAGFIKRQLVETRQITKHVAQILDSRMNTKYDENDKLIREVKVITLKSKLVSDFRKDFQFYKVREINNYHHAHDAYLNAVVGTALIKKYPKLESEFVYGDYKVYDVRKMIAKSEQEIGKATAKYFFYSNIMNFFKTEITLANGEIRKRPLIETNGETGEIVWDKGRDFATVRKVLSMPQVNIVKKTEVQTGGFSKESILPKRNSDKLIARKKDWDPKKYGGFDSPTVAYSVLVVAKVEKGKSKKLKSVKELLGITIMERSSFEKNPIDFLEAKGYKEVKKDLIIKLPKYSLFELENGRKRMLASAGELQKGNELALPSKYVNFLYLASHYEKLKGSPEDNEQKQLFVEQHKHYLDEIIEQISEFSKRVILADANLDKVLSAYNKHRDKPIREQAENIIHLFTLTNLGAPAAFKYFDTTIDRKRYTSTKEVLDATLIHQSITGLYETRIDLSQLGGDGGGSSGGSGGTLNIEDEYRLHETSKEPDVSLGSTWLSDFPQAWAETGGMGLAVRQAPLIIPLKATSTPVSIKQYPMSQEARLGIKPHIQRLLDQGILVPCQSPWNTPLLPVKKPGTNDYRPVQDLREVNKRVEDIHPTVPNPYNLLSGLPPSHQWYTVLDLKDAFFCLRLHPTSQPLFAFEWRDPEMGISGQLTWTRLPQGFKNSPTLFNEALHRDLADFRIQHPDLILLQYVDDLLLAATSELDCQQGTRALLQTLGNLGYRASAKKAQICQKQVKYLGYLLKEGQRWLTEARKETVMGQPTPKTPRQLREFLGKAGFCRLFIPGFAEMAAPLYPLTKPGTLFNWGPDQQKAYQEIKQALLTAPALGLPDLTKPFELFVDEKQGYAKGVLTQKLGPWRRPVAYLSKKLDPVAAGWPPCLRMVAAIAVLTKDAGKLTMGQPLVILAPHAVEALVKQPPDRWLSNARMTHYQALLLDTDRVQFGPVVALNPATLLPLPEEGLQHNCLDILAEAHGTRPDLTDQPLPDADHTWYTDGSSLLQEGQRKAGAAVTTETEVIWAKALPAGTSAQRAELIALTQALKMAEGKKLNVYTDSRYAFATAHIHGEIYRRRGWLTSEGKEIKNKDEILALLKALFLPKRLSIIHCPGHQKGHSAEARGNRMADQAARKAAITETPDTSTLLIENSSPSGGSKRTADGSEFEAGKRTADGSEFEKRTADGSEFESPKKKAKVE

SEQ ID NO: 2683 - protein, 2116 aa, synthetic construct
MPAAKRVKLDGGDKKYSIGLDIGTNSVGWAVITDEYKVPSKKFKVLGNTDRHSIKKNLIGALLFDSGETAEATRLKRTARRRYTRRKNRICYLQEIFSNEMAKVDDSFFHRLEESFLVEEDKKHERHPIFGNIVDEVAYHEKYPTIYHLRKKLVDSTDKADLRLIYLALAHMIKFRGHFLIEGDLNPDNSDVDKLFIQLVQTYNQLFEENPINASGVDAKAILSARLSKSRRLENLIAQLPGEKKNGLFGNLIALSLGLTPNFKSNFDLAEDAKLQLSKDTYDDDLDNLLAQIGDQYADLFLAAKNLSDAILLSDILRVNTEITKAPLSASMIKRYDEHHQDLTLLKALVRQQLPEKYKEIFFDQSKNGYAGYIDGGASQEEFYKFIKPILEKMDGTEELLVKLNREDLLRKQRTFDNGSIPHQIHLGELHAILRRQEDFYPFLKDNREKIEKILTFRIPYYVGPLARGNSRFAWMTRKSEETITPWNFEEVVDKGASAQSFIERMTNFDKNLPNEKVLPKHSLLYEYFTVYNELTKVKYVTEGMRKPAFLSGEQKKAIVDLLFKTNRKVTVKQLKEDYFKKIECFDSVEISGVEDRFNASLGTYHDLLKIIKDKDFLDNEENEDILEDIVLTLTLFEDREMIEERLKTYAHLFDDKVMKQLKRRRYTGWGRLSRKLINGIRDKQSGKTILDFLKSDGFANRNFMQLIHDDSLTFKEDIQKAQVSGQGDSLHEHIANLAGSPAIKKGILQTVKVVDELVKVMGRHKPENIVIEMARENQTTQKGQKNSRERMKRIEEGIKELGSQILKEHPVENTQLQNEKLYLYYLQNGRDMYVDQELDINRLSDYDVDHIVPQSFLKDDSIDNKVLTRSDKARGKSDNVPSEEVVKKMKNYWRQLLNAKLITQRKFDNLTKAERGGLSELDKAGFIKRQLVETRQITKHVAQILDSRMNTKYDENDKLIREVKVITLKSKLVSDFRKDFQFYKVREINNYHHAHDAYLNAVVGTALIKKYPKLESEFVYGDYKVYDVRKMIAKSEQEIGKATAKYFFYSNIMNFFKTEITLANGEIRKRPLIETNGETGEIVWDKGRDFATVRKVLSMPQVNIVKKTEVQTGGFSKESILPKRNSDKLIARKKDWDPKKYGGFDSPTVAYSVLVVAKVEKGKSKKLKSVKELLGITIMERSSFEKNPIDFLEAKGYKEVKKDLIIKLPKYSLFELENGRKRMLASAGELQKGNELALPSKYVNFLYLASHYEKLKGSPEDNEQKQLFVEQHKHYLDEIIEQISEFSKRVILADANLDKVLSAYNKHRDKPIREQAENIIHLFTLTNLGAPAAFKYFDTTIDRKRYTSTKEVLDATLIHQSITGLYETRIDLSQLGGDGGEAAAKGSSGGSGGTLNIEDEYRLHETSKEPDVSLGSTWLSDFPQAWAETGGMGLAVRQAPLIIPLKATSTPVSIKQYPMSQEARLGIKPHIQRLLDQGILVPCQSPWNTPLLPVKKPGTNDYRPVQDLREVNKRVEDIHPTVPNPYNLLSGLPPSHQWYTVLDLKDAFFCLRLHPTSQPLFAFEWRDPEMGISGQLTWTRLPQGFKNSPTLFNEALHRDLADFRIQHPDLILLQYVDDLLLAATSELDCQQGTRALLQTLGNLGYRASAKKAQICQKQVKYLGYLLKEGQRWLTEARKETVMGQPTPKTPRQLREFLGKAGFCRLFIPGFAEMAAPLYPLTKPGTLFNWGPDQQKAYQEIKQALLTAPALGLPDLTKPFELFVDEKQGYAKGVLTQKLGPWRRPVAYLSKKLDPVAAGWPPCLRMVAAIAVLTKDAGKLTMGQPLVILAPHAVEALVKQPPDRWLSNARMTHYQALLLDTDRVQFGPVVALNPATLLPLPEEGLQHNCLDILAEAHGTRPDLTDQPLPDADHTWYTDGSSLLQEGQRKAGAAVTTETEVIWAKALPAGTSAQRAELIALTQALKMAEGKKLNVYTDSRYAFATAHIHGEIYRRRGWLTSEGKEIKNKDEILALLKALFLPKRLSIIHCPGHQKGHSAEARGNRMADQAARKAAITETPDTSTLLIENSSPSGGSKRTADGSEFEAGKRTADGSEFEKRTADGSEFESPKKKAKVE

SEQ ID NO: 2684 - protein, 2114 aa, synthetic construct
MPAAKRVKLDGGDKKYSIGLDIGTNSVGWAVITDEYKVPSKKFKVLGNTDRHSIKKNLIGALLFDSGETAEATRLKRTARRRYTRRKNRICYLQEIFSNEMAKVDDSFFHRLEESFLVEEDKKHERHPIFGNIVDEVAYHEKYPTIYHLRKKLVDSTDKADLRLIYLALAHMIKFRGHFLIEGDLNPDNSDVDKLFIQLVQTYNQLFEENPINASGVDAKAILSARLSKSRRLENLIAQLPGEKKNGLFGNLIALSLGLTPNFKSNFDLAEDAKLQLSKDTYDDDLDNLLAQIGDQYADLFLAAKNLSDAILLSDILRVNTEITKAPLSASMIKRYDEHHQDLTLLKALVRQQLPEKYKEIFFDQSKNGYAGYIDGGASQEEFYKFIKPILEKMDGTEELLVKLNREDLLRKQRTFDNGSIPHQIHLGELHAILRRQEDFYPFLKDNREKIEKILTFRIPYYVGPLARGNSRFAWMTRKSEETITPWNFEEVVDKGASAQSFIERMTNFDKNLPNEKVLPKHSLLYEYFTVYNELTKVKYVTEGMRKPAFLSGEQKKAIVDLLFKTNRKVTVKQLKEDYFKKIECFDSVEISGVEDRFNASLGTYHDLLKIIKDKDFLDNEENEDILEDIVLTLTLFEDREMIEERLKTYAHLFDDKVMKQLKRRRYTGWGRLSRKLINGIRDKQSGKTILDFLKSDGFANRNFMQLIHDDSLTFKEDIQKAQVSGQGDSLHEHIANLAGSPAIKKGILQTVKVVDELVKVMGRHKPENIVIEMARENQTTQKGQKNSRERMKRIEEGIKELGSQILKEHPVENTQLQNEKLYLYYLQNGRDMYVDQELDINRLSDYDVDHIVPQSFLKDDSIDNKVLTRSDKARGKSDNVPSEEVVKKMKNYWRQLLNAKLITQRKFDNLTKAERGGLSELDKAGFIKRQLVETRQITKHVAQILDSRMNTKYDENDKLIREVKVITLKSKLVSDFRKDFQFYKVREINNYHHAHDAYLNAVVGTALIKKYPKLESEFVYGDYKVYDVRKMIAKSEQEIGKATAKYFFYSNIMNFFKTEITLANGEIRKRPLIETNGETGEIVWDKGRDFATVRKVLSMPQVNIVKKTEVQTGGFSKESILPKRNSDKLIARKKDWDPKKYGGFDSPTVAYSVLVVAKVEKGKSKKLKSVKELLGITIMERSSFEKNPIDFLEAKGYKEVKKDLIIKLPKYSLFELENGRKRMLASAGELQKGNELALPSKYVNFLYLASHYEKLKGSPEDNEQKQLFVEQHKHYLDEIIEQISEFSKRVILADANLDKVLSAYNKHRDKPIREQAENIIHLFTLTNLGAPAAFKYFDTTIDRKRYTSTKEVLDATLIHQSITGLYETRIDLSQLGGDGGGGSPAPGSSGGTLNIEDEYRLHETSKEPDVSLGSTWLSDFPQAWAETGGMGLAVRQAPLIIPLKATSTPVSIKQYPMSQEARLGIKPHIQRLLDQGILVPCQSPWNTPLLPVKKPGTNDYRPVQDLREVNKRVEDIHPTVPNPYNLLSGLPPSHQWYTVLDLKDAFFCLRLHPTSQPLFAFEWRDPEMGISGQLTWTRLPQGFKNSPTLFNEALHRDLADFRIQHPDLILLQYVDDLLLAATSELDCQQGTRALLQTLGNLGYRASAKKAQICQKQVKYLGYLLKEGQRWLTEARKETVMGQPTPKTPRQLREFLGKAGFCRLFIPGFAEMAAPLYPLTKPGTLFNWGPDQQKAYQEIKQALLTAPALGLPDLTKPFELFVDEKQGYAKGVLTQKLGPWRRPVAYLSKKLDPVAAGWPPCLRMVAAIAVLTKDAGKLTMGQPLVILAPHAVEALVKQPPDRWLSNARMTHYQALLLDTDRVQFGPVVALNPATLLPLPEEGLQHNCLDILAEAHGTRPDLTDQPLPDADHTWYTDGSSLLQEGQRKAGAAVTTETEVIWAKALPAGTSAQRAELIALTQALKMAEGKKLNVYTDSRYAFATAHIHGEIYRRRGWLTSEGKEIKNKDEILALLKALFLPKRLSIIHCPGHQKGHSAEARGNRMADQAARKAAITETPDTSTLLIENSSPSGGSKRTADGSEFEAGKRTADGSEFEKRTADGSEFESPKKKAKVE

SEQ ID NO: 2685 - protein, 2114 aa, synthetic construct
MPAAKRVKLDGGDKKYSIGLDIGTNSVGWAVITDEYKVPSKKFKVLGNTDRHSIKKNLIGALLFDSGETAEATRLKRTARRRYTRRKNRICYLQEIFSNEMAKVDDSFFHRLEESFLVEEDKKHERHPIFGNIVDEVAYHEKYPTIYHLRKKLVDSTDKADLRLIYLALAHMIKFRGHFLIEGDLNPDNSDVDKLFIQLVQTYNQLFEENPINASGVDAKAILSARLSKSRRLENLIAQLPGEKKNGLFGNLIALSLGLTPNFKSNFDLAEDAKLQLSKDTYDDDLDNLLAQIGDQYADLFLAAKNLSDAILLSDILRVNTEITKAPLSASMIKRYDEHHQDLTLLKALVRQQLPEKYKEIFFDQSKNGYAGYIDGGASQEEFYKFIKPILEKMDGTEELLVKLNREDLLRKQRTFDNGSIPHQIHLGELHAILRRQEDFYPFLKDNREKIEKILTFRIPYYVGPLARGNSRFAWMTRKSEETITPWNFEEVVDKGASAQSFIERMTNFDKNLPNEKVLPKHSLLYEYFTVYNELTKVKYVTEGMRKPAFLSGEQKKAIVDLLFKTNRKVTVKQLKEDYFKKIECFDSVEISGVEDRFNASLGTYHDLLKIIKDKDFLDNEENEDILEDIVLTLTLFEDREMIEERLKTYAHLFDDKVMKQLKRRRYTGWGRLSRKLINGIRDKQSGKTILDFLKSDGFANRNFMQLIHDDSLTFKEDIQKAQVSGQGDSLHEHIANLAGSPAIKKGILQTVKVVDELVKVMGRHKPENIVIEMARENQTTQKGQKNSRERMKRIEEGIKELGSQILKEHPVENTQLQNEKLYLYYLQNGRDMYVDQELDINRLSDYDVDHIVPQSFLKDDSIDNKVLTRSDKARGKSDNVPSEEVVKKMKNYWRQLLNAKLITQRKFDNLTKAERGGLSELDKAGFIKRQLVETRQITKHVAQILDSRMNTKYDENDKLIREVKVITLKSKLVSDFRKDFQFYKVREINNYHHAHDAYLNAVVGTALIKKYPKLESEFVYGDYKVYDVRKMIAKSEQEIGKATAKYFFYSNIMNFFKTEITLANGEIRKRPLIETNGETGEIVWDKGRDFATVRKVLSMPQVNIVKKTEVQTGGFSKESILPKRNSDKLIARKKDWDPKKYGGFDSPTVAYSVLVVAKVEKGKSKKLKSVKELLGITIMERSSFEKNPIDFLEAKGYKEVKKDLIIKLPKYSLFELENGRKRMLASAGELQKGNELALPSKYVNFLYLASHYEKLKGSPEDNEQKQLFVEQHKHYLDEIIEQISEFSKRVILADANLDKVLSAYNKHRDKPIREQAENIIHLFTLTNLGAPAAFKYFDTTIDRKRYTSTKEVLDATLIHQSITGLYETRIDLSQLGGDGGPAPGSSGGSGGTLNIEDEYRLHETSKEPDVSLGSTWLSDFPQAWAETGGMGLAVRQAPLIIPLKATSTPVSIKQYPMSQEARLGIKPHIQRLLDQGILVPCQSPWNTPLLPVKKPGTNDYRPVQDLREVNKRVEDIHPTVPNPYNLLSGLPPSHQWYTVLDLKDAFFCLRLHPTSQPLFAFEWRDPEMGISGQLTWTRLPQGFKNSPTLFNEALHRDLADFRIQHPDLILLQYVDDLLLAATSELDCQQGTRALLQTLGNLGYRASAKKAQICQKQVKYLGYLLKEGQRWLTEARKETVMGQPTPKTPRQLREFLGKAGFCRLFIPGFAEMAAPLYPLTKPGTLFNWGPDQQKAYQEIKQALLTAPALGLPDLTKPFELFVDEKQGYAKGVLTQKLGPWRRPVAYLSKKLDPVAAGWPPCLRMVAAIAVLTKDAGKLTMGQPLVILAPHAVEALVKQPPDRWLSNARMTHYQALLLDTDRVQFGPVVALNPATLLPLPEEGLQHNCLDILAEAHGTRPDLTDQPLPDADHTWYTDGSSLLQEGQRKAGAAVTTETEVIWAKALPAGTSAQRAELIALTQALKMAEGKKLNVYTDSRYAFATAHIHGEIYRRRGWLTSEGKEIKNKDEILALLKALFLPKRLSIIHCPGHQKGHSAEARGNRMADQAARKAAITETPDTSTLLIENSSPSGGSKRTADGSEFEAGKRTADGSEFEKRTADGSEFESPKKKAKVE

SEQ ID NO: 2686 - protein, 2116 aa, synthetic construct
MPAAKRVKLDGGDKKYSIGLDIGTNSVGWAVITDEYKVPSKKFKVLGNTDRHSIKKNLIGALLFDSGETAEATRLKRTARRRYTRRKNRICYLQEIFSNEMAKVDDSFFHRLEESFLVEEDKKHERHPIFGNIVDEVAYHEKYPTIYHLRKKLVDSTDKADLRLIYLALAHMIKFRGHFLIEGDLNPDNSDVDKLFIQLVQTYNQLFEENPINASGVDAKAILSARLSKSRRLENLIAQLPGEKKNGLFGNLIALSLGLTPNFKSNFDLAEDAKLQLSKDTYDDDLDNLLAQIGDQYADLFLAAKNLSDAILLSDILRVNTEITKAPLSASMIKRYDEHHQDLTLLKALVRQQLPEKYKEIFFDQSKNGYAGYIDGGASQEEFYKFIKPILEKMDGTEELLVKLNREDLLRKQRTFDNGSIPHQIHLGELHAILRRQEDFYPFLKDNREKIEKILTFRIPYYVGPLARGNSRFAWMTRKSEETITPWNFEEVVDKGASAQSFIERMTNFDKNLPNEKVLPKHSLLYEYFTVYNELTKVKYVTEGMRKPAFLSGEQKKAIVDLLFKTNRKVTVKQLKEDYFKKIECFDSVEISGVEDRFNASLGTYHDLLKIIKDKDFLDNEENEDILEDIVLTLTLFEDREMIEERLKTYAHLFDDKVMKQLKRRRYTGWGRLSRKLINGIRDKQSGKTILDFLKSDGFANRNFMQLIHDDSLTFKEDIQKAQVSGQGDSLHEHIANLAGSPAIKKGILQTVKVVDELVKVMGRHKPENIVIEMARENQTTQKGQKNSRERMKRIEEGIKELGSQILKEHPVENTQLQNEKLYLYYLQNGRDMYVDQELDINRLSDYDVDHIVPQSFLKDDSIDNKVLTRSDKARGKSDNVPSEEVVKKMKNYWRQLLNAKLITQRKFDNLTKAERGGLSELDKAGFIKRQLVETRQITKHVAQILDSRMNTKYDENDKLIREVKVITLKSKLVSDFRKDFQFYKVREINNYHHAHDAYLNAVVGTALIKKYPKLESEFVYGDYKVYDVRKMIAKSEQEIGKATAKYFFYSNIMNFFKTEITLANGEIRKRPLIETNGETGEIVWDKGRDFATVRKVLSMPQVNIVKKTEVQTGGFSKESILPKRNSDKLIARKKDWDPKKYGGFDSPTVAYSVLVVAKVEKGKSKKLKSVKELLGITIMERSSFEKNPIDFLEAKGYKEVKKDLIIKLPKYSLFELENGRKRMLASAGELQKGNELALPSKYVNFLYLASHYEKLKGSPEDNEQKQLFVEQHKHYLDEIIEQISEFSKRVILADANLDKVLSAYNKHRDKPIREQAENIIHLFTLTNLGAPAAFKYFDTTIDRKRYTSTKEVLDATLIHQSITGLYETRIDLSQLGGDGGEAAAKGSSGGGGGTLNIEDEYRLHETSKEPDVSLGSTWLSDFPQAWAETGGMGLAVRQAPLIIPLKATSTPVSIKQYPMSQEARLGIKPHIQRLLDQGILVPCQSPWNTPLLPVKKPGTNDYRPVQDLREVNKRVEDIHPTVPNPYNLLSGLPPSHQWYTVLDLKDAFFCLRLHPTSQPLFAFEWRDPEMGISGQLTWTRLPQGFKNSPTLFNEALHRDLADFRIQHPDLILLQYVDDLLLAATSELDCQQGTRALLQTLGNLGYRASAKKAQICQKQVKYLGYLLKEGQRWLTEARKETVMGQPTPKTPRQLREFLGKAGFCRLFIPGFAEMAAPLYPLTKPGTLFNWGPDQQKAYQEIKQALLTAPALGLPDLTKPFELFVDEKQGYAKGVLTQKLGPWRRPVAYLSKKLDPVAAGWPPCLRMVAAIAVLTKDAGKLTMGQPLVILAPHAVEALVKQPPDRWLSNARMTHYQALLLDTDRVQFGPVVALNPATLLPLPEEGLQHNCLDILAEAHGTRPDLTDQPLPDADHTWYTDGSSLLQEGQRKAGAAVTTETEVIWAKALPAGTSAQRAELIALTQALKMAEGKKLNVYTDSRYAFATAHIHGEIYRRRGWLTSEGKEIKNKDEILALLKALFLPKRLSIIHCPGHQKGHSAEARGNRMADQAARKAAITETPDTSTLLIENSSPSGGSKRTADGSEFEAGKRTADGSEFEKRTADGSEFESPKKKAKVE

SEQ ID NO: 2687 - protein, 2117 aa, synthetic construct
MPAAKRVKLDGGDKKYSIGLDIGTNSVGWAVITDEYKVPSKKFKVLGNTDRHSIKKNLIGALLFDSGETAEATRLKRTARRRYTRRKNRICYLQEIFSNEMAKVDDSFFHRLEESFLVEEDKKHERHPIFGNIVDEVAYHEKYPTIYHLRKKLVDSTDKADLRLIYLALAHMIKFRGHFLIEGDLNPDNSDVDKLFIQLVQTYNQLFEENPINASGVDAKAILSARLSKSRRLENLIAQLPGEKKNGLFGNLIALSLGLTPNFKSNFDLAEDAKLQLSKDTYDDDLDNLLAQIGDQYADLFLAAKNLSDAILLSDILRVNTEITKAPLSASMIKRYDEHHQDLTLLKALVRQQLPEKYKEIFFDQSKNGYAGYIDGGASQEEFYKFIKPILEKMDGTEELLVKLNREDLLRKQRTFDNGSIPHQIHLGELHAILRRQEDFYPFLKDNREKIEKILTFRIPYYVGPLARGNSRFAWMTRKSEETITPWNFEEVVDKGASAQSFIERMTNFDKNLPNEKVLPKHSLLYEYFTVYNELTKVKYVTEGMRKPAFLSGEQKKAIVDLLFKTNRKVTVKQLKEDYFKKIECFDSVEISGVEDRFNASLGTYHDLLKIIKDKDFLDNEENEDILEDIVLTLTLFEDREMIEERLKTYAHLFDDKVMKQLKRRRYTGWGRLSRKLINGIRDKQSGKTILDFLKSDGFANRNFMQLIHDDSLTFKEDIQKAQVSGQGDSLHEHIANLAGSPAIKKGILQTVKVVDELVKVMGRHKPENIVIEMARENQTTQKGQKNSRERMKRIEEGIKELGSQILKEHPVENTQLQNEKLYLYYLQNGRDMYVDQELDINRLSDYDVDHIVPQSFLKDDSIDNKVLTRSDKARGKSDNVPSEEVVKKMKNYWRQLLNAKLITQRKFDNLTKAERGGLSELDKAGFIKRQLVETRQITKHVAQILDSRMNTKYDENDKLIREVKVITLKSKLVSDFRKDFQFYKVREINNYHHAHDAYLNAVVGTALIKKYPKLESEFVYGDYKVYDVRKMIAKSEQEIGKATAKYFFYSNIMNFFKTEITLANGEIRKRPLIETNGETGEIVWDKGRDFATVRKVLSMPQVNIVKKTEVQTGGFSKESILPKRNSDKLIARKKDWDPKKYGGFDSPTVAYSVLVVAKVEKGKSKKLKSVKELLGITIMERSSFEKNPIDFLEAKGYKEVKKDLIIKLPKYSLFELENGRKRMLASAGELQKGNELALPSKYVNFLYLASHYEKLKGSPEDNEQKQLFVEQHKHYLDEIIEQISEFSKRVILADANLDKVLSAYNKHRDKPIREQAENIIHLFTLTNLGAPAAFKYFDTTIDRKRYTSTKEVLDATLIHQSITGLYETRIDLSQLGGDGGGGSGGSGGSGGSGGTLNIEDEYRLHETSKEPDVSLGSTWLSDFPQAWAETGGMGLAVRQAPLIIPLKATSTPVSIKQYPMSQEARLGIKPHIQRLLDQGILVPCQSPWNTPLLPVKKPGTNDYRPVQDLREVNKRVEDIHPTVPNPYNLLSGLPPSHQWYTVLDLKDAFFCLRLHPTSQPLFAFEWRDPEMGISGQLTWTRLPQGFKNSPTLFNEALHRDLADFRIQHPDLILLQYVDDLLLAATSELDCQQGTRALLQTLGNLGYRASAKKAQICQKQVKYLGYLLKEGQRWLTEARKETVMGQPTPKTPRQLREFLGKAGFCRLFIPGFAEMAAPLYPLTKPGTLFNWGPDQQKAYQEIKQALLTAPALGLPDLTKPFELFVDEKQGYAKGVLTQKLGPWRRPVAYLSKKLDPVAAGWPPCLRMVAAIAVLTKDAGKLTMGQPLVILAPHAVEALVKQPPDRWLSNARMTHYQALLLDTDRVQFGPVVALNPATLLPLPEEGLQHNCLDILAEAHGTRPDLTDQPLPDADHTWYTDGSSLLQEGQRKAGAAVTTETEVIWAKALPAGTSAQRAELIALTQALKMAEGKKLNVYTDSRYAFATAHIHGEIYRRRGWLTSEGKEIKNKDEILALLKALFLPKRLSIIHCPGHQKGHSAEARGNRMADQAARKAAITETPDTSTLLIENSSPSGGSKRTADGSEFEAGKRTADGSEFEKRTADGSEFESPKKKAKVE

SEQ ID NO: 2688 - protein, 2116 aa, synthetic construct
MPAAKRVKLDGGDKKYSIGLDIGTNSVGWAVITDEYKVPSKKFKVLGNTDRHSIKKNLIGALLFDSGETAEATRLKRTARRRYTRRKNRICYLQEIFSNEMAKVDDSFFHRLEESFLVEEDKKHERHPIFGNIVDEVAYHEKYPTIYHLRKKLVDSTDKADLRLIYLALAHMIKFRGHFLIEGDLNPDNSDVDKLFIQLVQTYNQLFEENPINASGVDAKAILSARLSKSRRLENLIAQLPGEKKNGLFGNLIALSLGLTPNFKSNFDLAEDAKLQLSKDTYDDDLDNLLAQIGDQYADLFLAAKNLSDAILLSDILRVNTEITKAPLSASMIKRYDEHHQDLTLLKALVRQQLPEKYKEIFFDQSKNGYAGYIDGGASQEEFYKFIKPILEKMDGTEELLVKLNREDLLRKQRTFDNGSIPHQIHLGELHAILRRQEDFYPFLKDNREKIEKILTFRIPYYVGPLARGNSRFAWMTRKSEETITPWNFEEVVDKGASAQSFIERMTNFDKNLPNEKVLPKHSLLYEYFTVYNELTKVKYVTEGMRKPAFLSGEQKKAIVDLLFKTNRKVTVKQLKEDYFKKIECFDSVEISGVEDRFNASLGTYHDLLKIIKDKDFLDNEENEDILEDIVLTLTLFEDREMIEERLKTYAHLFDDKVMKQLKRRRYTGWGRLSRKLINGIRDKQSGKTILDFLKSDGFANRNFMQLIHDDSLTFKEDIQKAQVSGQGDSLHEHIANLAGSPAIKKGILQTVKVVDELVKVMGRHKPENIVIEMARENQTTQKGQKNSRERMKRIEEGIKELGSQILKEHPVENTQLQNEKLYLYYLQNGRDMYVDQELDINRLSDYDVDHIVPQSFLKDDSIDNKVLTRSDKARGKSDNVPSEEVVKKMKNYWRQLLNAKLITQRKFDNLTKAERGGLSELDKAGFIKRQLVETRQITKHVAQILDSRMNTKYDENDKLIREVKVITLKSKLVSDFRKDFQFYKVREINNYHHAHDAYLNAVVGTALIKKYPKLESEFVYGDYKVYDVRKMIAKSEQEIGKATAKYFFYSNIMNFFKTEITLANGEIRKRPLIETNGETGEIVWDKGRDFATVRKVLSMPQVNIVKKTEVQTGGFSKESILPKRNSDKLIARKKDWDPKKYGGFDSPTVAYSVLVVAKVEKGKSKKLKSVKELLGITIMERSSFEKNPIDFLEAKGYKEVKKDLIIKLPKYSLFELENGRKRMLASAGELQKGNELALPSKYVNFLYLASHYEKLKGSPEDNEQKQLFVEQHKHYLDEIIEQISEFSKRVILADANLDKVLSAYNKHRDKPIREQAENIIHLFTLTNLGAPAAFKYFDTTIDRKRYTSTKEVLDATLIHQSITGLYETRIDLSQLGGDGGGGGGSSEAAAKGGTLNIEDEYRLHETSKEPDVSLGSTWLSDFPQAWAETGGMGLAVRQAPLIIPLKATSTPVSIKQYPMSQEARLGIKPHIQRLLDQGILVPCQSPWNTPLLPVKKPGTNDYRPVQDLREVNKRVEDIHPTVPNPYNLLSGLPPSHQWYTVLDLKDAFFCLRLHPTSQPLFAFEWRDPEMGISGQLTWTRLPQGFKNSPTLFNEALHRDLADFRIQHPDLILLQYVDDLLLAATSELDCQQGTRALLQTLGNLGYRASAKKAQICQKQVKYLGYLLKEGQRWLTEARKETVMGQPTPKTPRQLREFLGKAGFCRLFIPGFAEMAAPLYPLTKPGTLFNWGPDQQKAYQEIKQALLTAPALGLPDLTKPFELFVDEKQGYAKGVLTQKLGPWRRPVAYLSKKLDPVAAGWPPCLRMVAAIAVLTKDAGKLTMGQPLVILAPHAVEALVKQPPDRWLSNARMTHYQALLLDTDRVQFGPVVALNPATLLPLPEEGLQHNCLDILAEAHGTRPDLTDQPLPDADHTWYTDGSSLLQEGQRKAGAAVTTETEVIWAKALPAGTSAQRAELIALTQALKMAEGKKLNVYTDSRYAFATAHIHGEIYRRRGWLTSEGKEIKNKDEILALLKALFLPKRLSIIHCPGHQKGHSAEARGNRMADQAARKAAITETPDTSTLLIENSSPSGGSKRTADGSEFEAGKRTADGSEFEKRTADGSEFESPKKKAKVE

SEQ ID NO: 2689 - protein, 2114 aa, synthetic construct
MPAAKRVKLDGGDKKYSIGLDIGTNSVGWAVITDEYKVPSKKFKVLGNTDRHSIKKNLIGALLFDSGETAEATRLKRTARRRYTRRKNRICYLQEIFSNEMAKVDDSFFHRLEESFLVEEDKKHERHPIFGNIVDEVAYHEKYPTIYHLRKKLVDSTDKADLRLIYLALAHMIKFRGHFLIEGDLNPDNSDVDKLFIQLVQTYNQLFEENPINASGVDAKAILSARLSKSRRLENLIAQLPGEKKNGLFGNLIALSLGLTPNFKSNFDLAEDAKLQLSKDTYDDDLDNLLAQIGDQYADLFLAAKNLSDAILLSDILRVNTEITKAPLSASMIKRYDEHHQDLTLLKALVRQQLPEKYKEIFFDQSKNGYAGYIDGGASQEEFYKFIKPILEKMDGTEELLVKLNREDLLRKQRTFDNGSIPHQIHLGELHAILRRQEDFYPFLKDNREKIEKILTFRIPYYVGPLARGNSRFAWMTRKSEETITPWNFEEVVDKGASAQSFIERMTNFDKNLPNEKVLPKHSLLYEYFTVYNELTKVKYVTEGMRKPAFLSGEQKKAIVDLLFKTNRKVTVKQLKEDYFKKIECFDSVEISGVEDRFNASLGTYHDLLKIIKDKDFLDNEENEDILEDIVLTLTLFEDREMIEERLKTYAHLFDDKVMKQLKRRRYTGWGRLSRKLINGIRDKQSGKTILDFLKSDGFANRNFMQLIHDDSLTFKEDIQKAQVSGQGDSLHEHIANLAGSPAIKKGILQTVKVVDELVKVMGRHKPENIVIEMARENQTTQKGQKNSRERMKRIEEGIKELGSQILKEHPVENTQLQNEKLYLYYLQNGRDMYVDQELDINRLSDYDVDHIVPQSFLKDDSIDNKVLTRSDKARGKSDNVPSEEVVKKMKNYWRQLLNAKLITQRKFDNLTKAERGGLSELDKAGFIKRQLVETRQITKHVAQILDSRMNTKYDENDKLIREVKVITLKSKLVSDFRKDFQFYKVREINNYHHAHDAYLNAVVGTALIKKYPKLESEFVYGDYKVYDVRKMIAKSEQEIGKATAKYFFYSNIMNFFKTEITLANGEIRKRPLIETNGETGEIVWDKGRDFATVRKVLSMPQVNIVKKTEVQTGGFSKESILPKRNSDKLIARKKDWDPKKYGGFDSPTVAYSVLVVAKVEKGKSKKLKSVKELLGITIMERSSFEKNPIDFLEAKGYKEVKKDLIIKLPKYSLFELENGRKRMLASAGELQKGNELALPSKYVNFLYLASHYEKLKGSPEDNEQKQLFVEQHKHYLDEIIEQISEFSKRVILADANLDKVLSAYNKHRDKPIREQAENIIHLFTLTNLGAPAAFKYFDTTIDRKRYTSTKEVLDATLIHQSITGLYETRIDLSQLGGDGGGSSPAPGGSGGTLNIEDEYRLHETSKEPDVSLGSTWLSDFPQAWAETGGMGLAVRQAPLIIPLKATSTPVSIKQYPMSQEARLGIKPHIQRLLDQGILVPCQSPWNTPLLPVKKPGTNDYRPVQDLREVNKRVEDIHPTVPNPYNLLSGLPPSHQWYTVLDLKDAFFCLRLHPTSQPLFAFEWRDPEMGISGQLTWTRLPQGFKNSPTLFNEALHRDLADFRIQHPDLILLQYVDDLLLAATSELDCQQGTRALLQTLGNLGYRASAKKAQICQKQVKYLGYLLKEGQRWLTEARKETVMGQPTPKTPRQLREFLGKAGFCRLFIPGFAEMAAPLYPLTKPGTLFNWGPDQQKAYQEIKQALLTAPALGLPDLTKPFELFVDEKQGYAKGVLTQKLGPWRRPVAYLSKKLDPVAAGWPPCLRMVAAIAVLTKDAGKLTMGQPLVILAPHAVEALVKQPPDRWLSNARMTHYQALLLDTDRVQFGPVVALNPATLLPLPEEGLQHNCLDILAEAHGTRPDLTDQPLPDADHTWYTDGSSLLQEGQRKAGAAVTTETEVIWAKALPAGTSAQRAELIALTQALKMAEGKKLNVYTDSRYAFATAHIHGEIYRRRGWLTSEGKEIKNKDEILALLKALFLPKRLSIIHCPGHQKGHSAEARGNRMADQAARKAAITETPDTSTLLIENSSPSGGSKRTADGSEFEAGKRTADGSEFEKRTADGSEFESPKKKAKVE

SEQ ID NO: 2690 - protein, 2116 aa, synthetic construct
MPAAKRVKLDGGDKKYSIGLDIGTNSVGWAVITDEYKVPSKKFKVLGNTDRHSIKKNLIGALLFDSGETAEATRLKRTARRRYTRRKNRICYLQEIFSNEMAKVDDSFFHRLEESFLVEEDKKHERHPIFGNIVDEVAYHEKYPTIYHLRKKLVDSTDKADLRLIYLALAHMIKFRGHFLIEGDLNPDNSDVDKLFIQLVQTYNQLFEENPINASGVDAKAILSARLSKSRRLENLIAQLPGEKKNGLFGNLIALSLGLTPNFKSNFDLAEDAKLQLSKDTYDDDLDNLLAQIGDQYADLFLAAKNLSDAILLSDILRVNTEITKAPLSASMIKRYDEHHQDLTLLKALVRQQLPEKYKEIFFDQSKNGYAGYIDGGASQEEFYKFIKPILEKMDGTEELLVKLNREDLLRKQRTFDNGSIPHQIHLGELHAILRRQEDFYPFLKDNREKIEKILTFRIPYYVGPLARGNSRFAWMTRKSEETITPWNFEEVVDKGASAQSFIERMTNFDKNLPNEKVLPKHSLLYEYFTVYNELTKVKYVTEGMRKPAFLSGEQKKAIVDLLFKTNRKVTVKQLKEDYFKKIECFDSVEISGVEDRFNASLGTYHDLLKIIKDKDFLDNEENEDILEDIVLTLTLFEDREMIEERLKTYAHLFDDKVMKQLKRRRYTGWGRLSRKLINGIRDKQSGKTILDFLKSDGFANRNFMQLIHDDSLTFKEDIQKAQVSGQGDSLHEHIANLAGSPAIKKGILQTVKVVDELVKVMGRHKPENIVIEMARENQTTQKGQKNSRERMKRIEEGIKELGSQILKEHPVENTQLQNEKLYLYYLQNGRDMYVDQELDINRLSDYDVDHIVPQSFLKDDSIDNKVLTRSDKARGKSDNVPSEEVVKKMKNYWRQLLNAKLITQRKFDNLTKAERGGLSELDKAGFIKRQLVETRQITKHVAQILDSRMNTKYDENDKLIREVKVITLKSKLVSDFRKDFQFYKVREINNYHHAHDAYLNAVVGTALIKKYPKLESEFVYGDYKVYDVRKMIAKSEQEIGKATAKYFFYSNIMNFFKTEITLANGEIRKRPLIETNGETGEIVWDKGRDFATVRKVLSMPQVNIVKKTEVQTGGFSKESILPKRNSDKLIARKKDWDPKKYGGFDSPTVAYSVLVVAKVEKGKSKKLKSVKELLGITIMERSSFEKNPIDFLEAKGYKEVKKDLIIKLPKYSLFELENGRKRMLASAGELQKGNELALPSKYVNFLYLASHYEKLKGSPEDNEQKQLFVEQHKHYLDEIIEQISEFSKRVILADANLDKVLSAYNKHRDKPIREQAENIIHLFTLTNLGAPAAFKYFDTTIDRKRYTSTKEVLDATLIHQSITGLYETRIDLSQLGGDGGGGSEAAAKPAPGGTLNIEDEYRLHETSKEPDVSLGSTWLSDFPQAWAETGGMGLAVRQAPLIIPLKATSTPVSIKQYPMSQEARLGIKPHIQRLLDQGILVPCQSPWNTPLLPVKKPGTNDYRPVQDLREVNKRVEDIHPTVPNPYNLLSGLPPSHQWYTVLDLKDAFFCLRLHPTSQPLFAFEWRDPEMGISGQLTWTRLPQGFKNSPTLFNEALHRDLADFRIQHPDLILLQYVDDLLLAATSELDCQQGTRALLQTLGNLGYRASAKKAQICQKQVKYLGYLLKEGQRWLTEARKETVMGQPTPKTPRQLREFLGKAGFCRLFIPGFAEMAAPLYPLTKPGTLFNWGPDQQKAYQEIKQALLTAPALGLPDLTKPFELFVDEKQGYAKGVLTQKLGPWRRPVAYLSKKLDPVAAGWPPCLRMVAAIAVLTKDAGKLTMGQPLVILAPHAVEALVKQPPDRWLSNARMTHYQALLLDTDRVQFGPVVALNPATLLPLPEEGLQHNCLDILAEAHGTRPDLTDQPLPDADHTWYTDGSSLLQEGQRKAGAAVTTETEVIWAKALPAGTSAQRAELIALTQALKMAEGKKLNVYTDSRYAFATAHIHGEIYRRRGWLTSEGKEIKNKDEILALLKALFLPKRLSIIHCPGHQKGHSAEARGNRMADQAARKAAITETPDTSTLLIENSSPSGGSKRTADGSEFEAGKRTADGSEFEKRTADGSEFESPKKKAKVE

SEQ ID NO: 2691 - protein, 2110 aa, synthetic construct
MPAAKRVKLDGGDKKYSIGLDIGTNSVGWAVITDEYKVPSKKFKVLGNTDRHSIKKNLIGALLFDSGETAEATRLKRTARRRYTRRKNRICYLQEIFSNEMAKVDDSFFHRLEESFLVEEDKKHERHPIFGNIVDEVAYHEKYPTIYHLRKKLVDSTDKADLRLIYLALAHMIKFRGHFLIEGDLNPDNSDVDKLFIQLVQTYNQLFEENPINASGVDAKAILSARLSKSRRLENLIAQLPGEKKNGLFGNLIALSLGLTPNFKSNFDLAEDAKLQLSKDTYDDDLDNLLAQIGDQYADLFLAAKNLSDAILLSDILRVNTEITKAPLSASMIKRYDEHHQDLTLLKALVRQQLPEKYKEIFFDQSKNGYAGYIDGGASQEEFYKFIKPILEKMDGTEELLVKLNREDLLRKQRTFDNGSIPHQIHLGELHAILRRQEDFYPFLKDNREKIEKILTFRIPYYVGPLARGNSRFAWMTRKSEETITPWNFEEVVDKGASAQSFIERMTNFDKNLPNEKVLPKHSLLYEYFTVYNELTKVKYVTEGMRKPAFLSGEQKKAIVDLLFKTNRKVTVKQLKEDYFKKIECFDSVEISGVEDRFNASLGTYHDLLKIIKDKDFLDNEENEDILEDIVLTLTLFEDREMIEERLKTYAHLFDDKVMKQLKRRRYTGWGRLSRKLINGIRDKQSGKTILDFLKSDGFANRNFMQLIHDDSLTFKEDIQKAQVSGQGDSLHEHIANLAGSPAIKKGILQTVKVVDELVKVMGRHKPENIVIEMARENQTTQKGQKNSRERMKRIEEGIKELGSQILKEHPVENTQLQNEKLYLYYLQNGRDMYVDQELDINRLSDYDVDHIVPQSFLKDDSIDNKVLTRSDKARGKSDNVPSEEVVKKMKNYWRQLLNAKLITQRKFDNLTKAERGGLSELDKAGFIKRQLVETRQITKHVAQILDSRMNTKYDENDKLIREVKVITLKSKLVSDFRKDFQFYKVREINNYHHAHDAYLNAVVGTALIKKYPKLESEFVYGDYKVYDVRKMIAKSEQEIGKATAKYFFYSNIMNFFKTEITLANGEIRKRPLIETNGETGEIVWDKGRDFATVRKVLSMPQVNIVKKTEVQTGGFSKESILPKRNSDKLIARKKDWDPKKYGGFDSPTVAYSVLVVAKVEKGKSKKLKSVKELLGITIMERSSFEKNPIDFLEAKGYKEVKKDLIIKLPKYSLFELENGRKRMLASAGELQKGNELALPSKYVNFLYLASHYEKLKGSPEDNEQKQLFVEQHKHYLDEIIEQISEFSKRVILADANLDKVLSAYNKHRDKPIREQAENIIHLFTLTNLGAPAAFKYFDTTIDRKRYTSTKEVLDATLIHQSITGLYETRIDLSQLGGDGGGGGGSGGTLNIEDEYRLHETSKEPDVSLGSTWLSDFPQAWAETGGMGLAVRQAPLIIPLKATSTPVSIKQYPMSQEARLGIKPHIQRLLDQGILVPCQSPWNTPLLPVKKPGTNDYRPVQDLREVNKRVEDIHPTVPNPYNLLSGLPPSHQWYTVLDLKDAFFCLRLHPTSQPLFAFEWRDPEMGISGQLTWTRLPQGFKNSPTLFNEALHRDLADFRIQHPDLILLQYVDDLLLAATSELDCQQGTRALLQTLGNLGYRASAKKAQICQKQVKYLGYLLKEGQRWLTEARKETVMGQPTPKTPRQLREFLGKAGFCRLFIPGFAEMAAPLYPLTKPGTLFNWGPDQQKAYQEIKQALLTAPALGLPDLTKPFELFVDEKQGYAKGVLTQKLGPWRRPVAYLSKKLDPVAAGWPPCLRMVAAIAVLTKDAGKLTMGQPLVILAPHAVEALVKQPPDRWLSNARMTHYQALLLDTDRVQFGPVVALNPATLLPLPEEGLQHNCLDILAEAHGTRPDLTDQPLPDADHTWYTDGSSLLQEGQRKAGAAVTTETEVIWAKALPAGTSAQRAELIALTQALKMAEGKKLNVYTDSRYAFATAHIHGEIYRRRGWLTSEGKEIKNKDEILALLKALFLPKRLSIIHCPGHQKGHSAEARGNRMADQAARKAAITETPDTSTLLIENSSPSGGSKRTADGSEFEAGKRTADGSEFEKRTADGSEFESPKKKAKVE

SEQ ID NO: 2692 - protein, 2116 aa, synthetic construct
MPAAKRVKLDGGDKKYSIGLDIGTNSVGWAVITDEYKVPSKKFKVLGNTDRHSIKKNLIGALLFDSGETAEATRLKRTARRRYTRRKNRICYLQEIFSNEMAKVDDSFFHRLEESFLVEEDKKHERHPIFGNIVDEVAYHEKYPTIYHLRKKLVDSTDKADLRLIYLALAHMIKFRGHFLIEGDLNPDNSDVDKLFIQLVQTYNQLFEENPINASGVDAKAILSARLSKSRRLENLIAQLPGEKKNGLFGNLIALSLGLTPNFKSNFDLAEDAKLQLSKDTYDDDLDNLLAQIGDQYADLFLAAKNLSDAILLSDILRVNTEITKAPLSASMIKRYDEHHQDLTLLKALVRQQLPEKYKEIFFDQSKNGYAGYIDGGASQEEFYKFIKPILEKMDGTEELLVKLNREDLLRKQRTFDNGSIPHQIHLGELHAILRRQEDFYPFLKDNREKIEKILTFRIPYYVGPLARGNSRFAWMTRKSEETITPWNFEEVVDKGASAQSFIERMTNFDKNLPNEKVLPKHSLLYEYFTVYNELTKVKYVTEGMRKPAFLSGEQKKAIVDLLFKTNRKVTVKQLKEDYFKKIECFDSVEISGVEDRFNASLGTYHDLLKIIKDKDFLDNEENEDILEDIVLTLTLFEDREMIEERLKTYAHLFDDKVMKQLKRRRYTGWGRLSRKLINGIRDKQSGKTILDFLKSDGFANRNFMQLIHDDSLTFKEDIQKAQVSGQGDSLHEHIANLAGSPAIKKGILQTVKVVDELVKVMGRHKPENIVIEMARENQTTQKGQKNSRERMKRIEEGIKELGSQILKEHPVENTQLQNEKLYLYYLQNGRDMYVDQELDINRLSDYDVDHIVPQSFLKDDSIDNKVLTRSDKARGKSDNVPSEEVVKKMKNYWRQLLNAKLITQRKFDNLTKAERGGLSELDKAGFIKRQLVETRQITKHVAQILDSRMNTKYDENDKLIREVKVITLKSKLVSDFRKDFQFYKVREINNYHHAHDAYLNAVVGTALIKKYPKLESEFVYGDYKVYDVRKMIAKSEQEIGKATAKYFFYSNIMNFFKTEITLANGEIRKRPLIETNGETGEIVWDKGRDFATVRKVLSMPQVNIVKKTEVQTGGFSKESILPKRNSDKLIARKKDWDPKKYGGFDSPTVAYSVLVVAKVEKGKSKKLKSVKELLGITIMERSSFEKNPIDFLEAKGYKEVKKDLIIKLPKYSLFELENGRKRMLASAGELQKGNELALPSKYVNFLYLASHYEKLKGSPEDNEQKQLFVEQHKHYLDEIIEQISEFSKRVILADANLDKVLSAYNKHRDKPIREQAENIIHLFTLTNLGAPAAFKYFDTTIDRKRYTSTKEVLDATLIHQSITGLYETRIDLSQLGGDGGGGSGGGEAAAKGGTLNIEDEYRLHETSKEPDVSLGSTWLSDFPQAWAETGGMGLAVRQAPLIIPLKATSTPVSIKQYPMSQEARLGIKPHIQRLLDQGILVPCQSPWNTPLLPVKKPGTNDYRPVQDLREVNKRVEDIHPTVPNPYNLLSGLPPSHQWYTVLDLKDAFFCLRLHPTSQPLFAFEWRDPEMGISGQLTWTRLPQGFKNSPTLFNEALHRDLADFRIQHPDLILLQYVDDLLLAATSELDCQQGTRALLQTLGNLGYRASAKKAQICQKQVKYLGYLLKEGQRWLTEARKETVMGQPTPKTPRQLREFLGKAGFCRLFIPGFAEMAAPLYPLTKPGTLFNWGPDQQKAYQEIKQALLTAPALGLPDLTKPFELFVDEKQGYAKGVLTQKLGPWRRPVAYLSKKLDPVAAGWPPCLRMVAAIAVLTKDAGKLTMGQPLVILAPHAVEALVKQPPDRWLSNARMTHYQALLLDTDRVQFGPVVALNPATLLPLPEEGLQHNCLDILAEAHGTRPDLTDQPLPDADHTWYTDGSSLLQEGQRKAGAAVTTETEVIWAKALPAGTSAQRAELIALTQALKMAEGKKLNVYTDSRYAFATAHIHGEIYRRRGWLTSEGKEIKNKDEILALLKALFLPKRLSIIHCPGHQKGHSAEARGNRMADQAARKAAITETPDTSTLLIENSSPSGGSKRTADGSEFEAGKRTADGSEFEKRTADGSEFESPKKKAKVE

SEQ ID NO: 2693 - protein, 2111 aa, synthetic construct
MPAAKRVKLDGGDKKYSIGLDIGTNSVGWAVITDEYKVPSKKFKVLGNTDRHSIKKNLIGALLFDSGETAEATRLKRTARRRYTRRKNRICYLQEIFSNEMAKVDDSFFHRLEESFLVEEDKKHERHPIFGNIVDEVAYHEKYPTIYHLRKKLVDSTDKADLRLIYLALAHMIKFRGHFLIEGDLNPDNSDVDKLFIQLVQTYNQLFEENPINASGVDAKAILSARLSKSRRLENLIAQLPGEKKNGLFGNLIALSLGLTPNFKSNFDLAEDAKLQLSKDTYDDDLDNLLAQIGDQYADLFLAAKNLSDAILLSDILRVNTEITKAPLSASMIKRYDEHHQDLTLLKALVRQQLPEKYKEIFFDQSKNGYAGYIDGGASQEEFYKFIKPILEKMDGTEELLVKLNREDLLRKQRTFDNGSIPHQIHLGELHAILRRQEDFYPFLKDNREKIEKILTFRIPYYVGPLARGNSRFAWMTRKSEETITPWNFEEVVDKGASAQSFIERMTNFDKNLPNEKVLPKHSLLYEYFTVYNELTKVKYVTEGMRKPAFLSGEQKKAIVDLLFKTNRKVTVKQLKEDYFKKIECFDSVEISGVEDRFNASLGTYHDLLKIIKDKDFLDNEENEDILEDIVLTLTLFEDREMIEERLKTYAHLFDDKVMKQLKRRRYTGWGRLSRKLINGIRDKQSGKTILDFLKSDGFANRNFMQLIHDDSLTFKEDIQKAQVSGQGDSLHEHIANLAGSPAIKKGILQTVKVVDELVKVMGRHKPENIVIEMARENQTTQKGQKNSRERMKRIEEGIKELGSQILKEHPVENTQLQNEKLYLYYLQNGRDMYVDQELDINRLSDYDVDHIVPQSFLKDDSIDNKVLTRSDKARGKSDNVPSEEVVKKMKNYWRQLLNAKLITQRKFDNLTKAERGGLSELDKAGFIKRQLVETRQITKHVAQILDSRMNTKYDENDKLIREVKVITLKSKLVSDFRKDFQFYKVREINNYHHAHDAYLNAVVGTALIKKYPKLESEFVYGDYKVYDVRKMIAKSEQEIGKATAKYFFYSNIMNFFKTEITLANGEIRKRPLIETNGETGEIVWDKGRDFATVRKVLSMPQVNIVKKTEVQTGGFSKESILPKRNSDKLIARKKDWDPKKYGGFDSPTVAYSVLVVAKVEKGKSKKLKSVKELLGITIMERSSFEKNPIDFLEAKGYKEVKKDLIIKLPKYSLFELENGRKRMLASAGELQKGNELALPSKYVNFLYLASHYEKLKGSPEDNEQKQLFVEQHKHYLDEIIEQISEFSKRVILADANLDKVLSAYNKHRDKPIREQAENIIHLFTLTNLGAPAAFKYFDTTIDRKRYTSTKEVLDATLIHQSITGLYETRIDLSQLGGDGGGGSGGSGGTLNIEDEYRLHETSKEPDVSLGSTWLSDFPQAWAETGGMGLAVRQAPLIIPLKATSTPVSIKQYPMSQEARLGIKPHIQRLLDQGILVPCQSPWNTPLLPVKKPGTNDYRPVQDLREVNKRVEDIHPTVPNPYNLLSGLPPSHQWYTVLDLKDAFFCLRLHPTSQPLFAFEWRDPEMGISGQLTWTRLPQGFKNSPTLFNEALHRDLADFRIQHPDLILLQYVDDLLLAATSELDCQQGTRALLQTLGNLGYRASAKKAQICQKQVKYLGYLLKEGQRWLTEARKETVMGQPTPKTPRQLREFLGKAGFCRLFIPGFAEMAAPLYPLTKPGTLFNWGPDQQKAYQEIKQALLTAPALGLPDLTKPFELFVDEKQGYAKGVLTQKLGPWRRPVAYLSKKLDPVAAGWPPCLRMVAAIAVLTKDAGKLTMGQPLVILAPHAVEALVKQPPDRWLSNARMTHYQALLLDTDRVQFGPVVALNPATLLPLPEEGLQHNCLDILAEAHGTRPDLTDQPLPDADHTWYTDGSSLLQEGQRKAGAAVTTETEVIWAKALPAGTSAQRAELIALTQALKMAEGKKLNVYTDSRYAFATAHIHGEIYRRRGWLTSEGKEIKNKDEILALLKALFLPKRLSIIHCPGHQKGHSAEARGNRMADQAARKAAITETPDTSTLLIENSSPSGGSKRTADGSEFEAGKRTADGSEFEKRTADGSEFESPKKKAKVE

SEQ ID NO: 2694 - protein, 2114 aa, synthetic construct
MPAAKRVKLDGGDKKYSIGLDIGTNSVGWAVITDEYKVPSKKFKVLGNTDRHSIKKNLIGALLFDSGETAEATRLKRTARRRYTRRKNRICYLQEIFSNEMAKVDDSFFHRLEESFLVEEDKKHERHPIFGNIVDEVAYHEKYPTIYHLRKKLVDSTDKADLRLIYLALAHMIKFRGHFLIEGDLNPDNSDVDKLFIQLVQTYNQLFEENPINASGVDAKAILSARLSKSRRLENLIAQLPGEKKNGLFGNLIALSLGLTPNFKSNFDLAEDAKLQLSKDTYDDDLDNLLAQIGDQYADLFLAAKNLSDAILLSDILRVNTEITKAPLSASMIKRYDEHHQDLTLLKALVRQQLPEKYKEIFFDQSKNGYAGYIDGGASQEEFYKFIKPILEKMDGTEELLVKLNREDLLRKQRTFDNGSIPHQIHLGELHAILRRQEDFYPFLKDNREKIEKILTFRIPYYVGPLARGNSRFAWMTRKSEETITPWNFEEVVDKGASAQSFIERMTNFDKNLPNEKVLPKHSLLYEYFTVYNELTKVKYVTEGMRKPAFLSGEQKKAIVDLLFKTNRKVTVKQLKEDYFKKIECFDSVEISGVEDRFNASLGTYHDLLKIIKDKDFLDNEENEDILEDIVLTLTLFEDREMIEERLKTYAHLFDDKVMKQLKRRRYTGWGRLSRKLINGIRDKQSGKTILDFLKSDGFANRNFMQLIHDDSLTFKEDIQKAQVSGQGDSLHEHIANLAGSPAIKKGILQTVKVVDELVKVMGRHKPENIVIEMARENQTTQKGQKNSRERMKRIEEGIKELGSQILKEHPVENTQLQNEKLYLYYLQNGRDMYVDQELDINRLSDYDVDHIVPQSFLKDDSIDNKVLTRSDKARGKSDNVPSEEVVKKMKNYWRQLLNAKLITQRKFDNLTKAERGGLSELDKAGFIKRQLVETRQITKHVAQILDSRMNTKYDENDKLIREVKVITLKSKLVSDFRKDFQFYKVREINNYHHAHDAYLNAVVGTALIKKYPKLESEFVYGDYKVYDVRKMIAKSEQEIGKATAKYFFYSNIMNFFKTEITLANGEIRKRPLIETNGETGEIVWDKGRDFATVRKVLSMPQVNIVKKTEVQTGGFSKESILPKRNSDKLIARKKDWDPKKYGGFDSPTVAYSVLVVAKVEKGKSKKLKSVKELLGITIMERSSFEKNPIDFLEAKGYKEVKKDLIIKLPKYSLFELENGRKRMLASAGELQKGNELALPSKYVNFLYLASHYEKLKGSPEDNEQKQLFVEQHKHYLDEIIEQISEFSKRVILADANLDKVLSAYNKHRDKPIREQAENIIHLFTLTNLGAPAAFKYFDTTIDRKRYTSTKEVLDATLIHQSITGLYETRIDLSQLGGDGGGSSGGSGGGGGTLNIEDEYRLHETSKEPDVSLGSTWLSDFPQAWAETGGMGLAVRQAPLIIPLKATSTPVSIKQYPMSQEARLGIKPHIQRLLDQGILVPCQSPWNTPLLPVKKPGTNDYRPVQDLREVNKRVEDIHPTVPNPYNLLSGLPPSHQWYTVLDLKDAFFCLRLHPTSQPLFAFEWRDPEMGISGQLTWTRLPQGFKNSPTLFNEALHRDLADFRIQHPDLILLQYVDDLLLAATSELDCQQGTRALLQTLGNLGYRASAKKAQICQKQVKYLGYLLKEGQRWLTEARKETVMGQPTPKTPRQLREFLGKAGFCRLFIPGFAEMAAPLYPLTKPGTLFNWGPDQQKAYQEIKQALLTAPALGLPDLTKPFELFVDEKQGYAKGVLTQKLGPWRRPVAYLSKKLDPVAAGWPPCLRMVAAIAVLTKDAGKLTMGQPLVILAPHAVEALVKQPPDRWLSNARMTHYQALLLDTDRVQFGPVVALNPATLLPLPEEGLQHNCLDILAEAHGTRPDLTDQPLPDADHTWYTDGSSLLQEGQRKAGAAVTTETEVIWAKALPAGTSAQRAELIALTQALKMAEGKKLNVYTDSRYAFATAHIHGEIYRRRGWLTSEGKEIKNKDEILALLKALFLPKRLSIIHCPGHQKGHSAEARGNRMADQAARKAAITETPDTSTLLIENSSPSGGSKRTADGSEFEAGKRTADGSEFEKRTADGSEFESPKKKAKVE

SEQ ID NO: 2695 - protein, 2116 aa, synthetic construct
MPAAKRVKLDGGDKKYSIGLDIGTNSVGWAVITDEYKVPSKKFKVLGNTDRHSIKKNLIGALLFDSGETAEATRLKRTARRRYTRRKNRICYLQEIFSNEMAKVDDSFFHRLEESFLVEEDKKHERHPIFGNIVDEVAYHEKYPTIYHLRKKLVDSTDKADLRLIYLALAHMIKFRGHFLIEGDLNPDNSDVDKLFIQLVQTYNQLFEENPINASGVDAKAILSARLSKSRRLENLIAQLPGEKKNGLFGNLIALSLGLTPNFKSNFDLAEDAKLQLSKDTYDDDLDNLLAQIGDQYADLFLAAKNLSDAILLSDILRVNTEITKAPLSASMIKRYDEHHQDLTLLKALVRQQLPEKYKEIFFDQSKNGYAGYIDGGASQEEFYKFIKPILEKMDGTEELLVKLNREDLLRKQRTFDNGSIPHQIHLGELHAILRRQEDFYPFLKDNREKIEKILTFRIPYYVGPLARGNSRFAWMTRKSEETITPWNFEEVVDKGASAQSFIERMTNFDKNLPNEKVLPKHSLLYEYFTVYNELTKVKYVTEGMRKPAFLSGEQKKAIVDLLFKTNRKVTVKQLKEDYFKKIECFDSVEISGVEDRFNASLGTYHDLLKIIKDKDFLDNEENEDILEDIVLTLTLFEDREMIEERLKTYAHLFDDKVMKQLKRRRYTGWGRLSRKLINGIRDKQSGKTILDFLKSDGFANRNFMQLIHDDSLTFKEDIQKAQVSGQGDSLHEHIANLAGSPAIKKGILQTVKVVDELVKVMGRHKPENIVIEMARENQTTQKGQKNSRERMKRIEEGIKELGSQILKEHPVENTQLQNEKLYLYYLQNGRDMYVDQELDINRLSDYDVDHIVPQSFLKDDSIDNKVLTRSDKARGKSDNVPSEEVVKKMKNYWRQLLNAKLITQRKFDNLTKAERGGLSELDKAGFIKRQLVETRQITKHVAQILDSRMNTKYDENDKLIREVKVITLKSKLVSDFRKDFQFYKVREINNYHHAHDAYLNAVVGTALIKKYPKLESEFVYGDYKVYDVRKMIAKSEQEIGKATAKYFFYSNIMNFFKTEITLANGEIRKRPLIETNGETGEIVWDKGRDFATVRKVLSMPQVNIVKKTEVQTGGFSKESILPKRNSDKLIARKKDWDPKKYGGFDSPTVAYSVLVVAKVEKGKSKKLKSVKELLGITIMERSSFEKNPIDFLEAKGYKEVKKDLIIKLPKYSLFELENGRKRMLASAGELQKGNELALPSKYVNFLYLASHYEKLKGSPEDNEQKQLFVEQHKHYLDEIIEQISEFSKRVILADANLDKVLSAYNKHRDKPIREQAENIIHLFTLTNLGAPAAFKYFDTTIDRKRYTSTKEVLDATLIHQSITGLYETRIDLSQLGGDGGEAAAKGGGGSSGGTLNIEDEYRLHETSKEPDVSLGSTWLSDFPQAWAETGGMGLAVRQAPLIIPLKATSTPVSIKQYPMSQEARLGIKPHIQRLLDQGILVPCQSPWNTPLLPVKKPGTNDYRPVQDLREVNKRVEDIHPTVPNPYNLLSGLPPSHQWYTVLDLKDAFFCLRLHPTSQPLFAFEWRDPEMGISGQLTWTRLPQGFKNSPTLFNEALHRDLADFRIQHPDLILLQYVDDLLLAATSELDCQQGTRALLQTLGNLGYRASAKKAQICQKQVKYLGYLLKEGQRWLTEARKETVMGQPTPKTPRQLREFLGKAGFCRLFIPGFAEMAAPLYPLTKPGTLFNWGPDQQKAYQEIKQALLTAPALGLPDLTKPFELFVDEKQGYAKGVLTQKLGPWRRPVAYLSKKLDPVAAGWPPCLRMVAAIAVLTKDAGKLTMGQPLVILAPHAVEALVKQPPDRWLSNARMTHYQALLLDTDRVQFGPVVALNPATLLPLPEEGLQHNCLDILAEAHGTRPDLTDQPLPDADHTWYTDGSSLLQEGQRKAGAAVTTETEVIWAKALPAGTSAQRAELIALTQALKMAEGKKLNVYTDSRYAFATAHIHGEIYRRRGWLTSEGKEIKNKDEILALLKALFLPKRLSIIHCPGHQKGHSAEARGNRMADQAARKAAITETPDTSTLLIENSSPSGGSKRTADGSEFEAGKRTADGSEFEKRTADGSEFESPKKKAKVE

SEQ ID NO: 2696 - protein, 2117 aa, synthetic construct
MPAAKRVKLDGGDKKYSIGLDIGTNSVGWAVITDEYKVPSKKFKVLGNTDRHSIKKNLIGALLFDSGETAEATRLKRTARRRYTRRKNRICYLQEIFSNEMAKVDDSFFHRLEESFLVEEDKKHERHPIFGNIVDEVAYHEKYPTIYHLRKKLVDSTDKADLRLIYLALAHMIKFRGHFLIEGDLNPDNSDVDKLFIQLVQTYNQLFEENPINASGVDAKAILSARLSKSRRLENLIAQLPGEKKNGLFGNLIALSLGLTPNFKSNFDLAEDAKLQLSKDTYDDDLDNLLAQIGDQYADLFLAAKNLSDAILLSDILRVNTEITKAPLSASMIKRYDEHHQDLTLLKALVRQQLPEKYKEIFFDQSKNGYAGYIDGGASQEEFYKFIKPILEKMDGTEELLVKLNREDLLRKQRTFDNGSIPHQIHLGELHAILRRQEDFYPFLKDNREKIEKILTFRIPYYVGPLARGNSRFAWMTRKSEETITPWNFEEVVDKGASAQSFIERMTNFDKNLPNEKVLPKHSLLYEYFTVYNELTKVKYVTEGMRKPAFLSGEQKKAIVDLLFKTNRKVTVKQLKEDYFKKIECFDSVEISGVEDRFNASLGTYHDLLKIIKDKDFLDNEENEDILEDIVLTLTLFEDREMIEERLKTYAHLFDDKVMKQLKRRRYTGWGRLSRKLINGIRDKQSGKTILDFLKSDGFANRNFMQLIHDDSLTFKEDIQKAQVSGQGDSLHEHIANLAGSPAIKKGILQTVKVVDELVKVMGRHKPENIVIEMARENQTTQKGQKNSRERMKRIEEGIKELGSQILKEHPVENTQLQNEKLYLYYLQNGRDMYVDQELDINRLSDYDVDHIVPQSFLKDDSIDNKVLTRSDKARGKSDNVPSEEVVKKMKNYWRQLLNAKLITQRKFDNLTKAERGGLSELDKAGFIKRQLVETRQITKHVAQILDSRMNTKYDENDKLIREVKVITLKSKLVSDFRKDFQFYKVREINNYHHAHDAYLNAVVGTALIKKYPKLESEFVYGDYKVYDVRKMIAKSEQEIGKATAKYFFYSNIMNFFKTEITLANGEIRKRPLIETNGETGEIVWDKGRDFATVRKVLSMPQVNIVKKTEVQTGGFSKESILPKRNSDKLIARKKDWDPKKYGGFDSPTVAYSVLVVAKVEKGKSKKLKSVKELLGITIMERSSFEKNPIDFLEAKGYKEVKKDLIIKLPKYSLFELENGRKRMLASAGELQKGNELALPSKYVNFLYLASHYEKLKGSPEDNEQKQLFVEQHKHYLDEIIEQISEFSKRVILADANLDKVLSAYNKHRDKPIREQAENIIHLFTLTNLGAPAAFKYFDTTIDRKRYTSTKEVLDATLIHQSITGLYETRIDLSQLGGDGGGSAGSAAGSGEFGGTLNIEDEYRLHETSKEPDVSLGSTWLSDFPQAWAETGGMGLAVRQAPLIIPLKATSTPVSIKQYPMSQEARLGIKPHIQRLLDQGILVPCQSPWNTPLLPVKKPGTNDYRPVQDLREVNKRVEDIHPTVPNPYNLLSGLPPSHQWYTVLDLKDAFFCLRLHPTSQPLFAFEWRDPEMGISGQLTWTRLPQGFKNSPTLFNEALHRDLADFRIQHPDLILLQYVDDLLLAATSELDCQQGTRALLQTLGNLGYRASAKKAQICQKQVKYLGYLLKEGQRWLTEARKETVMGQPTPKTPRQLREFLGKAGFCRLFIPGFAEMAAPLYPLTKPGTLFNWGPDQQKAYQEIKQALLTAPALGLPDLTKPFELFVDEKQGYAKGVLTQKLGPWRRPVAYLSKKLDPVAAGWPPCLRMVAAIAVLTKDAGKLTMGQPLVILAPHAVEALVKQPPDRWLSNARMTHYQALLLDTDRVQFGPVVALNPATLLPLPEEGLQHNCLDILAEAHGTRPDLTDQPLPDADHTWYTDGSSLLQEGQRKAGAAVTTETEVIWAKALPAGTSAQRAELIALTQALKMAEGKKLNVYTDSRYAFATAHIHGEIYRRRGWLTSEGKEIKNKDEILALLKALFLPKRLSIIHCPGHQKGHSAEARGNRMADQAARKAAITETPDTSTLLIENSSPSGGSKRTADGSEFEAGKRTADGSEFEKRTADGSEFESPKKKAKVE

SEQ ID NO: 2697 - protein, 2114 aa, synthetic construct
MPAAKRVKLDGGDKKYSIGLDIGTNSVGWAVITDEYKVPSKKFKVLGNTDRHSIKKNLIGALLFDSGETAEATRLKRTARRRYTRRKNRICYLQEIFSNEMAKVDDSFFHRLEESFLVEEDKKHERHPIFGNIVDEVAYHEKYPTIYHLRKKLVDSTDKADLRLIYLALAHMIKFRGHFLIEGDLNPDNSDVDKLFIQLVQTYNQLFEENPINASGVDAKAILSARLSKSRRLENLIAQLPGEKKNGLFGNLIALSLGLTPNFKSNFDLAEDAKLQLSKDTYDDDLDNLLAQIGDQYADLFLAAKNLSDAILLSDILRVNTEITKAPLSASMIKRYDEHHQDLTLLKALVRQQLPEKYKEIFFDQSKNGYAGYIDGGASQEEFYKFIKPILEKMDGTEELLVKLNREDLLRKQRTFDNGSIPHQIHLGELHAILRRQEDFYPFLKDNREKIEKILTFRIPYYVGPLARGNSRFAWMTRKSEETITPWNFEEVVDKGASAQSFIERMTNFDKNLPNEKVLPKHSLLYEYFTVYNELTKVKYVTEGMRKPAFLSGEQKKAIVDLLFKTNRKVTVKQLKEDYFKKIECFDSVEISGVEDRFNASLGTYHDLLKIIKDKDFLDNEENEDILEDIVLTLTLFEDREMIEERLKTYAHLFDDKVMKQLKRRRYTGWGRLSRKLINGIRDKQSGKTILDFLKSDGFANRNFMQLIHDDSLTFKEDIQKAQVSGQGDSLHEHIANLAGSPAIKKGILQTVKVVDELVKVMGRHKPENIVIEMARENQTTQKGQKNSRERMKRIEEGIKELGSQILKEHPVENTQLQNEKLYLYYLQNGRDMYVDQELDINRLSDYDVDHIVPQSFLKDDSIDNKVLTRSDKARGKSDNVPSEEVVKKMKNYWRQLLNAKLITQRKFDNLTKAERGGLSELDKAGFIKRQLVETRQITKHVAQILDSRMNTKYDENDKLIREVKVITLKSKLVSDFRKDFQFYKVREINNYHHAHDAYLNAVVGTALIKKYPKLESEFVYGDYKVYDVRKMIAKSEQEIGKATAKYFFYSNIMNFFKTEITLANGEIRKRPLIETNGETGEIVWDKGRDFATVRKVLSMPQVNIVKKTEVQTGGFSKESILPKRNSDKLIARKKDWDPKKYGGFDSPTVAYSVLVVAKVEKGKSKKLKSVKELLGITIMERSSFEKNPIDFLEAKGYKEVKKDLIIKLPKYSLFELENGRKRMLASAGELQKGNELALPSKYVNFLYLASHYEKLKGSPEDNEQKQLFVEQHKHYLDEIIEQISEFSKRVILADANLDKVLSAYNKHRDKPIREQAENIIHLFTLTNLGAPAAFKYFDTTIDRKRYTSTKEVLDATLIHQSITGLYETRIDLSQLGGDGGGGSGGSGGSGGTLNIEDEYRLHETSKEPDVSLGSTWLSDFPQAWAETGGMGLAVRQAPLIIPLKATSTPVSIKQYPMSQEARLGIKPHIQRLLDQGILVPCQSPWNTPLLPVKKPGTNDYRPVQDLREVNKRVEDIHPTVPNPYNLLSGLPPSHQWYTVLDLKDAFFCLRLHPTSQPLFAFEWRDPEMGISGQLTWTRLPQGFKNSPTLFNEALHRDLADFRIQHPDLILLQYVDDLLLAATSELDCQQGTRALLQTLGNLGYRASAKKAQICQKQVKYLGYLLKEGQRWLTEARKETVMGQPTPKTPRQLREFLGKAGFCRLFIPGFAEMAAPLYPLTKPGTLFNWGPDQQKAYQEIKQALLTAPALGLPDLTKPFELFVDEKQGYAKGVLTQKLGPWRRPVAYLSKKLDPVAAGWPPCLRMVAAIAVLTKDAGKLTMGQPLVILAPHAVEALVKQPPDRWLSNARMTHYQALLLDTDRVQFGPVVALNPATLLPLPEEGLQHNCLDILAEAHGTRPDLTDQPLPDADHTWYTDGSSLLQEGQRKAGAAVTTETEVIWAKALPAGTSAQRAELIALTQALKMAEGKKLNVYTDSRYAFATAHIHGEIYRRRGWLTSEGKEIKNKDEILALLKALFLPKRLSIIHCPGHQKGHSAEARGNRMADQAARKAAITETPDTSTLLIENSSPSGGSKRTADGSEFEAGKRTADGSEFEKRTADGSEFESPKKKAKVE

SEQ ID NO: 2698 - protein, 2114 aa, synthetic construct
MPAAKRVKLDGGDKKYSIGLDIGTNSVGWAVITDEYKVPSKKFKVLGNTDRHSIKKNLIGALLFDSGETAEATRLKRTARRRYTRRKNRICYLQEIFSNEMAKVDDSFFHRLEESFLVEEDKKHERHPIFGNIVDEVAYHEKYPTIYHLRKKLVDSTDKADLRLIYLALAHMIKFRGHFLIEGDLNPDNSDVDKLFIQLVQTYNQLFEENPINASGVDAKAILSARLSKSRRLENLIAQLPGEKKNGLFGNLIALSLGLTPNFKSNFDLAEDAKLQLSKDTYDDDLDNLLAQIGDQYADLFLAAKNLSDAILLSDILRVNTEITKAPLSASMIKRYDEHHQDLTLLKALVRQQLPEKYKEIFFDQSKNGYAGYIDGGASQEEFYKFIKPILEKMDGTEELLVKLNREDLLRKQRTFDNGSIPHQIHLGELHAILRRQEDFYPFLKDNREKIEKILTFRIPYYVGPLARGNSRFAWMTRKSEETITPWNFEEVVDKGASAQSFIERMTNFDKNLPNEKVLPKHSLLYEYFTVYNELTKVKYVTEGMRKPAFLSGEQKKAIVDLLFKTNRKVTVKQLKEDYFKKIECFDSVEISGVEDRFNASLGTYHDLLKIIKDKDFLDNEENEDILEDIVLTLTLFEDREMIEERLKTYAHLFDDKVMKQLKRRRYTGWGRLSRKLINGIRDKQSGKTILDFLKSDGFANRNFMQLIHDDSLTFKEDIQKAQVSGQGDSLHEHIANLAGSPAIKKGILQTVKVVDELVKVMGRHKPENIVIEMARENQTTQKGQKNSRERMKRIEEGIKELGSQILKEHPVENTQLQNEKLYLYYLQNGRDMYVDQELDINRLSDYDVDHIVPQSFLKDDSIDNKVLTRSDKARGKSDNVPSEEVVKKMKNYWRQLLNAKLITQRKFDNLTKAERGGLSELDKAGFIKRQLVETRQITKHVAQILDSRMNTKYDENDKLIREVKVITLKSKLVSDFRKDFQFYKVREINNYHHAHDAYLNAVVGTALIKKYPKLESEFVYGDYKVYDVRKMIAKSEQEIGKATAKYFFYSNIMNFFKTEITLANGEIRKRPLIETNGETGEIVWDKGRDFATVRKVLSMPQVNIVKKTEVQTGGFSKESILPKRNSDKLIARKKDWDPKKYGGFDSPTVAYSVLVVAKVEKGKSKKLKSVKELLGITIMERSSFEKNPIDFLEAKGYKEVKKDLIIKLPKYSLFELENGRKRMLASAGELQKGNELALPSKYVNFLYLASHYEKLKGSPEDNEQKQLFVEQHKHYLDEIIEQISEFSKRVILADANLDKVLSAYNKHRDKPIREQAENIIHLFTLTNLGAPAAFKYFDTTIDRKRYTSTKEVLDATLIHQSITGLYETRIDLSQLGGDGGGGGPAPGSSGGTLNIEDEYRLHETSKEPDVSLGSTWLSDFPQAWAETGGMGLAVRQAPLIIPLKATSTPVSIKQYPMSQEARLGIKPHIQRLLDQGILVPCQSPWNTPLLPVKKPGTNDYRPVQDLREVNKRVEDIHPTVPNPYNLLSGLPPSHQWYTVLDLKDAFFCLRLHPTSQPLFAFEWRDPEMGISGQLTWTRLPQGFKNSPTLFNEALHRDLADFRIQHPDLILLQYVDDLLLAATSELDCQQGTRALLQTLGNLGYRASAKKAQICQKQVKYLGYLLKEGQRWLTEARKETVMGQPTPKTPRQLREFLGKAGFCRLFIPGFAEMAAPLYPLTKPGTLFNWGPDQQKAYQEIKQALLTAPALGLPDLTKPFELFVDEKQGYAKGVLTQKLGPWRRPVAYLSKKLDPVAAGWPPCLRMVAAIAVLTKDAGKLTMGQPLVILAPHAVEALVKQPPDRWLSNARMTHYQALLLDTDRVQFGPVVALNPATLLPLPEEGLQHNCLDILAEAHGTRPDLTDQPLPDADHTWYTDGSSLLQEGQRKAGAAVTTETEVIWAKALPAGTSAQRAELIALTQALKMAEGKKLNVYTDSRYAFATAHIHGEIYRRRGWLTSEGKEIKNKDEILALLKALFLPKRLSIIHCPGHQKGHSAEARGNRMADQAARKAAITETPDTSTLLIENSSPSGGSKRTADGSEFEAGKRTADGSEFEKRTADGSEFESPKKKAKVE

SEQ ID NO: 2699 - protein, 2114 aa, synthetic construct
MPAAKRVKLDGGDKKYSIGLDIGTNSVGWAVITDEYKVPSKKFKVLGNTDRHSIKKNLIGALLFDSGETAEATRLKRTARRRYTRRKNRICYLQEIFSNEMAKVDDSFFHRLEESFLVEEDKKHERHPIFGNIVDEVAYHEKYPTIYHLRKKLVDSTDKADLRLIYLALAHMIKFRGHFLIEGDLNPDNSDVDKLFIQLVQTYNQLFEENPINASGVDAKAILSARLSKSRRLENLIAQLPGEKKNGLFGNLIALSLGLTPNFKSNFDLAEDAKLQLSKDTYDDDLDNLLAQIGDQYADLFLAAKNLSDAILLSDILRVNTEITKAPLSASMIKRYDEHHQDLTLLKALVRQQLPEKYKEIFFDQSKNGYAGYIDGGASQEEFYKFIKPILEKMDGTEELLVKLNREDLLRKQRTFDNGSIPHQIHLGELHAILRRQEDFYPFLKDNREKIEKILTFRIPYYVGPLARGNSRFAWMTRKSEETITPWNFEEVVDKGASAQSFIERMTNFDKNLPNEKVLPKHSLLYEYFTVYNELTKVKYVTEGMRKPAFLSGEQKKAIVDLLFKTNRKVTVKQLKEDYFKKIECFDSVEISGVEDRFNASLGTYHDLLKIIKDKDFLDNEENEDILEDIVLTLTLFEDREMIEERLKTYAHLFDDKVMKQLKRRRYTGWGRLSRKLINGIRDKQSGKTILDFLKSDGFANRNFMQLIHDDSLTFKEDIQKAQVSGQGDSLHEHIANLAGSPAIKKGILQTVKVVDELVKVMGRHKPENIVIEMARENQTTQKGQKNSRERMKRIEEGIKELGSQILKEHPVENTQLQNEKLYLYYLQNGRDMYVDQELDINRLSDYDVDHIVPQSFLKDDSIDNKVLTRSDKARGKSDNVPSEEVVKKMKNYWRQLLNAKLITQRKFDNLTKAERGGLSELDKAGFIKRQLVETRQITKHVAQILDSRMNTKYDENDKLIREVKVITLKSKLVSDFRKDFQFYKVREINNYHHAHDAYLNAVVGTALIKKYPKLESEFVYGDYKVYDVRKMIAKSEQEIGKATAKYFFYSNIMNFFKTEITLANGEIRKRPLIETNGETGEIVWDKGRDFATVRKVLSMPQVNIVKKTEVQTGGFSKESILPKRNSDKLIARKKDWDPKKYGGFDSPTVAYSVLVVAKVEKGKSKKLKSVKELLGITIMERSSFEKNPIDFLEAKGYKEVKKDLIIKLPKYSLFELENGRKRMLASAGELQKGNELALPSKYVNFLYLASHYEKLKGSPEDNEQKQLFVEQHKHYLDEIIEQISEFSKRVILADANLDKVLSAYNKHRDKPIREQAENIIHLFTLTNLGAPAAFKYFDTTIDRKRYTSTKEVLDATLIHQSITGLYETRIDLSQLGGDGGGSSGGSPAPGGTLNIEDEYRLHETSKEPDVSLGSTWLSDFPQAWAETGGMGLAVRQAPLIIPLKATSTPVSIKQYPMSQEARLGIKPHIQRLLDQGILVPCQSPWNTPLLPVKKPGTNDYRPVQDLREVNKRVEDIHPTVPNPYNLLSGLPPSHQWYTVLDLKDAFFCLRLHPTSQPLFAFEWRDPEMGISGQLTWTRLPQGFKNSPTLFNEALHRDLADFRIQHPDLILLQYVDDLLLAATSELDCQQGTRALLQTLGNLGYRASAKKAQICQKQVKYLGYLLKEGQRWLTEARKETVMGQPTPKTPRQLREFLGKAGFCRLFIPGFAEMAAPLYPLTKPGTLFNWGPDQQKAYQEIKQALLTAPALGLPDLTKPFELFVDEKQGYAKGVLTQKLGPWRRPVAYLSKKLDPVAAGWPPCLRMVAAIAVLTKDAGKLTMGQPLVILAPHAVEALVKQPPDRWLSNARMTHYQALLLDTDRVQFGPVVALNPATLLPLPEEGLQHNCLDILAEAHGTRPDLTDQPLPDADHTWYTDGSSLLQEGQRKAGAAVTTETEVIWAKALPAGTSAQRAELIALTQALKMAEGKKLNVYTDSRYAFATAHIHGEIYRRRGWLTSEGKEIKNKDEILALLKALFLPKRLSIIHCPGHQKGHSAEARGNRMADQAARKAAITETPDTSTLLIENSSPSGGSKRTADGSEFEAGKRTADGSEFEKRTADGSEFESPKKKAKVE

SEQ ID NO: 2700 - protein, 2113 aa, synthetic construct
MPAAKRVKLDGGDKKYSIGLDIGTNSVGWAVITDEYKVPSKKFKVLGNTDRHSIKKNLIGALLFDSGETAEATRLKRTARRRYTRRKNRICYLQEIFSNEMAKVDDSFFHRLEESFLVEEDKKHERHPIFGNIVDEVAYHEKYPTIYHLRKKLVDSTDKADLRLIYLALAHMIKFRGHFLIEGDLNPDNSDVDKLFIQLVQTYNQLFEENPINASGVDAKAILSARLSKSRRLENLIAQLPGEKKNGLFGNLIALSLGLTPNFKSNFDLAEDAKLQLSKDTYDDDLDNLLAQIGDQYADLFLAAKNLSDAILLSDILRVNTEITKAPLSASMIKRYDEHHQDLTLLKALVRQQLPEKYKEIFFDQSKNGYAGYIDGGASQEEFYKFIKPILEKMDGTEELLVKLNREDLLRKQRTFDNGSIPHQIHLGELHAILRRQEDFYPFLKDNREKIEKILTFRIPYYVGPLARGNSRFAWMTRKSEETITPWNFEEVVDKGASAQSFIERMTNFDKNLPNEKVLPKHSLLYEYFTVYNELTKVKYVTEGMRKPAFLSGEQKKAIVDLLFKTNRKVTVKQLKEDYFKKIECFDSVEISGVEDRFNASLGTYHDLLKIIKDKDFLDNEENEDILEDIVLTLTLFEDREMIEERLKTYAHLFDDKVMKQLKRRRYTGWGRLSRKLINGIRDKQSGKTILDFLKSDGFANRNFMQLIHDDSLTFKEDIQKAQVSGQGDSLHEHIANLAGSPAIKKGILQTVKVVDELVKVMGRHKPENIVIEMARENQTTQKGQKNSRERMKRIEEGIKELGSQILKEHPVENTQLQNEKLYLYYLQNGRDMYVDQELDINRLSDYDVDHIVPQSFLKDDSIDNKVLTRSDKARGKSDNVPSEEVVKKMKNYWRQLLNAKLITQRKFDNLTKAERGGLSELDKAGFIKRQLVETRQITKHVAQILDSRMNTKYDENDKLIREVKVITLKSKLVSDFRKDFQFYKVREINNYHHAHDAYLNAVVGTALIKKYPKLESEFVYGDYKVYDVRKMIAKSEQEIGKATAKYFFYSNIMNFFKTEITLANGEIRKRPLIETNGETGEIVWDKGRDFATVRKVLSMPQVNIVKKTEVQTGGFSKESILPKRNSDKLIARKKDWDPKKYGGFDSPTVAYSVLVVAKVEKGKSKKLKSVKELLGITIMERSSFEKNPIDFLEAKGYKEVKKDLIIKLPKYSLFELENGRKRMLASAGELQKGNELALPSKYVNFLYLASHYEKLKGSPEDNEQKQLFVEQHKHYLDEIIEQISEFSKRVILADANLDKVLSAYNKHRDKPIREQAENIIHLFTLTNLGAPAAFKYFDTTIDRKRYTSTKEVLDATLIHQSITGLYETRIDLSQLGGDGGGGSEAAAKGGTLNIEDEYRLHETSKEPDVSLGSTWLSDFPQAWAETGGMGLAVRQAPLIIPLKATSTPVSIKQYPMSQEARLGIKPHIQRLLDQGILVPCQSPWNTPLLPVKKPGTNDYRPVQDLREVNKRVEDIHPTVPNPYNLLSGLPPSHQWYTVLDLKDAFFCLRLHPTSQPLFAFEWRDPEMGISGQLTWTRLPQGFKNSPTLFNEALHRDLADFRIQHPDLILLQYVDDLLLAATSELDCQQGTRALLQTLGNLGYRASAKKAQICQKQVKYLGYLLKEGQRWLTEARKETVMGQPTPKTPRQLREFLGKAGFCRLFIPGFAEMAAPLYPLTKPGTLFNWGPDQQKAYQEIKQALLTAPALGLPDLTKPFELFVDEKQGYAKGVLTQKLGPWRRPVAYLSKKLDPVAAGWPPCLRMVAAIAVLTKDAGKLTMGQPLVILAPHAVEALVKQPPDRWLSNARMTHYQALLLDTDRVQFGPVVALNPATLLPLPEEGLQHNCLDILAEAHGTRPDLTDQPLPDADHTWYTDGSSLLQEGQRKAGAAVTTETEVIWAKALPAGTSAQRAELIALTQALKMAEGKKLNVYTDSRYAFATAHIHGEIYRRRGWLTSEGKEIKNKDEILALLKALFLPKRLSIIHCPGHQKGHSAEARGNRMADQAARKAAITETPDTSTLLIENSSPSGGSKRTADGSEFEAGKRTADGSEFEKRTADGSEFESPKKKAKVE

SEQ ID NO: 2701 - protein, 2116 aa, synthetic construct
MPAAKRVKLDGGDKKYSIGLDIGTNSVGWAVITDEYKVPSKKFKVLGNTDRHSIKKNLIGALLFDSGETAEATRLKRTARRRYTRRKNRICYLQEIFSNEMAKVDDSFFHRLEESFLVEEDKKHERHPIFGNIVDEVAYHEKYPTIYHLRKKLVDSTDKADLRLIYLALAHMIKFRGHFLIEGDLNPDNSDVDKLFIQLVQTYNQLFEENPINASGVDAKAILSARLSKSRRLENLIAQLPGEKKNGLFGNLIALSLGLTPNFKSNFDLAEDAKLQLSKDTYDDDLDNLLAQIGDQYADLFLAAKNLSDAILLSDILRVNTEITKAPLSASMIKRYDEHHQDLTLLKALVRQQLPEKYKEIFFDQSKNGYAGYIDGGASQEEFYKFIKPILEKMDGTEELLVKLNREDLLRKQRTFDNGSIPHQIHLGELHAILRRQEDFYPFLKDNREKIEKILTFRIPYYVGPLARGNSRFAWMTRKSEETITPWNFEEVVDKGASAQSFIERMTNFDKNLPNEKVLPKHSLLYEYFTVYNELTKVKYVTEGMRKPAFLSGEQKKAIVDLLFKTNRKVTVKQLKEDYFKKIECFDSVEISGVEDRFNASLGTYHDLLKIIKDKDFLDNEENEDILEDIVLTLTLFEDREMIEERLKTYAHLFDDKVMKQLKRRRYTGWGRLSRKLINGIRDKQSGKTILDFLKSDGFANRNFMQLIHDDSLTFKEDIQKAQVSGQGDSLHEHIANLAGSPAIKKGILQTVKVVDELVKVMGRHKPENIVIEMARENQTTQKGQKNSRERMKRIEEGIKELGSQILKEHPVENTQLQNEKLYLYYLQNGRDMYVDQELDINRLSDYDVDHIVPQSFLKDDSIDNKVLTRSDKARGKSDNVPSEEVVKKMKNYWRQLLNAKLITQRKFDNLTKAERGGLSELDKAGFIKRQLVETRQITKHVAQILDSRMNTKYDENDKLIREVKVITLKSKLVSDFRKDFQFYKVREINNYHHAHDAYLNAVVGTALIKKYPKLESEFVYGDYKVYDVRKMIAKSEQEIGKATAKYFFYSNIMNFFKTEITLANGEIRKRPLIETNGETGEIVWDKGRDFATVRKVLSMPQVNIVKKTEVQTGGFSKESILPKRNSDKLIARKKDWDPKKYGGFDSPTVAYSVLVVAKVEKGKSKKLKSVKELLGITIMERSSFEKNPIDFLEAKGYKEVKKDLIIKLPKYSLFELENGRKRMLASAGELQKGNELALPSKYVNFLYLASHYEKLKGSPEDNEQKQLFVEQHKHYLDEIIEQISEFSKRVILADANLDKVLSAYNKHRDKPIREQAENIIHLFTLTNLGAPAAFKYFDTTIDRKRYTSTKEVLDATLIHQSITGLYETRIDLSQLGGDGGGGSPAPEAAAKGGTLNIEDEYRLHETSKEPDVSLGSTWLSDFPQAWAETGGMGLAVRQAPLIIPLKATSTPVSIKQYPMSQEARLGIKPHIQRLLDQGILVPCQSPWNTPLLPVKKPGTNDYRPVQDLREVNKRVEDIHPTVPNPYNLLSGLPPSHQWYTVLDLKDAFFCLRLHPTSQPLFAFEWRDPEMGISGQLTWTRLPQGFKNSPTLFNEALHRDLADFRIQHPDLILLQYVDDLLLAATSELDCQQGTRALLQTLGNLGYRASAKKAQICQKQVKYLGYLLKEGQRWLTEARKETVMGQPTPKTPRQLREFLGKAGFCRLFIPGFAEMAAPLYPLTKPGTLFNWGPDQQKAYQEIKQALLTAPALGLPDLTKPFELFVDEKQGYAKGVLTQKLGPWRRPVAYLSKKLDPVAAGWPPCLRMVAAIAVLTKDAGKLTMGQPLVILAPHAVEALVKQPPDRWLSNARMTHYQALLLDTDRVQFGPVVALNPATLLPLPEEGLQHNCLDILAEAHGTRPDLTDQPLPDADHTWYTDGSSLLQEGQRKAGAAVTTETEVIWAKALPAGTSAQRAELIALTQALKMAEGKKLNVYTDSRYAFATAHIHGEIYRRRGWLTSEGKEIKNKDEILALLKALFLPKRLSIIHCPGHQKGHSAEARGNRMADQAARKAAITETPDTSTLLIENSSPSGGSKRTADGSEFEAGKRTADGSEFEKRTADGSEFESPKKKAKVE

SEQ ID NO: 2702 - protein, 2114 aa, synthetic construct
MPAAKRVKLDGGDKKYSIGLDIGTNSVGWAVITDEYKVPSKKFKVLGNTDRHSIKKNLIGALLFDSGETAEATRLKRTARRRYTRRKNRICYLQEIFSNEMAKVDDSFFHRLEESFLVEEDKKHERHPIFGNIVDEVAYHEKYPTIYHLRKKLVDSTDKADLRLIYLALAHMIKFRGHFLIEGDLNPDNSDVDKLFIQLVQTYNQLFEENPINASGVDAKAILSARLSKSRRLENLIAQLPGEKKNGLFGNLIALSLGLTPNFKSNFDLAEDAKLQLSKDTYDDDLDNLLAQIGDQYADLFLAAKNLSDAILLSDILRVNTEITKAPLSASMIKRYDEHHQDLTLLKALVRQQLPEKYKEIFFDQSKNGYAGYIDGGASQEEFYKFIKPILEKMDGTEELLVKLNREDLLRKQRTFDNGSIPHQIHLGELHAILRRQEDFYPFLKDNREKIEKILTFRIPYYVGPLARGNSRFAWMTRKSEETITPWNFEEVVDKGASAQSFIERMTNFDKNLPNEKVLPKHSLLYEYFTVYNELTKVKYVTEGMRKPAFLSGEQKKAIVDLLFKTNRKVTVKQLKEDYFKKIECFDSVEISGVEDRFNASLGTYHDLLKIIKDKDFLDNEENEDILEDIVLTLTLFEDREMIEERLKTYAHLFDDKVMKQLKRRRYTGWGRLSRKLINGIRDKQSGKTILDFLKSDGFANRNFMQLIHDDSLTFKEDIQKAQVSGQGDSLHEHIANLAGSPAIKKGILQTVKVVDELVKVMGRHKPENIVIEMARENQTTQKGQKNSRERMKRIEEGIKELGSQILKEHPVENTQLQNEKLYLYYLQNGRDMYVDQELDINRLSDYDVDHIVPQSFLKDDSIDNKVLTRSDKARGKSDNVPSEEVVKKMKNYWRQLLNAKLITQRKFDNLTKAERGGLSELDKAGFIKRQLVETRQITKHVAQILDSRMNTKYDENDKLIREVKVITLKSKLVSDFRKDFQFYKVREINNYHHAHDAYLNAVVGTALIKKYPKLESEFVYGDYKVYDVRKMIAKSEQEIGKATAKYFFYSNIMNFFKTEITLANGEIRKRPLIETNGETGEIVWDKGRDFATVRKVLSMPQVNIVKKTEVQTGGFSKESILPKRNSDKLIARKKDWDPKKYGGFDSPTVAYSVLVVAKVEKGKSKKLKSVKELLGITIMERSSFEKNPIDFLEAKGYKEVKKDLIIKLPKYSLFELENGRKRMLASAGELQKGNELALPSKYVNFLYLASHYEKLKGSPEDNEQKQLFVEQHKHYLDEIIEQISEFSKRVILADANLDKVLSAYNKHRDKPIREQAENIIHLFTLTNLGAPAAFKYFDTTIDRKRYTSTKEVLDATLIHQSITGLYETRIDLSQLGGDGGGGSGGGGSSGGTLNIEDEYRLHETSKEPDVSLGSTWLSDFPQAWAETGGMGLAVRQAPLIIPLKATSTPVSIKQYPMSQEARLGIKPHIQRLLDQGILVPCQSPWNTPLLPVKKPGTNDYRPVQDLREVNKRVEDIHPTVPNPYNLLSGLPPSHQWYTVLDLKDAFFCLRLHPTSQPLFAFEWRDPEMGISGQLTWTRLPQGFKNSPTLFNEALHRDLADFRIQHPDLILLQYVDDLLLAATSELDCQQGTRALLQTLGNLGYRASAKKAQICQKQVKYLGYLLKEGQRWLTEARKETVMGQPTPKTPRQLREFLGKAGFCRLFIPGFAEMAAPLYPLTKPGTLFNWGPDQQKAYQEIKQALLTAPALGLPDLTKPFELFVDEKQGYAKGVLTQKLGPWRRPVAYLSKKLDPVAAGWPPCLRMVAAIAVLTKDAGKLTMGQPLVILAPHAVEALVKQPPDRWLSNARMTHYQALLLDTDRVQFGPVVALNPATLLPLPEEGLQHNCLDILAEAHGTRPDLTDQPLPDADHTWYTDGSSLLQEGQRKAGAAVTTETEVIWAKALPAGTSAQRAELIALTQALKMAEGKKLNVYTDSRYAFATAHIHGEIYRRRGWLTSEGKEIKNKDEILALLKALFLPKRLSIIHCPGHQKGHSAEARGNRMADQAARKAAITETPDTSTLLIENSSPSGGSKRTADGSEFEAGKRTADGSEFEKRTADGSEFESPKKKAKVE

SEQ ID NO: 2703 - protein, 2116 aa, synthetic construct
MPAAKRVKLDGGDKKYSIGLDIGTNSVGWAVITDEYKVPSKKFKVLGNTDRHSIKKNLIGALLFDSGETAEATRLKRTARRRYTRRKNRICYLQEIFSNEMAKVDDSFFHRLEESFLVEEDKKHERHPIFGNIVDEVAYHEKYPTIYHLRKKLVDSTDKADLRLIYLALAHMIKFRGHFLIEGDLNPDNSDVDKLFIQLVQTYNQLFEENPINASGVDAKAILSARLSKSRRLENLIAQLPGEKKNGLFGNLIALSLGLTPNFKSNFDLAEDAKLQLSKDTYDDDLDNLLAQIGDQYADLFLAAKNLSDAILLSDILRVNTEITKAPLSASMIKRYDEHHQDLTLLKALVRQQLPEKYKEIFFDQSKNGYAGYIDGGASQEEFYKFIKPILEKMDGTEELLVKLNREDLLRKQRTFDNGSIPHQIHLGELHAILRRQEDFYPFLKDNREKIEKILTFRIPYYVGPLARGNSRFAWMTRKSEETITPWNFEEVVDKGASAQSFIERMTNFDKNLPNEKVLPKHSLLYEYFTVYNELTKVKYVTEGMRKPAFLSGEQKKAIVDLLFKTNRKVTVKQLKEDYFKKIECFDSVEISGVEDRFNASLGTYHDLLKIIKDKDFLDNEENEDILEDIVLTLTLFEDREMIEERLKTYAHLFDDKVMKQLKRRRYTGWGRLSRKLINGIRDKQSGKTILDFLKSDGFANRNFMQLIHDDSLTFKEDIQKAQVSGQGDSLHEHIANLAGSPAIKKGILQTVKVVDELVKVMGRHKPENIVIEMARENQTTQKGQKNSRERMKRIEEGIKELGSQILKEHPVENTQLQNEKLYLYYLQNGRDMYVDQELDINRLSDYDVDHIVPQSFLKDDSIDNKVLTRSDKARGKSDNVPSEEVVKKMKNYWRQLLNAKLITQRKFDNLTKAERGGLSELDKAGFIKRQLVETRQITKHVAQILDSRMNTKYDENDKLIREVKVITLKSKLVSDFRKDFQFYKVREINNYHHAHDAYLNAVVGTALIKKYPKLESEFVYGDYKVYDVRKMIAKSEQEIGKATAKYFFYSNIMNFFKTEITLANGEIRKRPLIETNGETGEIVWDKGRDFATVRKVLSMPQVNIVKKTEVQTGGFSKESILPKRNSDKLIARKKDWDPKKYGGFDSPTVAYSVLVVAKVEKGKSKKLKSVKELLGITIMERSSFEKNPIDFLEAKGYKEVKKDLIIKLPKYSLFELENGRKRMLASAGELQKGNELALPSKYVNFLYLASHYEKLKGSPEDNEQKQLFVEQHKHYLDEIIEQISEFSKRVILADANLDKVLSAYNKHRDKPIREQAENIIHLFTLTNLGAPAAFKYFDTTIDRKRYTSTKEVLDATLIHQSITGLYETRIDLSQLGGDGGGSSEAAAKGGSGGTLNIEDEYRLHETSKEPDVSLGSTWLSDFPQAWAETGGMGLAVRQAPLIIPLKATSTPVSIKQYPMSQEARLGIKPHIQRLLDQGILVPCQSPWNTPLLPVKKPGTNDYRPVQDLREVNKRVEDIHPTVPNPYNLLSGLPPSHQWYTVLDLKDAFFCLRLHPTSQPLFAFEWRDPEMGISGQLTWTRLPQGFKNSPTLFNEALHRDLADFRIQHPDLILLQYVDDLLLAATSELDCQQGTRALLQTLGNLGYRASAKKAQICQKQVKYLGYLLKEGQRWLTEARKETVMGQPTPKTPRQLREFLGKAGFCRLFIPGFAEMAAPLYPLTKPGTLFNWGPDQQKAYQEIKQALLTAPALGLPDLTKPFELFVDEKQGYAKGVLTQKLGPWRRPVAYLSKKLDPVAAGWPPCLRMVAAIAVLTKDAGKLTMGQPLVILAPHAVEALVKQPPDRWLSNARMTHYQALLLDTDRVQFGPVVALNPATLLPLPEEGLQHNCLDILAEAHGTRPDLTDQPLPDADHTWYTDGSSLLQEGQRKAGAAVTTETEVIWAKALPAGTSAQRAELIALTQALKMAEGKKLNVYTDSRYAFATAHIHGEIYRRRGWLTSEGKEIKNKDEILALLKALFLPKRLSIIHCPGHQKGHSAEARGNRMADQAARKAAITETPDTSTLLIENSSPSGGSKRTADGSEFEAGKRTADGSEFEKRTADGSEFESPKKKAKVE

SEQ ID NO: 2704 - protein, 2094 aa, synthetic construct
MPAAKRVKLDGGDKKYSIGLDIGTNSVGWAVITDEYKVPSKKFKVLGNTDRHSIKKNLIGALLFDSGETAEATRLKRTARRRYTRRKNRICYLQEIFSNEMAKVDDSFFHRLEESFLVEEDKKHERHPIFGNIVDEVAYHEKYPTIYHLRKKLVDSTDKADLRLIYLALAHMIKFRGHFLIEGDLNPDNSDVDKLFIQLVQTYNQLFEENPINASGVDAKAILSARLSKSRRLENLIAQLPGEKKNGLFGNLIALSLGLTPNFKSNFDLAEDAKLQLSKDTYDDDLDNLLAQIGDQYADLFLAAKNLSDAILLSDILRVNTEITKAPLSASMIKRYDEHHQDLTLLKALVRQQLPEKYKEIFFDQSKNGYAGYIDGGASQEEFYKFIKPILEKMDGTEELLVKLNREDLLRKQRTFDNGSIPHQIHLGELHAILRRQEDFYPFLKDNREKIEKILTFRIPYYVGPLARGNSRFAWMTRKSEETITPWNFEEVVDKGASAQSFIERMTNFDKNLPNEKVLPKHSLLYEYFTVYNELTKVKYVTEGMRKPAFLSGEQKKAIVDLLFKTNRKVTVKQLKEDYFKKIECFDSVEISGVEDRFNASLGTYHDLLKIIKDKDFLDNEENEDILEDIVLTLTLFEDREMIEERLKTYAHLFDDKVMKQLKRRRYTGWGRLSRKLINGIRDKQSGKTILDFLKSDGFANRNFMQLIHDDSLTFKEDIQKAQVSGQGDSLHEHIANLAGSPAIKKGILQTVKVVDELVKVMGRHKPENIVIEMARENQTTQKGQKNSRERMKRIEEGIKELGSQILKEHPVENTQLQNEKLYLYYLQNGRDMYVDQELDINRLSDYDVDHIVPQSFLKDDSIDNKVLTRSDKARGKSDNVPSEEVVKKMKNYWRQLLNAKLITQRKFDNLTKAERGGLSELDKAGFIKRQLVETRQITKHVAQILDSRMNTKYDENDKLIREVKVITLKSKLVSDFRKDFQFYKVREINNYHHAHDAYLNAVVGTALIKKYPKLESEFVYGDYKVYDVRKMIAKSEQEIGKATAKYFFYSNIMNFFKTEITLANGEIRKRPLIETNGETGEIVWDKGRDFATVRKVLSMPQVNIVKKTEVQTGGFSKESILPKRNSDKLIARKKDWDPKKYGGFDSPTVAYSVLVVAKVEKGKSKKLKSVKELLGITIMERSSFEKNPIDFLEAKGYKEVKKDLIIKLPKYSLFELENGRKRMLASAGELQKGNELALPSKYVNFLYLASHYEKLKGSPEDNEQKQLFVEQHKHYLDEIIEQISEFSKRVILADANLDKVLSAYNKHRDKPIREQAENIIHLFTLTNLGAPAAFKYFDTTIDRKRYTSTKEVLDATLIHQSITGLYETRIDLSQLGGDGGGGSPAPGSSGGTLNIEDEHRLHETSKEPDVSLGSTWLSDFPQAWAETGGMGLAVRQAPLIIPLKATSTPVSIKQYPMSQEARLGIKPHIQRLLDQGILVPCQSPWNTPLLPVKKPGTNDYRPVQDLREVNKRVEDIHPTVPNPYNLLSGLPPSHQWYTVLDLKDAFFCLRLHPTSQPLFAFEWRDPEMGISGQLTWTRLPQGFKNSPTLFDEALHRDLADFRIQHPDLILLQYVDDLLLAATSELDCQQGTRALLQTLGNLGYRASAKKAQICQKQVKYLGYLLKEGQRWLTEARKETVMGQPTPKTPRQLREFLGTAGFCRLWIPGFAEMAAPLYPLTKTGTLFNWGPDQQKAYQEIKQALLTAPALGLPDLTKPFELFVDEKQGYAKGVLTQKLGPWRRPVAYLSKKLDPVAAGWPPCLRMVAAIAVLTKDAGKLTMGQPLVILAPHAVEALVKQPPDRWLSNARMTHYQALLLDTDRVQFGPVVALNPATLLPLPEEGLQHNCLDILAEAHGTRPDLTDQPLPDADHTWYTDGSSLLQEGQRKAGAAVTTETEVIWAKALPAGTSAQRAELIALTQALKMAEGKKLNVYTDSRYAFATAHIHGEIYRRRGLLTSEGKEIKNKDEILALLKALFLPKRLSIIHCPGHQKGHSAEARGNRMADQAARKAAITETPDTSTLLAGKRTADGSEFEKRTADGSEFESPKKKAKVE

SEQ ID NO: 2705 - protein, 2096 aa, synthetic construct
MPAAKRVKLDGGDKKYSIGLDIGTNSVGWAVITDEYKVPSKKFKVLGNTDRHSIKKNLIGALLFDSGETAEATRLKRTARRRYTRRKNRICYLQEIFSNEMAKVDDSFFHRLEESFLVEEDKKHERHPIFGNIVDEVAYHEKYPTIYHLRKKLVDSTDKADLRLIYLALAHMIKFRGHFLIEGDLNPDNSDVDKLFIQLVQTYNQLFEENPINASGVDAKAILSARLSKSRRLENLIAQLPGEKKNGLFGNLIALSLGLTPNFKSNFDLAEDAKLQLSKDTYDDDLDNLLAQIGDQYADLFLAAKNLSDAILLSDILRVNTEITKAPLSASMIKRYDEHHQDLTLLKALVRQQLPEKYKEIFFDQSKNGYAGYIDGGASQEEFYKFIKPILEKMDGTEELLVKLNREDLLRKQRTFDNGSIPHQIHLGELHAILRRQEDFYPFLKDNREKIEKILTFRIPYYVGPLARGNSRFAWMTRKSEETITPWNFEEVVDKGASAQSFIERMTNFDKNLPNEKVLPKHSLLYEYFTVYNELTKVKYVTEGMRKPAFLSGEQKKAIVDLLFKTNRKVTVKQLKEDYFKKIECFDSVEISGVEDRFNASLGTYHDLLKIIKDKDFLDNEENEDILEDIVLTLTLFEDREMIEERLKTYAHLFDDKVMKQLKRRRYTGWGRLSRKLINGIRDKQSGKTILDFLKSDGFANRNFMQLIHDDSLTFKEDIQKAQVSGQGDSLHEHIANLAGSPAIKKGILQTVKVVDELVKVMGRHKPENIVIEMARENQTTQKGQKNSRERMKRIEEGIKELGSQILKEHPVENTQLQNEKLYLYYLQNGRDMYVDQELDINRLSDYDVDHIVPQSFLKDDSIDNKVLTRSDKARGKSDNVPSEEVVKKMKNYWRQLLNAKLITQRKFDNLTKAERGGLSELDKAGFIKRQLVETRQITKHVAQILDSRMNTKYDENDKLIREVKVITLKSKLVSDFRKDFQFYKVREINNYHHAHDAYLNAVVGTALIKKYPKLESEFVYGDYKVYDVRKMIAKSEQEIGKATAKYFFYSNIMNFFKTEITLANGEIRKRPLIETNGETGEIVWDKGRDFATVRKVLSMPQVNIVKKTEVQTGGFSKESILPKRNSDKLIARKKDWDPKKYGGFDSPTVAYSVLVVAKVEKGKSKKLKSVKELLGITIMERSSFEKNPIDFLEAKGYKEVKKDLIIKLPKYSLFELENGRKRMLASAGELQKGNELALPSKYVNFLYLASHYEKLKGSPEDNEQKQLFVEQHKHYLDEIIEQISEFSKRVILADANLDKVLSAYNKHRDKPIREQAENIIHLFTLTNLGAPAAFKYFDTTIDRKRYTSTKEVLDATLIHQSITGLYETRIDLSQLGGDGGEAAAKGSSGGGGGTLNIEDEHRLHETSKEPDVSLGSTWLSDFPQAWAETGGMGLAVRQAPLIIPLKATSTPVSIKQYPMSQEARLGIKPHIQRLLDQGILVPCQSPWNTPLLPVKKPGTNDYRPVQDLREVNKRVEDIHPTVPNPYNLLSGLPPSHQWYTVLDLKDAFFCLRLHPTSQPLFAFEWRDPEMGISGQLTWTRLPQGFKNSPTLFDEALHRDLADFRIQHPDLILLQYVDDLLLAATSELDCQQGTRALLQTLGNLGYRASAKKAQICQKQVKYLGYLLKEGQRWLTEARKETVMGQPTPKTPRQLREFLGTAGFCRLWIPGFAEMAAPLYPLTKTGTLFNWGPDQQKAYQEIKQALLTAPALGLPDLTKPFELFVDEKQGYAKGVLTQKLGPWRRPVAYLSKKLDPVAAGWPPCLRMVAAIAVLTKDAGKLTMGQPLVILAPHAVEALVKQPPDRWLSNARMTHYQALLLDTDRVQFGPVVALNPATLLPLPEEGLQHNCLDILAEAHGTRPDLTDQPLPDADHTWYTDGSSLLQEGQRKAGAAVTTETEVIWAKALPAGTSAQRAELIALTQALKMAEGKKLNVYTDSRYAFATAHIHGEIYRRRGLLTSEGKEIKNKDEILALLKALFLPKRLSIIHCPGHQKGHSAEARGNRMADQAARKAAITETPDTSTLLAGKRTADGSEFEKRTADGSEFESPKKKAKVE

SEQ ID NO: 2706 - protein, 2096 aa, synthetic construct
MPAAKRVKLDGGDKKYSIGLDIGTNSVGWAVITDEYKVPSKKFKVLGNTDRHSIKKNLIGALLFDSGETAEATRLKRTARRRYTRRKNRICYLQEIFSNEMAKVDDSFFHRLEESFLVEEDKKHERHPIFGNIVDEVAYHEKYPTIYHLRKKLVDSTDKADLRLIYLALAHMIKFRGHFLIEGDLNPDNSDVDKLFIQLVQTYNQLFEENPINASGVDAKAILSARLSKSRRLENLIAQLPGEKKNGLFGNLIALSLGLTPNFKSNFDLAEDAKLQLSKDTYDDDLDNLLAQIGDQYADLFLAAKNLSDAILLSDILRVNTEITKAPLSASMIKRYDEHHQDLTLLKALVRQQLPEKYKEIFFDQSKNGYAGYIDGGASQEEFYKFIKPILEKMDGTEELLVKLNREDLLRKQRTFDNGSIPHQIHLGELHAILRRQEDFYPFLKDNREKIEKILTFRIPYYVGPLARGNSRFAWMTRKSEETITPWNFEEVVDKGASAQSFIERMTNFDKNLPNEKVLPKHSLLYEYFTVYNELTKVKYVTEGMRKPAFLSGEQKKAIVDLLFKTNRKVTVKQLKEDYFKKIECFDSVEISGVEDRFNASLGTYHDLLKIIKDKDFLDNEENEDILEDIVLTLTLFEDREMIEERLKTYAHLFDDKVMKQLKRRRYTGWGRLSRKLINGIRDKQSGKTILDFLKSDGFANRNFMQLIHDDSLTFKEDIQKAQVSGQGDSLHEHIANLAGSPAIKKGILQTVKVVDELVKVMGRHKPENIVIEMARENQTTQKGQKNSRERMKRIEEGIKELGSQILKEHPVENTQLQNEKLYLYYLQNGRDMYVDQELDINRLSDYDVDHIVPQSFLKDDSIDNKVLTRSDKARGKSDNVPSEEVVKKMKNYWRQLLNAKLITQRKFDNLTKAERGGLSELDKAGFIKRQLVETRQITKHVAQILDSRMNTKYDENDKLIREVKVITLKSKLVSDFRKDFQFYKVREINNYHHAHDAYLNAVVGTALIKKYPKLESEFVYGDYKVYDVRKMIAKSEQEIGKATAKYFFYSNIMNFFKTEITLANGEIRKRPLIETNGETGEIVWDKGRDFATVRKVLSMPQVNIVKKTEVQTGGFSKESILPKRNSDKLIARKKDWDPKKYGGFDSPTVAYSVLVVAKVEKGKSKKLKSVKELLGITIMERSSFEKNPIDFLEAKGYKEVKKDLIIKLPKYSLFELENGRKRMLASAGELQKGNELALPSKYVNFLYLASHYEKLKGSPEDNEQKQLFVEQHKHYLDEIIEQISEFSKRVILADANLDKVLSAYNKHRDKPIREQAENIIHLFTLTNLGAPAAFKYFDTTIDRKRYTSTKEVLDATLIHQSITGLYETRIDLSQLGGDGGGSSGGGEAAAKGGTLNIEDEHRLHETSKEPDVSLGSTWLSDFPQAWAETGGMGLAVRQAPLIIPLKATSTPVSIKQYPMSQEARLGIKPHIQRLLDQGILVPCQSPWNTPLLPVKKPGTNDYRPVQDLREVNKRVEDIHPTVPNPYNLLSGLPPSHQWYTVLDLKDAFFCLRLHPTSQPLFAFEWRDPEMGISGQLTWTRLPQGFKNSPTLFDEALHRDLADFRIQHPDLILLQYVDDLLLAATSELDCQQGTRALLQTLGNLGYRASAKKAQICQKQVKYLGYLLKEGQRWLTEARKETVMGQPTPKTPRQLREFLGTAGFCRLWIPGFAEMAAPLYPLTKTGTLFNWGPDQQKAYQEIKQALLTAPALGLPDLTKPFELFVDEKQGYAKGVLTQKLGPWRRPVAYLSKKLDPVAAGWPPCLRMVAAIAVLTKDAGKLTMGQPLVILAPHAVEALVKQPPDRWLSNARMTHYQALLLDTDRVQFGPVVALNPATLLPLPEEGLQHNCLDILAEAHGTRPDLTDQPLPDADHTWYTDGSSLLQEGQRKAGAAVTTETEVIWAKALPAGTSAQRAELIALTQALKMAEGKKLNVYTDSRYAFATAHIHGEIYRRRGLLTSEGKEIKNKDEILALLKALFLPKRLSIIHCPGHQKGHSAEARGNRMADQAARKAAITETPDTSTLLAGKRTADGSEFEKRTADGSEFESPKKKAKVE

SEQ ID NO: 2707 - protein, 2093 aa, synthetic construct
MPAAKRVKLDGGDKKYSIGLDIGTNSVGWAVITDEYKVPSKKFKVLGNTDRHSIKKNLIGALLFDSGETAEATRLKRTARRRYTRRKNRICYLQEIFSNEMAKVDDSFFHRLEESFLVEEDKKHERHPIFGNIVDEVAYHEKYPTIYHLRKKLVDSTDKADLRLIYLALAHMIKFRGHFLIEGDLNPDNSDVDKLFIQLVQTYNQLFEENPINASGVDAKAILSARLSKSRRLENLIAQLPGEKKNGLFGNLIALSLGLTPNFKSNFDLAEDAKLQLSKDTYDDDLDNLLAQIGDQYADLFLAAKNLSDAILLSDILRVNTEITKAPLSASMIKRYDEHHQDLTLLKALVRQQLPEKYKEIFFDQSKNGYAGYIDGGASQEEFYKFIKPILEKMDGTEELLVKLNREDLLRKQRTFDNGSIPHQIHLGELHAILRRQEDFYPFLKDNREKIEKILTFRIPYYVGPLARGNSRFAWMTRKSEETITPWNFEEVVDKGASAQSFIERMTNFDKNLPNEKVLPKHSLLYEYFTVYNELTKVKYVTEGMRKPAFLSGEQKKAIVDLLFKTNRKVTVKQLKEDYFKKIECFDSVEISGVEDRFNASLGTYHDLLKIIKDKDFLDNEENEDILEDIVLTLTLFEDREMIEERLKTYAHLFDDKVMKQLKRRRYTGWGRLSRKLINGIRDKQSGKTILDFLKSDGFANRNFMQLIHDDSLTFKEDIQKAQVSGQGDSLHEHIANLAGSPAIKKGILQTVKVVDELVKVMGRHKPENIVIEMARENQTTQKGQKNSRERMKRIEEGIKELGSQILKEHPVENTQLQNEKLYLYYLQNGRDMYVDQELDINRLSDYDVDHIVPQSFLKDDSIDNKVLTRSDKARGKSDNVPSEEVVKKMKNYWRQLLNAKLITQRKFDNLTKAERGGLSELDKAGFIKRQLVETRQITKHVAQILDSRMNTKYDENDKLIREVKVITLKSKLVSDFRKDFQFYKVREINNYHHAHDAYLNAVVGTALIKKYPKLESEFVYGDYKVYDVRKMIAKSEQEIGKATAKYFFYSNIMNFFKTEITLANGEIRKRPLIETNGETGEIVWDKGRDFATVRKVLSMPQVNIVKKTEVQTGGFSKESILPKRNSDKLIARKKDWDPKKYGGFDSPTVAYSVLVVAKVEKGKSKKLKSVKELLGITIMERSSFEKNPIDFLEAKGYKEVKKDLIIKLPKYSLFELENGRKRMLASAGELQKGNELALPSKYVNFLYLASHYEKLKGSPEDNEQKQLFVEQHKHYLDEIIEQISEFSKRVILADANLDKVLSAYNKHRDKPIREQAENIIHLFTLTNLGAPAAFKYFDTTIDRKRYTSTKEVLDATLIHQSITGLYETRIDLSQLGGDGGEAAAKGSSGGTLNIEDEHRLHETSKEPDVSLGSTWLSDFPQAWAETGGMGLAVRQAPLIIPLKATSTPVSIKQYPMSQEARLGIKPHIQRLLDQGILVPCQSPWNTPLLPVKKPGTNDYRPVQDLREVNKRVEDIHPTVPNPYNLLSGLPPSHQWYTVLDLKDAFFCLRLHPTSQPLFAFEWRDPEMGISGQLTWTRLPQGFKNSPTLFDEALHRDLADFRIQHPDLILLQYVDDLLLAATSELDCQQGTRALLQTLGNLGYRASAKKAQICQKQVKYLGYLLKEGQRWLTEARKETVMGQPTPKTPRQLREFLGTAGFCRLWIPGFAEMAAPLYPLTKTGTLFNWGPDQQKAYQEIKQALLTAPALGLPDLTKPFELFVDEKQGYAKGVLTQKLGPWRRPVAYLSKKLDPVAAGWPPCLRMVAAIAVLTKDAGKLTMGQPLVILAPHAVEALVKQPPDRWLSNARMTHYQALLLDTDRVQFGPVVALNPATLLPLPEEGLQHNCLDILAEAHGTRPDLTDQPLPDADHTWYTDGSSLLQEGQRKAGAAVTTETEVIWAKALPAGTSAQRAELIALTQALKMAEGKKLNVYTDSRYAFATAHIHGEIYRRRGLLTSEGKEIKNKDEILALLKALFLPKRLSIIHCPGHQKGHSAEARGNRMADQAARKAAITETPDTSTLLAGKRTADGSEFEKRTADGSEFESPKKKAKVE

SEQ ID NO: 2708 - protein, 2096 aa, synthetic construct
MPAAKRVKLDGGDKKYSIGLDIGTNSVGWAVITDEYKVPSKKFKVLGNTDRHSIKKNLIGALLFDSGETAEATRLKRTARRRYTRRKNRICYLQEIFSNEMAKVDDSFFHRLEESFLVEEDKKHERHPIFGNIVDEVAYHEKYPTIYHLRKKLVDSTDKADLRLIYLALAHMIKFRGHFLIEGDLNPDNSDVDKLFIQLVQTYNQLFEENPINASGVDAKAILSARLSKSRRLENLIAQLPGEKKNGLFGNLIALSLGLTPNFKSNFDLAEDAKLQLSKDTYDDDLDNLLAQIGDQYADLFLAAKNLSDAILLSDILRVNTEITKAPLSASMIKRYDEHHQDLTLLKALVRQQLPEKYKEIFFDQSKNGYAGYIDGGASQEEFYKFIKPILEKMDGTEELLVKLNREDLLRKQRTFDNGSIPHQIHLGELHAILRRQEDFYPFLKDNREKIEKILTFRIPYYVGPLARGNSRFAWMTRKSEETITPWNFEEVVDKGASAQSFIERMTNFDKNLPNEKVLPKHSLLYEYFTVYNELTKVKYVTEGMRKPAFLSGEQKKAIVDLLFKTNRKVTVKQLKEDYFKKIECFDSVEISGVEDRFNASLGTYHDLLKIIKDKDFLDNEENEDILEDIVLTLTLFEDREMIEERLKTYAHLFDDKVMKQLKRRRYTGWGRLSRKLINGIRDKQSGKTILDFLKSDGFANRNFMQLIHDDSLTFKEDIQKAQVSGQGDSLHEHIANLAGSPAIKKGILQTVKVVDELVKVMGRHKPENIVIEMARENQTTQKGQKNSRERMKRIEEGIKELGSQILKEHPVENTQLQNEKLYLYYLQNGRDMYVDQELDINRLSDYDVDHIVPQSFLKDDSIDNKVLTRSDKARGKSDNVPSEEVVKKMKNYWRQLLNAKLITQRKFDNLTKAERGGLSELDKAGFIKRQLVETRQITKHVAQILDSRMNTKYDENDKLIREVKVITLKSKLVSDFRKDFQFYKVREINNYHHAHDAYLNAVVGTALIKKYPKLESEFVYGDYKVYDVRKMIAKSEQEIGKATAKYFFYSNIMNFFKTEITLANGEIRKRPLIETNGETGEIVWDKGRDFATVRKVLSMPQVNIVKKTEVQTGGFSKESILPKRNSDKLIARKKDWDPKKYGGFDSPTVAYSVLVVAKVEKGKSKKLKSVKELLGITIMERSSFEKNPIDFLEAKGYKEVKKDLIIKLPKYSLFELENGRKRMLASAGELQKGNELALPSKYVNFLYLASHYEKLKGSPEDNEQKQLFVEQHKHYLDEIIEQISEFSKRVILADANLDKVLSAYNKHRDKPIREQAENIIHLFTLTNLGAPAAFKYFDTTIDRKRYTSTKEVLDATLIHQSITGLYETRIDLSQLGGDGGGGGGGSEAAAKGGTLNIEDEHRLHETSKEPDVSLGSTWLSDFPQAWAETGGMGLAVRQAPLIIPLKATSTPVSIKQYPMSQEARLGIKPHIQRLLDQGILVPCQSPWNTPLLPVKKPGTNDYRPVQDLREVNKRVEDIHPTVPNPYNLLSGLPPSHQWYTVLDLKDAFFCLRLHPTSQPLFAFEWRDPEMGISGQLTWTRLPQGFKNSPTLFDEALHRDLADFRIQHPDLILLQYVDDLLLAATSELDCQQGTRALLQTLGNLGYRASAKKAQICQKQVKYLGYLLKEGQRWLTEARKETVMGQPTPKTPRQLREFLGTAGFCRLWIPGFAEMAAPLYPLTKTGTLFNWGPDQQKAYQEIKQALLTAPALGLPDLTKPFELFVDEKQGYAKGVLTQKLGPWRRPVAYLSKKLDPVAAGWPPCLRMVAAIAVLTKDAGKLTMGQPLVILAPHAVEALVKQPPDRWLSNARMTHYQALLLDTDRVQFGPVVALNPATLLPLPEEGLQHNCLDILAEAHGTRPDLTDQPLPDADHTWYTDGSSLLQEGQRKAGAAVTTETEVIWAKALPAGTSAQRAELIALTQALKMAEGKKLNVYTDSRYAFATAHIHGEIYRRRGLLTSEGKEIKNKDEILALLKALFLPKRLSIIHCPGHQKGHSAEARGNRMADQAARKAAITETPDTSTLLAGKRTADGSEFEKRTADGSEFESPKKKAKVE

SEQ ID NO: 2709 - protein, 2096 aa, synthetic construct
MPAAKRVKLDGGDKKYSIGLDIGTNSVGWAVITDEYKVPSKKFKVLGNTDRHSIKKNLIGALLFDSGETAEATRLKRTARRRYTRRKNRICYLQEIFSNEMAKVDDSFFHRLEESFLVEEDKKHERHPIFGNIVDEVAYHEKYPTIYHLRKKLVDSTDKADLRLIYLALAHMIKFRGHFLIEGDLNPDNSDVDKLFIQLVQTYNQLFEENPINASGVDAKAILSARLSKSRRLENLIAQLPGEKKNGLFGNLIALSLGLTPNFKSNFDLAEDAKLQLSKDTYDDDLDNLLAQIGDQYADLFLAAKNLSDAILLSDILRVNTEITKAPLSASMIKRYDEHHQDLTLLKALVRQQLPEKYKEIFFDQSKNGYAGYIDGGASQEEFYKFIKPILEKMDGTEELLVKLNREDLLRKQRTFDNGSIPHQIHLGELHAILRRQEDFYPFLKDNREKIEKILTFRIPYYVGPLARGNSRFAWMTRKSEETITPWNFEEVVDKGASAQSFIERMTNFDKNLPNEKVLPKHSLLYEYFTVYNELTKVKYVTEGMRKPAFLSGEQKKAIVDLLFKTNRKVTVKQLKEDYFKKIECFDSVEISGVEDRFNASLGTYHDLLKIIKDKDFLDNEENEDILEDIVLTLTLFEDREMIEERLKTYAHLFDDKVMKQLKRRRYTGWGRLSRKLINGIRDKQSGKTILDFLKSDGFANRNFMQLIHDDSLTFKEDIQKAQVSGQGDSLHEHIANLAGSPAIKKGILQTVKVVDELVKVMGRHKPENIVIEMARENQTTQKGQKNSRERMKRIEEGIKELGSQILKEHPVENTQLQNEKLYLYYLQNGRDMYVDQELDINRLSDYDVDHIVPQSFLKDDSIDNKVLTRSDKARGKSDNVPSEEVVKKMKNYWRQLLNAKLITQRKFDNLTKAERGGLSELDKAGFIKRQLVETRQITKHVAQILDSRMNTKYDENDKLIREVKVITLKSKLVSDFRKDFQFYKVREINNYHHAHDAYLNAVVGTALIKKYPKLESEFVYGDYKVYDVRKMIAKSEQEIGKATAKYFFYSNIMNFFKTEITLANGEIRKRPLIETNGETGEIVWDKGRDFATVRKVLSMPQVNIVKKTEVQTGGFSKESILPKRNSDKLIARKKDWDPKKYGGFDSPTVAYSVLVVAKVEKGKSKKLKSVKELLGITIMERSSFEKNPIDFLEAKGYKEVKKDLIIKLPKYSLFELENGRKRMLASAGELQKGNELALPSKYVNFLYLASHYEKLKGSPEDNEQKQLFVEQHKHYLDEIIEQISEFSKRVILADANLDKVLSAYNKHRDKPIREQAENIIHLFTLTNLGAPAAFKYFDTTIDRKRYTSTKEVLDATLIHQSITGLYETRIDLSQLGGDGGPAPAPAPAPAPGGTLNIEDEHRLHETSKEPDVSLGSTWLSDFPQAWAETGGMGLAVRQAPLIIPLKATSTPVSIKQYPMSQEARLGIKPHIQRLLDQGILVPCQSPWNTPLLPVKKPGTNDYRPVQDLREVNKRVEDIHPTVPNPYNLLSGLPPSHQWYTVLDLKDAFFCLRLHPTSQPLFAFEWRDPEMGISGQLTWTRLPQGFKNSPTLFDEALHRDLADFRIQHPDLILLQYVDDLLLAATSELDCQQGTRALLQTLGNLGYRASAKKAQICQKQVKYLGYLLKEGQRWLTEARKETVMGQPTPKTPRQLREFLGTAGFCRLWIPGFAEMAAPLYPLTKTGTLFNWGPDQQKAYQEIKQALLTAPALGLPDLTKPFELFVDEKQGYAKGVLTQKLGPWRRPVAYLSKKLDPVAAGWPPCLRMVAAIAVLTKDAGKLTMGQPLVILAPHAVEALVKQPPDRWLSNARMTHYQALLLDTDRVQFGPVVALNPATLLPLPEEGLQHNCLDILAEAHGTRPDLTDQPLPDADHTWYTDGSSLLQEGQRKAGAAVTTETEVIWAKALPAGTSAQRAELIALTQALKMAEGKKLNVYTDSRYAFATAHIHGEIYRRRGLLTSEGKEIKNKDEILALLKALFLPKRLSIIHCPGHQKGHSAEARGNRMADQAARKAAITETPDTSTLLAGKRTADGSEFEKRTADGSEFESPKKKAKVE

SEQ ID NO: 2710 - protein, 2091 aa, synthetic construct
MPAAKRVKLDGGDKKYSIGLDIGTNSVGWAVITDEYKVPSKKFKVLGNTDRHSIKKNLIGALLFDSGETAEATRLKRTARRRYTRRKNRICYLQEIFSNEMAKVDDSFFHRLEESFLVEEDKKHERHPIFGNIVDEVAYHEKYPTIYHLRKKLVDSTDKADLRLIYLALAHMIKFRGHFLIEGDLNPDNSDVDKLFIQLVQTYNQLFEENPINASGVDAKAILSARLSKSRRLENLIAQLPGEKKNGLFGNLIALSLGLTPNFKSNFDLAEDAKLQLSKDTYDDDLDNLLAQIGDQYADLFLAAKNLSDAILLSDILRVNTEITKAPLSASMIKRYDEHHQDLTLLKALVRQQLPEKYKEIFFDQSKNGYAGYIDGGASQEEFYKFIKPILEKMDGTEELLVKLNREDLLRKQRTFDNGSIPHQIHLGELHAILRRQEDFYPFLKDNREKIEKILTFRIPYYVGPLARGNSRFAWMTRKSEETITPWNFEEVVDKGASAQSFIERMTNFDKNLPNEKVLPKHSLLYEYFTVYNELTKVKYVTEGMRKPAFLSGEQKKAIVDLLFKTNRKVTVKQLKEDYFKKIECFDSVEISGVEDRFNASLGTYHDLLKIIKDKDFLDNEENEDILEDIVLTLTLFEDREMIEERLKTYAHLFDDKVMKQLKRRRYTGWGRLSRKLINGIRDKQSGKTILDFLKSDGFANRNFMQLIHDDSLTFKEDIQKAQVSGQGDSLHEHIANLAGSPAIKKGILQTVKVVDELVKVMGRHKPENIVIEMARENQTTQKGQKNSRERMKRIEEGIKELGSQILKEHPVENTQLQNEKLYLYYLQNGRDMYVDQELDINRLSDYDVDHIVPQSFLKDDSIDNKVLTRSDKARGKSDNVPSEEVVKKMKNYWRQLLNAKLITQRKFDNLTKAERGGLSELDKAGFIKRQLVETRQITKHVAQILDSRMNTKYDENDKLIREVKVITLKSKLVSDFRKDFQFYKVREINNYHHAHDAYLNAVVGTALIKKYPKLESEFVYGDYKVYDVRKMIAKSEQEIGKATAKYFFYSNIMNFFKTEITLANGEIRKRPLIETNGETGEIVWDKGRDFATVRKVLSMPQVNIVKKTEVQTGGFSKESILPKRNSDKLIARKKDWDPKKYGGFDSPTVAYSVLVVAKVEKGKSKKLKSVKELLGITIMERSSFEKNPIDFLEAKGYKEVKKDLIIKLPKYSLFELENGRKRMLASAGELQKGNELALPSKYVNFLYLASHYEKLKGSPEDNEQKQLFVEQHKHYLDEIIEQISEFSKRVILADANLDKVLSAYNKHRDKPIREQAENIIHLFTLTNLGAPAAFKYFDTTIDRKRYTSTKEVLDATLIHQSITGLYETRIDLSQLGGDGGGSSPAPGGTLNIEDEHRLHETSKEPDVSLGSTWLSDFPQAWAETGGMGLAVRQAPLIIPLKATSTPVSIKQYPMSQEARLGIKPHIQRLLDQGILVPCQSPWNTPLLPVKKPGTNDYRPVQDLREVNKRVEDIHPTVPNPYNLLSGLPPSHQWYTVLDLKDAFFCLRLHPTSQPLFAFEWRDPEMGISGQLTWTRLPQGFKNSPTLFDEALHRDLADFRIQHPDLILLQYVDDLLLAATSELDCQQGTRALLQTLGNLGYRASAKKAQICQKQVKYLGYLLKEGQRWLTEARKETVMGQPTPKTPRQLREFLGTAGFCRLWIPGFAEMAAPLYPLTKTGTLFNWGPDQQKAYQEIKQALLTAPALGLPDLTKPFELFVDEKQGYAKGVLTQKLGPWRRPVAYLSKKLDPVAAGWPPCLRMVAAIAVLTKDAGKLTMGQPLVILAPHAVEALVKQPPDRWLSNARMTHYQALLLDTDRVQFGPVVALNPATLLPLPEEGLQHNCLDILAEAHGTRPDLTDQPLPDADHTWYTDGSSLLQEGQRKAGAAVTTETEVIWAKALPAGTSAQRAELIALTQALKMAEGKKLNVYTDSRYAFATAHIHGEIYRRRGLLTSEGKEIKNKDEILALLKALFLPKRLSIIHCPGHQKGHSAEARGNRMADQAARKAAITETPDTSTLLAGKRTADGSEFEKRTADGSEFESPKKKAKVE

SEQ ID NO: 2711 - protein, 2131 aa, synthetic construct
MPAAKRVKLDGGDKKYSIGLDIGTNSVGWAVITDEYKVPSKKFKVLGNTDRHSIKKNLIGALLFDSGETAEATRLKRTARRRYTRRKNRICYLQEIFSNEMAKVDDSFFHRLEESFLVEEDKKHERHPIFGNIVDEVAYHEKYPTIYHLRKKLVDSTDKADLRLIYLALAHMIKFRGHFLIEGDLNPDNSDVDKLFIQLVQTYNQLFEENPINASGVDAKAILSARLSKSRRLENLIAQLPGEKKNGLFGNLIALSLGLTPNFKSNFDLAEDAKLQLSKDTYDDDLDNLLAQIGDQYADLFLAAKNLSDAILLSDILRVNTEITKAPLSASMIKRYDEHHQDLTLLKALVRQQLPEKYKEIFFDQSKNGYAGYIDGGASQEEFYKFIKPILEKMDGTEELLVKLNREDLLRKQRTFDNGSIPHQIHLGELHAILRRQEDFYPFLKDNREKIEKILTFRIPYYVGPLARGNSRFAWMTRKSEETITPWNFEEVVDKGASAQSFIERMTNFDKNLPNEKVLPKHSLLYEYFTVYNELTKVKYVTEGMRKPAFLSGEQKKAIVDLLFKTNRKVTVKQLKEDYFKKIECFDSVEISGVEDRFNASLGTYHDLLKIIKDKDFLDNEENEDILEDIVLTLTLFEDREMIEERLKTYAHLFDDKVMKQLKRRRYTGWGRLSRKLINGIRDKQSGKTILDFLKSDGFANRNFMQLIHDDSLTFKEDIQKAQVSGQGDSLHEHIANLAGSPAIKKGILQTVKVVDELVKVMGRHKPENIVIEMARENQTTQKGQKNSRERMKRIEEGIKELGSQILKEHPVENTQLQNEKLYLYYLQNGRDMYVDQELDINRLSDYDVDHIVPQSFLKDDSIDNKVLTRSDKARGKSDNVPSEEVVKKMKNYWRQLLNAKLITQRKFDNLTKAERGGLSELDKAGFIKRQLVETRQITKHVAQILDSRMNTKYDENDKLIREVKVITLKSKLVSDFRKDFQFYKVREINNYHHAHDAYLNAVVGTALIKKYPKLESEFVYGDYKVYDVRKMIAKSEQEIGKATAKYFFYSNIMNFFKTEITLANGEIRKRPLIETNGETGEIVWDKGRDFATVRKVLSMPQVNIVKKTEVQTGGFSKESILPKRNSDKLIARKKDWDPKKYGGFDSPTVAYSVLVVAKVEKGKSKKLKSVKELLGITIMERSSFEKNPIDFLEAKGYKEVKKDLIIKLPKYSLFELENGRKRMLASAGELQKGNELALPSKYVNFLYLASHYEKLKGSPEDNEQKQLFVEQHKHYLDEIIEQISEFSKRVILADANLDKVLSAYNKHRDKPIREQAENIIHLFTLTNLGAPAAFKYFDTTIDRKRYTSTKEVLDATLIHQSITGLYETRIDLSQLGGDGGAEAAAKEAAAKEAAAKEAAAKALEAEAAAKEAAAKEAAAKEAAAKAGGTLNIEDEHRLHETSKEPDVSLGSTWLSDFPQAWAETGGMGLAVRQAPLIIPLKATSTPVSIKQYPMSQEARLGIKPHIQRLLDQGILVPCQSPWNTPLLPVKKPGTNDYRPVQDLREVNKRVEDIHPTVPNPYNLLSGLPPSHQWYTVLDLKDAFFCLRLHPTSQPLFAFEWRDPEMGISGQLTWTRLPQGFKNSPTLFNEALHRDLADFRIQHPDLILLQYVDDLLLAATSELDCQQGTRALLQTLGNLGYRASAKKAQICQKQVKYLGYLLKEGQRWLTEARKETVMGQPTPKTPRQLREFLGTAGFCRLWIPGFAEMAAPLYPLTKPGTLFNWGPDQQKAYQEIKQALLTAPALGLPDLTKPFELFVDEKQGYAKGVLTQKLGPWRRPVAYLSKKLDPVAAGWPPCLRMVAAIAVLTKDAGKLTMGQPLVILAPHAVEALVKQPPDRWLSNARMTHYQALLLDTDRVQFGPVVALNPATLLPLPEEGLQHNCLDILAEAHGTRPDLTDQPLPDADHTWYTDGSSLLQEGQRKAGAAVTTETEVIWAKALPAGTSAQRAELIALTQALKMAEGKKLNVYTDSRYAFATAHIHGEIYRRRGWLTSEGKEIKNKDEILALLKALFLPKRLSIIHCPGHQKGHSAEARGNRMADQAARKAAITETPDTSTLLAGKRTADGSEFEKRTADGSEFESPKKKAKVE

SEQ ID NO: 2712 - protein, 2100 aa, synthetic construct
MPAAKRVKLDGGDKKYSIGLDIGTNSVGWAVITDEYKVPSKKFKVLGNTDRHSIKKNLIGALLFDSGETAEATRLKRTARRRYTRRKNRICYLQEIFSNEMAKVDDSFFHRLEESFLVEEDKKHERHPIFGNIVDEVAYHEKYPTIYHLRKKLVDSTDKADLRLIYLALAHMIKFRGHFLIEGDLNPDNSDVDKLFIQLVQTYNQLFEENPINASGVDAKAILSARLSKSRRLENLIAQLPGEKKNGLFGNLIALSLGLTPNFKSNFDLAEDAKLQLSKDTYDDDLDNLLAQIGDQYADLFLAAKNLSDAILLSDILRVNTEITKAPLSASMIKRYDEHHQDLTLLKALVRQQLPEKYKEIFFDQSKNGYAGYIDGGASQEEFYKFIKPILEKMDGTEELLVKLNREDLLRKQRTFDNGSIPHQIHLGELHAILRRQEDFYPFLKDNREKIEKILTFRIPYYVGPLARGNSRFAWMTRKSEETITPWNFEEVVDKGASAQSFIERMTNFDKNLPNEKVLPKHSLLYEYFTVYNELTKVKYVTEGMRKPAFLSGEQKKAIVDLLFKTNRKVTVKQLKEDYFKKIECFDSVEISGVEDRFNASLGTYHDLLKIIKDKDFLDNEENEDILEDIVLTLTLFEDREMIEERLKTYAHLFDDKVMKQLKRRRYTGWGRLSRKLINGIRDKQSGKTILDFLKSDGFANRNFMQLIHDDSLTFKEDIQKAQVSGQGDSLHEHIANLAGSPAIKKGILQTVKVVDELVKVMGRHKPENIVIEMARENQTTQKGQKNSRERMKRIEEGIKELGSQILKEHPVENTQLQNEKLYLYYLQNGRDMYVDQELDINRLSDYDVDHIVPQSFLKDDSIDNKVLTRSDKARGKSDNVPSEEVVKKMKNYWRQLLNAKLITQRKFDNLTKAERGGLSELDKAGFIKRQLVETRQITKHVAQILDSRMNTKYDENDKLIREVKVITLKSKLVSDFRKDFQFYKVREINNYHHAHDAYLNAVVGTALIKKYPKLESEFVYGDYKVYDVRKMIAKSEQEIGKATAKYFFYSNIMNFFKTEITLANGEIRKRPLIETNGETGEIVWDKGRDFATVRKVLSMPQVNIVKKTEVQTGGFSKESILPKRNSDKLIARKKDWDPKKYGGFDSPTVAYSVLVVAKVEKGKSKKLKSVKELLGITIMERSSFEKNPIDFLEAKGYKEVKKDLIIKLPKYSLFELENGRKRMLASAGELQKGNELALPSKYVNFLYLASHYEKLKGSPEDNEQKQLFVEQHKHYLDEIIEQISEFSKRVILADANLDKVLSAYNKHRDKPIREQAENIIHLFTLTNLGAPAAFKYFDTTIDRKRYTSTKEVLDATLIHQSITGLYETRIDLSQLGGDGGEAAAKGGGGSEAAAKGGTLNIEDEHRLHETSKEPDVSLGSTWLSDFPQAWAETGGMGLAVRQAPLIIPLKATSTPVSIKQYPMSQEARLGIKPHIQRLLDQGILVPCQSPWNTPLLPVKKPGTNDYRPVQDLREVNKRVEDIHPTVPNPYNLLSGLPPSHQWYTVLDLKDAFFCLRLHPTSQPLFAFEWRDPEMGISGQLTWTRLPQGFKNSPTLFNEALHRDLADFRIQHPDLILLQYVDDLLLAATSELDCQQGTRALLQTLGNLGYRASAKKAQICQKQVKYLGYLLKEGQRWLTEARKETVMGQPTPKTPRQLREFLGTAGFCRLWIPGFAEMAAPLYPLTKPGTLFNWGPDQQKAYQEIKQALLTAPALGLPDLTKPFELFVDEKQGYAKGVLTQKLGPWRRPVAYLSKKLDPVAAGWPPCLRMVAAIAVLTKDAGKLTMGQPLVILAPHAVEALVKQPPDRWLSNARMTHYQALLLDTDRVQFGPVVALNPATLLPLPEEGLQHNCLDILAEAHGTRPDLTDQPLPDADHTWYTDGSSLLQEGQRKAGAAVTTETEVIWAKALPAGTSAQRAELIALTQALKMAEGKKLNVYTDSRYAFATAHIHGEIYRRRGWLTSEGKEIKNKDEILALLKALFLPKRLSIIHCPGHQKGHSAEARGNRMADQAARKAAITETPDTSTLLAGKRTADGSEFEKRTADGSEFESPKKKAKVE

SEQ ID NO: 2713 - protein, 2096 aa, synthetic construct
MPAAKRVKLDGGDKKYSIGLDIGTNSVGWAVITDEYKVPSKKFKVLGNTDRHSIKKNLIGALLFDSGETAEATRLKRTARRRYTRRKNRICYLQEIFSNEMAKVDDSFFHRLEESFLVEEDKKHERHPIFGNIVDEVAYHEKYPTIYHLRKKLVDSTDKADLRLIYLALAHMIKFRGHFLIEGDLNPDNSDVDKLFIQLVQTYNQLFEENPINASGVDAKAILSARLSKSRRLENLIAQLPGEKKNGLFGNLIALSLGLTPNFKSNFDLAEDAKLQLSKDTYDDDLDNLLAQIGDQYADLFLAAKNLSDAILLSDILRVNTEITKAPLSASMIKRYDEHHQDLTLLKALVRQQLPEKYKEIFFDQSKNGYAGYIDGGASQEEFYKFIKPILEKMDGTEELLVKLNREDLLRKQRTFDNGSIPHQIHLGELHAILRRQEDFYPFLKDNREKIEKILTFRIPYYVGPLARGNSRFAWMTRKSEETITPWNFEEVVDKGASAQSFIERMTNFDKNLPNEKVLPKHSLLYEYFTVYNELTKVKYVTEGMRKPAFLSGEQKKAIVDLLFKTNRKVTVKQLKEDYFKKIECFDSVEISGVEDRFNASLGTYHDLLKIIKDKDFLDNEENEDILEDIVLTLTLFEDREMIEERLKTYAHLFDDKVMKQLKRRRYTGWGRLSRKLINGIRDKQSGKTILDFLKSDGFANRNFMQLIHDDSLTFKEDIQKAQVSGQGDSLHEHIANLAGSPAIKKGILQTVKVVDELVKVMGRHKPENIVIEMARENQTTQKGQKNSRERMKRIEEGIKELGSQILKEHPVENTQLQNEKLYLYYLQNGRDMYVDQELDINRLSDYDVDHIVPQSFLKDDSIDNKVLTRSDKARGKSDNVPSEEVVKKMKNYWRQLLNAKLITQRKFDNLTKAERGGLSELDKAGFIKRQLVETRQITKHVAQILDSRMNTKYDENDKLIREVKVITLKSKLVSDFRKDFQFYKVREINNYHHAHDAYLNAVVGTALIKKYPKLESEFVYGDYKVYDVRKMIAKSEQEIGKATAKYFFYSNIMNFFKTEITLANGEIRKRPLIETNGETGEIVWDKGRDFATVRKVLSMPQVNIVKKTEVQTGGFSKESILPKRNSDKLIARKKDWDPKKYGGFDSPTVAYSVLVVAKVEKGKSKKLKSVKELLGITIMERSSFEKNPIDFLEAKGYKEVKKDLIIKLPKYSLFELENGRKRMLASAGELQKGNELALPSKYVNFLYLASHYEKLKGSPEDNEQKQLFVEQHKHYLDEIIEQISEFSKRVILADANLDKVLSAYNKHRDKPIREQAENIIHLFTLTNLGAPAAFKYFDTTIDRKRYTSTKEVLDATLIHQSITGLYETRIDLSQLGGDGGGGSEAAAKGGGGGTLNIEDEHRLHETSKEPDVSLGSTWLSDFPQAWAETGGMGLAVRQAPLIIPLKATSTPVSIKQYPMSQEARLGIKPHIQRLLDQGILVPCQSPWNTPLLPVKKPGTNDYRPVQDLREVNKRVEDIHPTVPNPYNLLSGLPPSHQWYTVLDLKDAFFCLRLHPTSQPLFAFEWRDPEMGISGQLTWTRLPQGFKNSPTLFNEALHRDLADFRIQHPDLILLQYVDDLLLAATSELDCQQGTRALLQTLGNLGYRASAKKAQICQKQVKYLGYLLKEGQRWLTEARKETVMGQPTPKTPRQLREFLGTAGFCRLWIPGFAEMAAPLYPLTKPGTLFNWGPDQQKAYQEIKQALLTAPALGLPDLTKPFELFVDEKQGYAKGVLTQKLGPWRRPVAYLSKKLDPVAAGWPPCLRMVAAIAVLTKDAGKLTMGQPLVILAPHAVEALVKQPPDRWLSNARMTHYQALLLDTDRVQFGPVVALNPATLLPLPEEGLQHNCLDILAEAHGTRPDLTDQPLPDADHTWYTDGSSLLQEGQRKAGAAVTTETEVIWAKALPAGTSAQRAELIALTQALKMAEGKKLNVYTDSRYAFATAHIHGEIYRRRGWLTSEGKEIKNKDEILALLKALFLPKRLSIIHCPGHQKGHSAEARGNRMADQAARKAAITETPDTSTLLAGKRTADGSEFEKRTADGSEFESPKKKAKVE

SEQ ID NO: 2714 - protein, 2096 aa, synthetic construct
MPAAKRVKLDGGDKKYSIGLDIGTNSVGWAVITDEYKVPSKKFKVLGNTDRHSIKKNLIGALLFDSGETAEATRLKRTARRRYTRRKNRICYLQEIFSNEMAKVDDSFFHRLEESFLVEEDKKHERHPIFGNIVDEVAYHEKYPTIYHLRKKLVDSTDKADLRLIYLALAHMIKFRGHFLIEGDLNPDNSDVDKLFIQLVQTYNQLFEENPINASGVDAKAILSARLSKSRRLENLIAQLPGEKKNGLFGNLIALSLGLTPNFKSNFDLAEDAKLQLSKDTYDDDLDNLLAQIGDQYADLFLAAKNLSDAILLSDILRVNTEITKAPLSASMIKRYDEHHQDLTLLKALVRQQLPEKYKEIFFDQSKNGYAGYIDGGASQEEFYKFIKPILEKMDGTEELLVKLNREDLLRKQRTFDNGSIPHQIHLGELHAILRRQEDFYPFLKDNREKIEKILTFRIPYYVGPLARGNSRFAWMTRKSEETITPWNFEEVVDKGASAQSFIERMTNFDKNLPNEKVLPKHSLLYEYFTVYNELTKVKYVTEGMRKPAFLSGEQKKAIVDLLFKTNRKVTVKQLKEDYFKKIECFDSVEISGVEDRFNASLGTYHDLLKIIKDKDFLDNEENEDILEDIVLTLTLFEDREMIEERLKTYAHLFDDKVMKQLKRRRYTGWGRLSRKLINGIRDKQSGKTILDFLKSDGFANRNFMQLIHDDSLTFKEDIQKAQVSGQGDSLHEHIANLAGSPAIKKGILQTVKVVDELVKVMGRHKPENIVIEMARENQTTQKGQKNSRERMKRIEEGIKELGSQILKEHPVENTQLQNEKLYLYYLQNGRDMYVDQELDINRLSDYDVDHIVPQSFLKDDSIDNKVLTRSDKARGKSDNVPSEEVVKKMKNYWRQLLNAKLITQRKFDNLTKAERGGLSELDKAGFIKRQLVETRQITKHVAQILDSRMNTKYDENDKLIREVKVITLKSKLVSDFRKDFQFYKVREINNYHHAHDAYLNAVVGTALIKKYPKLESEFVYGDYKVYDVRKMIAKSEQEIGKATAKYFFYSNIMNFFKTEITLANGEIRKRPLIETNGETGEIVWDKGRDFATVRKVLSMPQVNIVKKTEVQTGGFSKESILPKRNSDKLIARKKDWDPKKYGGFDSPTVAYSVLVVAKVEKGKSKKLKSVKELLGITIMERSSFEKNPIDFLEAKGYKEVKKDLIIKLPKYSLFELENGRKRMLASAGELQKGNELALPSKYVNFLYLASHYEKLKGSPEDNEQKQLFVEQHKHYLDEIIEQISEFSKRVILADANLDKVLSAYNKHRDKPIREQAENIIHLFTLTNLGAPAAFKYFDTTIDRKRYTSTKEVLDATLIHQSITGLYETRIDLSQLGGDGGEAAAKPAPGGSGGTLNIEDEHRLHETSKEPDVSLGSTWLSDFPQAWAETGGMGLAVRQAPLIIPLKATSTPVSIKQYPMSQEARLGIKPHIQRLLDQGILVPCQSPWNTPLLPVKKPGTNDYRPVQDLREVNKRVEDIHPTVPNPYNLLSGLPPSHQWYTVLDLKDAFFCLRLHPTSQPLFAFEWRDPEMGISGQLTWTRLPQGFKNSPTLFNEALHRDLADFRIQHPDLILLQYVDDLLLAATSELDCQQGTRALLQTLGNLGYRASAKKAQICQKQVKYLGYLLKEGQRWLTEARKETVMGQPTPKTPRQLREFLGTAGFCRLWIPGFAEMAAPLYPLTKPGTLFNWGPDQQKAYQEIKQALLTAPALGLPDLTKPFELFVDEKQGYAKGVLTQKLGPWRRPVAYLSKKLDPVAAGWPPCLRMVAAIAVLTKDAGKLTMGQPLVILAPHAVEALVKQPPDRWLSNARMTHYQALLLDTDRVQFGPVVALNPATLLPLPEEGLQHNCLDILAEAHGTRPDLTDQPLPDADHTWYTDGSSLLQEGQRKAGAAVTTETEVIWAKALPAGTSAQRAELIALTQALKMAEGKKLNVYTDSRYAFATAHIHGEIYRRRGWLTSEGKEIKNKDEILALLKALFLPKRLSIIHCPGHQKGHSAEARGNRMADQAARKAAITETPDTSTLLAGKRTADGSEFEKRTADGSEFESPKKKAKVE

SEQ ID NO: 2715 - protein, 2094 aa, synthetic construct
MPAAKRVKLDGGDKKYSIGLDIGTNSVGWAVITDEYKVPSKKFKVLGNTDRHSIKKNLIGALLFDSGETAEATRLKRTARRRYTRRKNRICYLQEIFSNEMAKVDDSFFHRLEESFLVEEDKKHERHPIFGNIVDEVAYHEKYPTIYHLRKKLVDSTDKADLRLIYLALAHMIKFRGHFLIEGDLNPDNSDVDKLFIQLVQTYNQLFEENPINASGVDAKAILSARLSKSRRLENLIAQLPGEKKNGLFGNLIALSLGLTPNFKSNFDLAEDAKLQLSKDTYDDDLDNLLAQIGDQYADLFLAAKNLSDAILLSDILRVNTEITKAPLSASMIKRYDEHHQDLTLLKALVRQQLPEKYKEIFFDQSKNGYAGYIDGGASQEEFYKFIKPILEKMDGTEELLVKLNREDLLRKQRTFDNGSIPHQIHLGELHAILRRQEDFYPFLKDNREKIEKILTFRIPYYVGPLARGNSRFAWMTRKSEETITPWNFEEVVDKGASAQSFIERMTNFDKNLPNEKVLPKHSLLYEYFTVYNELTKVKYVTEGMRKPAFLSGEQKKAIVDLLFKTNRKVTVKQLKEDYFKKIECFDSVEISGVEDRFNASLGTYHDLLKIIKDKDFLDNEENEDILEDIVLTLTLFEDREMIEERLKTYAHLFDDKVMKQLKRRRYTGWGRLSRKLINGIRDKQSGKTILDFLKSDGFANRNFMQLIHDDSLTFKEDIQKAQVSGQGDSLHEHIANLAGSPAIKKGILQTVKVVDELVKVMGRHKPENIVIEMARENQTTQKGQKNSRERMKRIEEGIKELGSQILKEHPVENTQLQNEKLYLYYLQNGRDMYVDQELDINRLSDYDVDHIVPQSFLKDDSIDNKVLTRSDKARGKSDNVPSEEVVKKMKNYWRQLLNAKLITQRKFDNLTKAERGGLSELDKAGFIKRQLVETRQITKHVAQILDSRMNTKYDENDKLIREVKVITLKSKLVSDFRKDFQFYKVREINNYHHAHDAYLNAVVGTALIKKYPKLESEFVYGDYKVYDVRKMIAKSEQEIGKATAKYFFYSNIMNFFKTEITLANGEIRKRPLIETNGETGEIVWDKGRDFATVRKVLSMPQVNIVKKTEVQTGGFSKESILPKRNSDKLIARKKDWDPKKYGGFDSPTVAYSVLVVAKVEKGKSKKLKSVKELLGITIMERSSFEKNPIDFLEAKGYKEVKKDLIIKLPKYSLFELENGRKRMLASAGELQKGNELALPSKYVNFLYLASHYEKLKGSPEDNEQKQLFVEQHKHYLDEIIEQISEFSKRVILADANLDKVLSAYNKHRDKPIREQAENIIHLFTLTNLGAPAAFKYFDTTIDRKRYTSTKEVLDATLIHQSITGLYETRIDLSQLGGDGGGSSGGGGGSGGTLNIEDEHRLHETSKEPDVSLGSTWLSDFPQAWAETGGMGLAVRQAPLIIPLKATSTPVSIKQYPMSQEARLGIKPHIQRLLDQGILVPCQSPWNTPLLPVKKPGTNDYRPVQDLREVNKRVEDIHPTVPNPYNLLSGLPPSHQWYTVLDLKDAFFCLRLHPTSQPLFAFEWRDPEMGISGQLTWTRLPQGFKNSPTLFNEALHRDLADFRIQHPDLILLQYVDDLLLAATSELDCQQGTRALLQTLGNLGYRASAKKAQICQKQVKYLGYLLKEGQRWLTEARKETVMGQPTPKTPRQLREFLGTAGFCRLWIPGFAEMAAPLYPLTKPGTLFNWGPDQQKAYQEIKQALLTAPALGLPDLTKPFELFVDEKQGYAKGVLTQKLGPWRRPVAYLSKKLDPVAAGWPPCLRMVAAIAVLTKDAGKLTMGQPLVILAPHAVEALVKQPPDRWLSNARMTHYQALLLDTDRVQFGPVVALNPATLLPLPEEGLQHNCLDILAEAHGTRPDLTDQPLPDADHTWYTDGSSLLQEGQRKAGAAVTTETEVIWAKALPAGTSAQRAELIALTQALKMAEGKKLNVYTDSRYAFATAHIHGEIYRRRGWLTSEGKEIKNKDEILALLKALFLPKRLSIIHCPGHQKGHSAEARGNRMADQAARKAAITETPDTSTLLAGKRTADGSEFEKRTADGSEFESPKKKAKVE

SEQ ID NO: 2716 - protein, 2110 aa, synthetic construct
MPAAKRVKLDGGDKKYSIGLDIGTNSVGWAVITDEYKVPSKKFKVLGNTDRHSIKKNLIGALLFDSGETAEATRLKRTARRRYTRRKNRICYLQEIFSNEMAKVDDSFFHRLEESFLVEEDKKHERHPIFGNIVDEVAYHEKYPTIYHLRKKLVDSTDKADLRLIYLALAHMIKFRGHFLIEGDLNPDNSDVDKLFIQLVQTYNQLFEENPINASGVDAKAILSARLSKSRRLENLIAQLPGEKKNGLFGNLIALSLGLTPNFKSNFDLAEDAKLQLSKDTYDDDLDNLLAQIGDQYADLFLAAKNLSDAILLSDILRVNTEITKAPLSASMIKRYDEHHQDLTLLKALVRQQLPEKYKEIFFDQSKNGYAGYIDGGASQEEFYKFIKPILEKMDGTEELLVKLNREDLLRKQRTFDNGSIPHQIHLGELHAILRRQEDFYPFLKDNREKIEKILTFRIPYYVGPLARGNSRFAWMTRKSEETITPWNFEEVVDKGASAQSFIERMTNFDKNLPNEKVLPKHSLLYEYFTVYNELTKVKYVTEGMRKPAFLSGEQKKAIVDLLFKTNRKVTVKQLKEDYFKKIECFDSVEISGVEDRFNASLGTYHDLLKIIKDKDFLDNEENEDILEDIVLTLTLFEDREMIEERLKTYAHLFDDKVMKQLKRRRYTGWGRLSRKLINGIRDKQSGKTILDFLKSDGFANRNFMQLIHDDSLTFKEDIQKAQVSGQGDSLHEHIANLAGSPAIKKGILQTVKVVDELVKVMGRHKPENIVIEMARENQTTQKGQKNSRERMKRIEEGIKELGSQILKEHPVENTQLQNEKLYLYYLQNGRDMYVDQELDINRLSDYDVDHIVPQSFLKDDSIDNKVLTRSDKARGKSDNVPSEEVVKKMKNYWRQLLNAKLITQRKFDNLTKAERGGLSELDKAGFIKRQLVETRQITKHVAQILDSRMNTKYDENDKLIREVKVITLKSKLVSDFRKDFQFYKVREINNYHHAHDAYLNAVVGTALIKKYPKLESEFVYGDYKVYDVRKMIAKSEQEIGKATAKYFFYSNIMNFFKTEITLANGEIRKRPLIETNGETGEIVWDKGRDFATVRKVLSMPQVNIVKKTEVQTGGFSKESILPKRNSDKLIARKKDWDPKKYGGFDSPTVAYSVLVVAKVEKGKSKKLKSVKELLGITIMERSSFEKNPIDFLEAKGYKEVKKDLIIKLPKYSLFELENGRKRMLASAGELQKGNELALPSKYVNFLYLASHYEKLKGSPEDNEQKQLFVEQHKHYLDEIIEQISEFSKRVILADANLDKVLSAYNKHRDKPIREQAENIIHLFTLTNLGAPAAFKYFDTTIDRKRYTSTKEVLDATLIHQSITGLYETRIDLSQLGGDGGEAAAKEAAAKEAAAKEAAAKEAAAKGGTLNIEDEHRLHETSKEPDVSLGSTWLSDFPQAWAETGGMGLAVRQAPLIIPLKATSTPVSIKQYPMSQEARLGIKPHIQRLLDQGILVPCQSPWNTPLLPVKKPGTNDYRPVQDLREVNKRVEDIHPTVPNPYNLLSGLPPSHQWYTVLDLKDAFFCLRLHPTSQPLFAFEWRDPEMGISGQLTWTRLPQGFKNSPTLFNEALHRDLADFRIQHPDLILLQYVDDLLLAATSELDCQQGTRALLQTLGNLGYRASAKKAQICQKQVKYLGYLLKEGQRWLTEARKETVMGQPTPKTPRQLREFLGTAGFCRLWIPGFAEMAAPLYPLTKPGTLFNWGPDQQKAYQEIKQALLTAPALGLPDLTKPFELFVDEKQGYAKGVLTQKLGPWRRPVAYLSKKLDPVAAGWPPCLRMVAAIAVLTKDAGKLTMGQPLVILAPHAVEALVKQPPDRWLSNARMTHYQALLLDTDRVQFGPVVALNPATLLPLPEEGLQHNCLDILAEAHGTRPDLTDQPLPDADHTWYTDGSSLLQEGQRKAGAAVTTETEVIWAKALPAGTSAQRAELIALTQALKMAEGKKLNVYTDSRYAFATAHIHGEIYRRRGWLTSEGKEIKNKDEILALLKALFLPKRLSIIHCPGHQKGHSAEARGNRMADQAARKAAITETPDTSTLLAGKRTADGSEFEKRTADGSEFESPKKKAKVE

SEQ ID NO: 2717 - protein, 2091 aa, synthetic construct
MPAAKRVKLDGGDKKYSIGLDIGTNSVGWAVITDEYKVPSKKFKVLGNTDRHSIKKNLIGALLFDSGETAEATRLKRTARRRYTRRKNRICYLQEIFSNEMAKVDDSFFHRLEESFLVEEDKKHERHPIFGNIVDEVAYHEKYPTIYHLRKKLVDSTDKADLRLIYLALAHMIKFRGHFLIEGDLNPDNSDVDKLFIQLVQTYNQLFEENPINASGVDAKAILSARLSKSRRLENLIAQLPGEKKNGLFGNLIALSLGLTPNFKSNFDLAEDAKLQLSKDTYDDDLDNLLAQIGDQYADLFLAAKNLSDAILLSDILRVNTEITKAPLSASMIKRYDEHHQDLTLLKALVRQQLPEKYKEIFFDQSKNGYAGYIDGGASQEEFYKFIKPILEKMDGTEELLVKLNREDLLRKQRTFDNGSIPHQIHLGELHAILRRQEDFYPFLKDNREKIEKILTFRIPYYVGPLARGNSRFAWMTRKSEETITPWNFEEVVDKGASAQSFIERMTNFDKNLPNEKVLPKHSLLYEYFTVYNELTKVKYVTEGMRKPAFLSGEQKKAIVDLLFKTNRKVTVKQLKEDYFKKIECFDSVEISGVEDRFNASLGTYHDLLKIIKDKDFLDNEENEDILEDIVLTLTLFEDREMIEERLKTYAHLFDDKVMKQLKRRRYTGWGRLSRKLINGIRDKQSGKTILDFLKSDGFANRNFMQLIHDDSLTFKEDIQKAQVSGQGDSLHEHIANLAGSPAIKKGILQTVKVVDELVKVMGRHKPENIVIEMARENQTTQKGQKNSRERMKRIEEGIKELGSQILKEHPVENTQLQNEKLYLYYLQNGRDMYVDQELDINRLSDYDVDHIVPQSFLKDDSIDNKVLTRSDKARGKSDNVPSEEVVKKMKNYWRQLLNAKLITQRKFDNLTKAERGGLSELDKAGFIKRQLVETRQITKHVAQILDSRMNTKYDENDKLIREVKVITLKSKLVSDFRKDFQFYKVREINNYHHAHDAYLNAVVGTALIKKYPKLESEFVYGDYKVYDVRKMIAKSEQEIGKATAKYFFYSNIMNFFKTEITLANGEIRKRPLIETNGETGEIVWDKGRDFATVRKVLSMPQVNIVKKTEVQTGGFSKESILPKRNSDKLIARKKDWDPKKYGGFDSPTVAYSVLVVAKVEKGKSKKLKSVKELLGITIMERSSFEKNPIDFLEAKGYKEVKKDLIIKLPKYSLFELENGRKRMLASAGELQKGNELALPSKYVNFLYLASHYEKLKGSPEDNEQKQLFVEQHKHYLDEIIEQISEFSKRVILADANLDKVLSAYNKHRDKPIREQAENIIHLFTLTNLGAPAAFKYFDTTIDRKRYTSTKEVLDATLIHQSITGLYETRIDLSQLGGDGGGGGGGSGGTLNIEDEHRLHETSKEPDVSLGSTWLSDFPQAWAETGGMGLAVRQAPLIIPLKATSTPVSIKQYPMSQEARLGIKPHIQRLLDQGILVPCQSPWNTPLLPVKKPGTNDYRPVQDLREVNKRVEDIHPTVPNPYNLLSGLPPSHQWYTVLDLKDAFFCLRLHPTSQPLFAFEWRDPEMGISGQLTWTRLPQGFKNSPTLFNEALHRDLADFRIQHPDLILLQYVDDLLLAATSELDCQQGTRALLQTLGNLGYRASAKKAQICQKQVKYLGYLLKEGQRWLTEARKETVMGQPTPKTPRQLREFLGTAGFCRLWIPGFAEMAAPLYPLTKPGTLFNWGPDQQKAYQEIKQALLTAPALGLPDLTKPFELFVDEKQGYAKGVLTQKLGPWRRPVAYLSKKLDPVAAGWPPCLRMVAAIAVLTKDAGKLTMGQPLVILAPHAVEALVKQPPDRWLSNARMTHYQALLLDTDRVQFGPVVALNPATLLPLPEEGLQHNCLDILAEAHGTRPDLTDQPLPDADHTWYTDGSSLLQEGQRKAGAAVTTETEVIWAKALPAGTSAQRAELIALTQALKMAEGKKLNVYTDSRYAFATAHIHGEIYRRRGWLTSEGKEIKNKDEILALLKALFLPKRLSIIHCPGHQKGHSAEARGNRMADQAARKAAITETPDTSTLLAGKRTADGSEFEKRTADGSEFESPKKKAKVE

SEQ ID NO: 2718 - protein, 2093 aa, synthetic construct
MPAAKRVKLDGGDKKYSIGLDIGTNSVGWAVITDEYKVPSKKFKVLGNTDRHSIKKNLIGALLFDSGETAEATRLKRTARRRYTRRKNRICYLQEIFSNEMAKVDDSFFHRLEESFLVEEDKKHERHPIFGNIVDEVAYHEKYPTIYHLRKKLVDSTDKADLRLIYLALAHMIKFRGHFLIEGDLNPDNSDVDKLFIQLVQTYNQLFEENPINASGVDAKAILSARLSKSRRLENLIAQLPGEKKNGLFGNLIALSLGLTPNFKSNFDLAEDAKLQLSKDTYDDDLDNLLAQIGDQYADLFLAAKNLSDAILLSDILRVNTEITKAPLSASMIKRYDEHHQDLTLLKALVRQQLPEKYKEIFFDQSKNGYAGYIDGGASQEEFYKFIKPILEKMDGTEELLVKLNREDLLRKQRTFDNGSIPHQIHLGELHAILRRQEDFYPFLKDNREKIEKILTFRIPYYVGPLARGNSRFAWMTRKSEETITPWNFEEVVDKGASAQSFIERMTNFDKNLPNEKVLPKHSLLYEYFTVYNELTKVKYVTEGMRKPAFLSGEQKKAIVDLLFKTNRKVTVKQLKEDYFKKIECFDSVEISGVEDRFNASLGTYHDLLKIIKDKDFLDNEENEDILEDIVLTLTLFEDREMIEERLKTYAHLFDDKVMKQLKRRRYTGWGRLSRKLINGIRDKQSGKTILDFLKSDGFANRNFMQLIHDDSLTFKEDIQKAQVSGQGDSLHEHIANLAGSPAIKKGILQTVKVVDELVKVMGRHKPENIVIEMARENQTTQKGQKNSRERMKRIEEGIKELGSQILKEHPVENTQLQNEKLYLYYLQNGRDMYVDQELDINRLSDYDVDHIVPQSFLKDDSIDNKVLTRSDKARGKSDNVPSEEVVKKMKNYWRQLLNAKLITQRKFDNLTKAERGGLSELDKAGFIKRQLVETRQITKHVAQILDSRMNTKYDENDKLIREVKVITLKSKLVSDFRKDFQFYKVREINNYHHAHDAYLNAVVGTALIKKYPKLESEFVYGDYKVYDVRKMIAKSEQEIGKATAKYFFYSNIMNFFKTEITLANGEIRKRPLIETNGETGEIVWDKGRDFATVRKVLSMPQVNIVKKTEVQTGGFSKESILPKRNSDKLIARKKDWDPKKYGGFDSPTVAYSVLVVAKVEKGKSKKLKSVKELLGITIMERSSFEKNPIDFLEAKGYKEVKKDLIIKLPKYSLFELENGRKRMLASAGELQKGNELALPSKYVNFLYLASHYEKLKGSPEDNEQKQLFVEQHKHYLDEIIEQISEFSKRVILADANLDKVLSAYNKHRDKPIREQAENIIHLFTLTNLGAPAAFKYFDTTIDRKRYTSTKEVLDATLIHQSITGLYETRIDLSQLGGDGGGSSEAAAKGGTLNIEDEHRLHETSKEPDVSLGSTWLSDFPQAWAETGGMGLAVRQAPLIIPLKATSTPVSIKQYPMSQEARLGIKPHIQRLLDQGILVPCQSPWNTPLLPVKKPGTNDYRPVQDLREVNKRVEDIHPTVPNPYNLLSGLPPSHQWYTVLDLKDAFFCLRLHPTSQPLFAFEWRDPEMGISGQLTWTRLPQGFKNSPTLFNEALHRDLADFRIQHPDLILLQYVDDLLLAATSELDCQQGTRALLQTLGNLGYRASAKKAQICQKQVKYLGYLLKEGQRWLTEARKETVMGQPTPKTPRQLREFLGTAGFCRLWIPGFAEMAAPLYPLTKPGTLFNWGPDQQKAYQEIKQALLTAPALGLPDLTKPFELFVDEKQGYAKGVLTQKLGPWRRPVAYLSKKLDPVAAGWPPCLRMVAAIAVLTKDAGKLTMGQPLVILAPHAVEALVKQPPDRWLSNARMTHYQALLLDTDRVQFGPVVALNPATLLPLPEEGLQHNCLDILAEAHGTRPDLTDQPLPDADHTWYTDGSSLLQEGQRKAGAAVTTETEVIWAKALPAGTSAQRAELIALTQALKMAEGKKLNVYTDSRYAFATAHIHGEIYRRRGWLTSEGKEIKNKDEILALLKALFLPKRLSIIHCPGHQKGHSAEARGNRMADQAARKAAITETPDTSTLLAGKRTADGSEFEKRTADGSEFESPKKKAKVE

SEQ ID NO: 2719 - protein, 2096 aa, synthetic construct
MPAAKRVKLDGGDKKYSIGLDIGTNSVGWAVITDEYKVPSKKFKVLGNTDRHSIKKNLIGALLFDSGETAEATRLKRTARRRYTRRKNRICYLQEIFSNEMAKVDDSFFHRLEESFLVEEDKKHERHPIFGNIVDEVAYHEKYPTIYHLRKKLVDSTDKADLRLIYLALAHMIKFRGHFLIEGDLNPDNSDVDKLFIQLVQTYNQLFEENPINASGVDAKAILSARLSKSRRLENLIAQLPGEKKNGLFGNLIALSLGLTPNFKSNFDLAEDAKLQLSKDTYDDDLDNLLAQIGDQYADLFLAAKNLSDAILLSDILRVNTEITKAPLSASMIKRYDEHHQDLTLLKALVRQQLPEKYKEIFFDQSKNGYAGYIDGGASQEEFYKFIKPILEKMDGTEELLVKLNREDLLRKQRTFDNGSIPHQIHLGELHAILRRQEDFYPFLKDNREKIEKILTFRIPYYVGPLARGNSRFAWMTRKSEETITPWNFEEVVDKGASAQSFIERMTNFDKNLPNEKVLPKHSLLYEYFTVYNELTKVKYVTEGMRKPAFLSGEQKKAIVDLLFKTNRKVTVKQLKEDYFKKIECFDSVEISGVEDRFNASLGTYHDLLKIIKDKDFLDNEENEDILEDIVLTLTLFEDREMIEERLKTYAHLFDDKVMKQLKRRRYTGWGRLSRKLINGIRDKQSGKTILDFLKSDGFANRNFMQLIHDDSLTFKEDIQKAQVSGQGDSLHEHIANLAGSPAIKKGILQTVKVVDELVKVMGRHKPENIVIEMARENQTTQKGQKNSRERMKRIEEGIKELGSQILKEHPVENTQLQNEKLYLYYLQNGRDMYVDQELDINRLSDYDVDHIVPQSFLKDDSIDNKVLTRSDKARGKSDNVPSEEVVKKMKNYWRQLLNAKLITQRKFDNLTKAERGGLSELDKAGFIKRQLVETRQITKHVAQILDSRMNTKYDENDKLIREVKVITLKSKLVSDFRKDFQFYKVREINNYHHAHDAYLNAVVGTALIKKYPKLESEFVYGDYKVYDVRKMIAKSEQEIGKATAKYFFYSNIMNFFKTEITLANGEIRKRPLIETNGETGEIVWDKGRDFATVRKVLSMPQVNIVKKTEVQTGGFSKESILPKRNSDKLIARKKDWDPKKYGGFDSPTVAYSVLVVAKVEKGKSKKLKSVKELLGITIMERSSFEKNPIDFLEAKGYKEVKKDLIIKLPKYSLFELENGRKRMLASAGELQKGNELALPSKYVNFLYLASHYEKLKGSPEDNEQKQLFVEQHKHYLDEIIEQISEFSKRVILADANLDKVLSAYNKHRDKPIREQAENIIHLFTLTNLGAPAAFKYFDTTIDRKRYTSTKEVLDATLIHQSITGLYETRIDLSQLGGDGGGGGEAAAKPAPGGTLNIEDEHRLHETSKEPDVSLGSTWLSDFPQAWAETGGMGLAVRQAPLIIPLKATSTPVSIKQYPMSQEARLGIKPHIQRLLDQGILVPCQSPWNTPLLPVKKPGTNDYRPVQDLREVNKRVEDIHPTVPNPYNLLSGLPPSHQWYTVLDLKDAFFCLRLHPTSQPLFAFEWRDPEMGISGQLTWTRLPQGFKNSPTLFNEALHRDLADFRIQHPDLILLQYVDDLLLAATSELDCQQGTRALLQTLGNLGYRASAKKAQICQKQVKYLGYLLKEGQRWLTEARKETVMGQPTPKTPRQLREFLGTAGFCRLWIPGFAEMAAPLYPLTKPGTLFNWGPDQQKAYQEIKQALLTAPALGLPDLTKPFELFVDEKQGYAKGVLTQKLGPWRRPVAYLSKKLDPVAAGWPPCLRMVAAIAVLTKDAGKLTMGQPLVILAPHAVEALVKQPPDRWLSNARMTHYQALLLDTDRVQFGPVVALNPATLLPLPEEGLQHNCLDILAEAHGTRPDLTDQPLPDADHTWYTDGSSLLQEGQRKAGAAVTTETEVIWAKALPAGTSAQRAELIALTQALKMAEGKKLNVYTDSRYAFATAHIHGEIYRRRGWLTSEGKEIKNKDEILALLKALFLPKRLSIIHCPGHQKGHSAEARGNRMADQAARKAAITETPDTSTLLAGKRTADGSEFEKRTADGSEFESPKKKAKVE

SEQ ID NO: 2720 - protein, 2105 aa, synthetic construct
MPAAKRVKLDGGDKKYSIGLDIGTNSVGWAVITDEYKVPSKKFKVLGNTDRHSIKKNLIGALLFDSGETAEATRLKRTARRRYTRRKNRICYLQEIFSNEMAKVDDSFFHRLEESFLVEEDKKHERHPIFGNIVDEVAYHEKYPTIYHLRKKLVDSTDKADLRLIYLALAHMIKFRGHFLIEGDLNPDNSDVDKLFIQLVQTYNQLFEENPINASGVDAKAILSARLSKSRRLENLIAQLPGEKKNGLFGNLIALSLGLTPNFKSNFDLAEDAKLQLSKDTYDDDLDNLLAQIGDQYADLFLAAKNLSDAILLSDILRVNTEITKAPLSASMIKRYDEHHQDLTLLKALVRQQLPEKYKEIFFDQSKNGYAGYIDGGASQEEFYKFIKPILEKMDGTEELLVKLNREDLLRKQRTFDNGSIPHQIHLGELHAILRRQEDFYPFLKDNREKIEKILTFRIPYYVGPLARGNSRFAWMTRKSEETITPWNFEEVVDKGASAQSFIERMTNFDKNLPNEKVLPKHSLLYEYFTVYNELTKVKYVTEGMRKPAFLSGEQKKAIVDLLFKTNRKVTVKQLKEDYFKKIECFDSVEISGVEDRFNASLGTYHDLLKIIKDKDFLDNEENEDILEDIVLTLTLFEDREMIEERLKTYAHLFDDKVMKQLKRRRYTGWGRLSRKLINGIRDKQSGKTILDFLKSDGFANRNFMQLIHDDSLTFKEDIQKAQVSGQGDSLHEHIANLAGSPAIKKGILQTVKVVDELVKVMGRHKPENIVIEMARENQTTQKGQKNSRERMKRIEEGIKELGSQILKEHPVENTQLQNEKLYLYYLQNGRDMYVDQELDINRLSDYDVDHIVPQSFLKDDSIDNKVLTRSDKARGKSDNVPSEEVVKKMKNYWRQLLNAKLITQRKFDNLTKAERGGLSELDKAGFIKRQLVETRQITKHVAQILDSRMNTKYDENDKLIREVKVITLKSKLVSDFRKDFQFYKVREINNYHHAHDAYLNAVVGTALIKKYPKLESEFVYGDYKVYDVRKMIAKSEQEIGKATAKYFFYSNIMNFFKTEITLANGEIRKRPLIETNGETGEIVWDKGRDFATVRKVLSMPQVNIVKKTEVQTGGFSKESILPKRNSDKLIARKKDWDPKKYGGFDSPTVAYSVLVVAKVEKGKSKKLKSVKELLGITIMERSSFEKNPIDFLEAKGYKEVKKDLIIKLPKYSLFELENGRKRMLASAGELQKGNELALPSKYVNFLYLASHYEKLKGSPEDNEQKQLFVEQHKHYLDEIIEQISEFSKRVILADANLDKVLSAYNKHRDKPIREQAENIIHLFTLTNLGAPAAFKYFDTTIDRKRYTSTKEVLDATLIHQSITGLYETRIDLSQLGGDGGEAAAKEAAAKEAAAKEAAAKGGTLNIEDEHRLHETSKEPDVSLGSTWLSDFPQAWAETGGMGLAVRQAPLIIPLKATSTPVSIKQYPMSQEARLGIKPHIQRLLDQGILVPCQSPWNTPLLPVKKPGTNDYRPVQDLREVNKRVEDIHPTVPNPYNLLSGLPPSHQWYTVLDLKDAFFCLRLHPTSQPLFAFEWRDPEMGISGQLTWTRLPQGFKNSPTLFNEALHRDLADFRIQHPDLILLQYVDDLLLAATSELDCQQGTRALLQTLGNLGYRASAKKAQICQKQVKYLGYLLKEGQRWLTEARKETVMGQPTPKTPRQLREFLGTAGFCRLWIPGFAEMAAPLYPLTKPGTLFNWGPDQQKAYQEIKQALLTAPALGLPDLTKPFELFVDEKQGYAKGVLTQKLGPWRRPVAYLSKKLDPVAAGWPPCLRMVAAIAVLTKDAGKLTMGQPLVILAPHAVEALVKQPPDRWLSNARMTHYQALLLDTDRVQFGPVVALNPATLLPLPEEGLQHNCLDILAEAHGTRPDLTDQPLPDADHTWYTDGSSLLQEGQRKAGAAVTTETEVIWAKALPAGTSAQRAELIALTQALKMAEGKKLNVYTDSRYAFATAHIHGEIYRRRGWLTSEGKEIKNKDEILALLKALFLPKRLSIIHCPGHQKGHSAEARGNRMADQAARKAAITETPDTSTLLAGKRTADGSEFEKRTADGSEFESPKKKAKVE

SEQ ID NO: 2721 - protein, 2096 aa, synthetic construct
MPAAKRVKLDGGDKKYSIGLDIGTNSVGWAVITDEYKVPSKKFKVLGNTDRHSIKKNLIGALLFDSGETAEATRLKRTARRRYTRRKNRICYLQEIFSNEMAKVDDSFFHRLEESFLVEEDKKHERHPIFGNIVDEVAYHEKYPTIYHLRKKLVDSTDKADLRLIYLALAHMIKFRGHFLIEGDLNPDNSDVDKLFIQLVQTYNQLFEENPINASGVDAKAILSARLSKSRRLENLIAQLPGEKKNGLFGNLIALSLGLTPNFKSNFDLAEDAKLQLSKDTYDDDLDNLLAQIGDQYADLFLAAKNLSDAILLSDILRVNTEITKAPLSASMIKRYDEHHQDLTLLKALVRQQLPEKYKEIFFDQSKNGYAGYIDGGASQEEFYKFIKPILEKMDGTEELLVKLNREDLLRKQRTFDNGSIPHQIHLGELHAILRRQEDFYPFLKDNREKIEKILTFRIPYYVGPLARGNSRFAWMTRKSEETITPWNFEEVVDKGASAQSFIERMTNFDKNLPNEKVLPKHSLLYEYFTVYNELTKVKYVTEGMRKPAFLSGEQKKAIVDLLFKTNRKVTVKQLKEDYFKKIECFDSVEISGVEDRFNASLGTYHDLLKIIKDKDFLDNEENEDILEDIVLTLTLFEDREMIEERLKTYAHLFDDKVMKQLKRRRYTGWGRLSRKLINGIRDKQSGKTILDFLKSDGFANRNFMQLIHDDSLTFKEDIQKAQVSGQGDSLHEHIANLAGSPAIKKGILQTVKVVDELVKVMGRHKPENIVIEMARENQTTQKGQKNSRERMKRIEEGIKELGSQILKEHPVENTQLQNEKLYLYYLQNGRDMYVDQELDINRLSDYDVDHIVPQSFLKDDSIDNKVLTRSDKARGKSDNVPSEEVVKKMKNYWRQLLNAKLITQRKFDNLTKAERGGLSELDKAGFIKRQLVETRQITKHVAQILDSRMNTKYDENDKLIREVKVITLKSKLVSDFRKDFQFYKVREINNYHHAHDAYLNAVVGTALIKKYPKLESEFVYGDYKVYDVRKMIAKSEQEIGKATAKYFFYSNIMNFFKTEITLANGEIRKRPLIETNGETGEIVWDKGRDFATVRKVLSMPQVNIVKKTEVQTGGFSKESILPKRNSDKLIARKKDWDPKKYGGFDSPTVAYSVLVVAKVEKGKSKKLKSVKELLGITIMERSSFEKNPIDFLEAKGYKEVKKDLIIKLPKYSLFELENGRKRMLASAGELQKGNELALPSKYVNFLYLASHYEKLKGSPEDNEQKQLFVEQHKHYLDEIIEQISEFSKRVILADANLDKVLSAYNKHRDKPIREQAENIIHLFTLTNLGAPAAFKYFDTTIDRKRYTSTKEVLDATLIHQSITGLYETRIDLSQLGGDGGGGGEAAAKGGSGGTLNIEDEHRLHETSKEPDVSLGSTWLSDFPQAWAETGGMGLAVRQAPLIIPLKATSTPVSIKQYPMSQEARLGIKPHIQRLLDQGILVPCQSPWNTPLLPVKKPGTNDYRPVQDLREVNKRVEDIHPTVPNPYNLLSGLPPSHQWYTVLDLKDAFFCLRLHPTSQPLFAFEWRDPEMGISGQLTWTRLPQGFKNSPTLFNEALHRDLADFRIQHPDLILLQYVDDLLLAATSELDCQQGTRALLQTLGNLGYRASAKKAQICQKQVKYLGYLLKEGQRWLTEARKETVMGQPTPKTPRQLREFLGTAGFCRLWIPGFAEMAAPLYPLTKPGTLFNWGPDQQKAYQEIKQALLTAPALGLPDLTKPFELFVDEKQGYAKGVLTQKLGPWRRPVAYLSKKLDPVAAGWPPCLRMVAAIAVLTKDAGKLTMGQPLVILAPHAVEALVKQPPDRWLSNARMTHYQALLLDTDRVQFGPVVALNPATLLPLPEEGLQHNCLDILAEAHGTRPDLTDQPLPDADHTWYTDGSSLLQEGQRKAGAAVTTETEVIWAKALPAGTSAQRAELIALTQALKMAEGKKLNVYTDSRYAFATAHIHGEIYRRRGWLTSEGKEIKNKDEILALLKALFLPKRLSIIHCPGHQKGHSAEARGNRMADQAARKAAITETPDTSTLLAGKRTADGSEFEKRTADGSEFESPKKKAKVE

SEQ ID NO: 2722 - protein, 2096 aa, synthetic construct
MPAAKRVKLDGGDKKYSIGLDIGTNSVGWAVITDEYKVPSKKFKVLGNTDRHSIKKNLIGALLFDSGETAEATRLKRTARRRYTRRKNRICYLQEIFSNEMAKVDDSFFHRLEESFLVEEDKKHERHPIFGNIVDEVAYHEKYPTIYHLRKKLVDSTDKADLRLIYLALAHMIKFRGHFLIEGDLNPDNSDVDKLFIQLVQTYNQLFEENPINASGVDAKAILSARLSKSRRLENLIAQLPGEKKNGLFGNLIALSLGLTPNFKSNFDLAEDAKLQLSKDTYDDDLDNLLAQIGDQYADLFLAAKNLSDAILLSDILRVNTEITKAPLSASMIKRYDEHHQDLTLLKALVRQQLPEKYKEIFFDQSKNGYAGYIDGGASQEEFYKFIKPILEKMDGTEELLVKLNREDLLRKQRTFDNGSIPHQIHLGELHAILRRQEDFYPFLKDNREKIEKILTFRIPYYVGPLARGNSRFAWMTRKSEETITPWNFEEVVDKGASAQSFIERMTNFDKNLPNEKVLPKHSLLYEYFTVYNELTKVKYVTEGMRKPAFLSGEQKKAIVDLLFKTNRKVTVKQLKEDYFKKIECFDSVEISGVEDRFNASLGTYHDLLKIIKDKDFLDNEENEDILEDIVLTLTLFEDREMIEERLKTYAHLFDDKVMKQLKRRRYTGWGRLSRKLINGIRDKQSGKTILDFLKSDGFANRNFMQLIHDDSLTFKEDIQKAQVSGQGDSLHEHIANLAGSPAIKKGILQTVKVVDELVKVMGRHKPENIVIEMARENQTTQKGQKNSRERMKRIEEGIKELGSQILKEHPVENTQLQNEKLYLYYLQNGRDMYVDQELDINRLSDYDVDHIVPQSFLKDDSIDNKVLTRSDKARGKSDNVPSEEVVKKMKNYWRQLLNAKLITQRKFDNLTKAERGGLSELDKAGFIKRQLVETRQITKHVAQILDSRMNTKYDENDKLIREVKVITLKSKLVSDFRKDFQFYKVREINNYHHAHDAYLNAVVGTALIKKYPKLESEFVYGDYKVYDVRKMIAKSEQEIGKATAKYFFYSNIMNFFKTEITLANGEIRKRPLIETNGETGEIVWDKGRDFATVRKVLSMPQVNIVKKTEVQTGGFSKESILPKRNSDKLIARKKDWDPKKYGGFDSPTVAYSVLVVAKVEKGKSKKLKSVKELLGITIMERSSFEKNPIDFLEAKGYKEVKKDLIIKLPKYSLFELENGRKRMLASAGELQKGNELALPSKYVNFLYLASHYEKLKGSPEDNEQKQLFVEQHKHYLDEIIEQISEFSKRVILADANLDKVLSAYNKHRDKPIREQAENIIHLFTLTNLGAPAAFKYFDTTIDRKRYTSTKEVLDATLIHQSITGLYETRIDLSQLGGDGGGGGGGSEAAAKGGTLNIEDEHRLHETSKEPDVSLGSTWLSDFPQAWAETGGMGLAVRQAPLIIPLKATSTPVSIKQYPMSQEARLGIKPHIQRLLDQGILVPCQSPWNTPLLPVKKPGTNDYRPVQDLREVNKRVEDIHPTVPNPYNLLSGLPPSHQWYTVLDLKDAFFCLRLHPTSQPLFAFEWRDPEMGISGQLTWTRLPQGFKNSPTLFNEALHRDLADFRIQHPDLILLQYVDDLLLAATSELDCQQGTRALLQTLGNLGYRASAKKAQICQKQVKYLGYLLKEGQRWLTEARKETVMGQPTPKTPRQLREFLGTAGFCRLWIPGFAEMAAPLYPLTKPGTLFNWGPDQQKAYQEIKQALLTAPALGLPDLTKPFELFVDEKQGYAKGVLTQKLGPWRRPVAYLSKKLDPVAAGWPPCLRMVAAIAVLTKDAGKLTMGQPLVILAPHAVEALVKQPPDRWLSNARMTHYQALLLDTDRVQFGPVVALNPATLLPLPEEGLQHNCLDILAEAHGTRPDLTDQPLPDADHTWYTDGSSLLQEGQRKAGAAVTTETEVIWAKALPAGTSAQRAELIALTQALKMAEGKKLNVYTDSRYAFATAHIHGEIYRRRGWLTSEGKEIKNKDEILALLKALFLPKRLSIIHCPGHQKGHSAEARGNRMADQAARKAAITETPDTSTLLAGKRTADGSEFEKRTADGSEFESPKKKAKVE

SEQ ID NO: 2723 - protein, 2096 aa, synthetic construct
MPAAKRVKLDGGDKKYSIGLDIGTNSVGWAVITDEYKVPSKKFKVLGNTDRHSIKKNLIGALLFDSGETAEATRLKRTARRRYTRRKNRICYLQEIFSNEMAKVDDSFFHRLEESFLVEEDKKHERHPIFGNIVDEVAYHEKYPTIYHLRKKLVDSTDKADLRLIYLALAHMIKFRGHFLIEGDLNPDNSDVDKLFIQLVQTYNQLFEENPINASGVDAKAILSARLSKSRRLENLIAQLPGEKKNGLFGNLIALSLGLTPNFKSNFDLAEDAKLQLSKDTYDDDLDNLLAQIGDQYADLFLAAKNLSDAILLSDILRVNTEITKAPLSASMIKRYDEHHQDLTLLKALVRQQLPEKYKEIFFDQSKNGYAGYIDGGASQEEFYKFIKPILEKMDGTEELLVKLNREDLLRKQRTFDNGSIPHQIHLGELHAILRRQEDFYPFLKDNREKIEKILTFRIPYYVGPLARGNSRFAWMTRKSEETITPWNFEEVVDKGASAQSFIERMTNFDKNLPNEKVLPKHSLLYEYFTVYNELTKVKYVTEGMRKPAFLSGEQKKAIVDLLFKTNRKVTVKQLKEDYFKKIECFDSVEISGVEDRFNASLGTYHDLLKIIKDKDFLDNEENEDILEDIVLTLTLFEDREMIEERLKTYAHLFDDKVMKQLKRRRYTGWGRLSRKLINGIRDKQSGKTILDFLKSDGFANRNFMQLIHDDSLTFKEDIQKAQVSGQGDSLHEHIANLAGSPAIKKGILQTVKVVDELVKVMGRHKPENIVIEMARENQTTQKGQKNSRERMKRIEEGIKELGSQILKEHPVENTQLQNEKLYLYYLQNGRDMYVDQELDINRLSDYDVDHIVPQSFLKDDSIDNKVLTRSDKARGKSDNVPSEEVVKKMKNYWRQLLNAKLITQRKFDNLTKAERGGLSELDKAGFIKRQLVETRQITKHVAQILDSRMNTKYDENDKLIREVKVITLKSKLVSDFRKDFQFYKVREINNYHHAHDAYLNAVVGTALIKKYPKLESEFVYGDYKVYDVRKMIAKSEQEIGKATAKYFFYSNIMNFFKTEITLANGEIRKRPLIETNGETGEIVWDKGRDFATVRKVLSMPQVNIVKKTEVQTGGFSKESILPKRNSDKLIARKKDWDPKKYGGFDSPTVAYSVLVVAKVEKGKSKKLKSVKELLGITIMERSSFEKNPIDFLEAKGYKEVKKDLIIKLPKYSLFELENGRKRMLASAGELQKGNELALPSKYVNFLYLASHYEKLKGSPEDNEQKQLFVEQHKHYLDEIIEQISEFSKRVILADANLDKVLSAYNKHRDKPIREQAENIIHLFTLTNLGAPAAFKYFDTTIDRKRYTSTKEVLDATLIHQSITGLYETRIDLSQLGGDGGEAAAKGSSPAPGGTLNIEDEHRLHETSKEPDVSLGSTWLSDFPQAWAETGGMGLAVRQAPLIIPLKATSTPVSIKQYPMSQEARLGIKPHIQRLLDQGILVPCQSPWNTPLLPVKKPGTNDYRPVQDLREVNKRVEDIHPTVPNPYNLLSGLPPSHQWYTVLDLKDAFFCLRLHPTSQPLFAFEWRDPEMGISGQLTWTRLPQGFKNSPTLFNEALHRDLADFRIQHPDLILLQYVDDLLLAATSELDCQQGTRALLQTLGNLGYRASAKKAQICQKQVKYLGYLLKEGQRWLTEARKETVMGQPTPKTPRQLREFLGTAGFCRLWIPGFAEMAAPLYPLTKPGTLFNWGPDQQKAYQEIKQALLTAPALGLPDLTKPFELFVDEKQGYAKGVLTQKLGPWRRPVAYLSKKLDPVAAGWPPCLRMVAAIAVLTKDAGKLTMGQPLVILAPHAVEALVKQPPDRWLSNARMTHYQALLLDTDRVQFGPVVALNPATLLPLPEEGLQHNCLDILAEAHGTRPDLTDQPLPDADHTWYTDGSSLLQEGQRKAGAAVTTETEVIWAKALPAGTSAQRAELIALTQALKMAEGKKLNVYTDSRYAFATAHIHGEIYRRRGWLTSEGKEIKNKDEILALLKALFLPKRLSIIHCPGHQKGHSAEARGNRMADQAARKAAITETPDTSTLLAGKRTADGSEFEKRTADGSEFESPKKKAKVE

SEQ ID NO: 2724 - protein, 2093 aa, synthetic construct
MPAAKRVKLDGGDKKYSIGLDIGTNSVGWAVITDEYKVPSKKFKVLGNTDRHSIKKNLIGALLFDSGETAEATRLKRTARRRYTRRKNRICYLQEIFSNEMAKVDDSFFHRLEESFLVEEDKKHERHPIFGNIVDEVAYHEKYPTIYHLRKKLVDSTDKADLRLIYLALAHMIKFRGHFLIEGDLNPDNSDVDKLFIQLVQTYNQLFEENPINASGVDAKAILSARLSKSRRLENLIAQLPGEKKNGLFGNLIALSLGLTPNFKSNFDLAEDAKLQLSKDTYDDDLDNLLAQIGDQYADLFLAAKNLSDAILLSDILRVNTEITKAPLSASMIKRYDEHHQDLTLLKALVRQQLPEKYKEIFFDQSKNGYAGYIDGGASQEEFYKFIKPILEKMDGTEELLVKLNREDLLRKQRTFDNGSIPHQIHLGELHAILRRQEDFYPFLKDNREKIEKILTFRIPYYVGPLARGNSRFAWMTRKSEETITPWNFEEVVDKGASAQSFIERMTNFDKNLPNEKVLPKHSLLYEYFTVYNELTKVKYVTEGMRKPAFLSGEQKKAIVDLLFKTNRKVTVKQLKEDYFKKIECFDSVEISGVEDRFNASLGTYHDLLKIIKDKDFLDNEENEDILEDIVLTLTLFEDREMIEERLKTYAHLFDDKVMKQLKRRRYTGWGRLSRKLINGIRDKQSGKTILDFLKSDGFANRNFMQLIHDDSLTFKEDIQKAQVSGQGDSLHEHIANLAGSPAIKKGILQTVKVVDELVKVMGRHKPENIVIEMARENQTTQKGQKNSRERMKRIEEGIKELGSQILKEHPVENTQLQNEKLYLYYLQNGRDMYVDQELDINRLSDYDVDHIVPQSFLKDDSIDNKVLTRSDKARGKSDNVPSEEVVKKMKNYWRQLLNAKLITQRKFDNLTKAERGGLSELDKAGFIKRQLVETRQITKHVAQILDSRMNTKYDENDKLIREVKVITLKSKLVSDFRKDFQFYKVREINNYHHAHDAYLNAVVGTALIKKYPKLESEFVYGDYKVYDVRKMIAKSEQEIGKATAKYFFYSNIMNFFKTEITLANGEIRKRPLIETNGETGEIVWDKGRDFATVRKVLSMPQVNIVKKTEVQTGGFSKESILPKRNSDKLIARKKDWDPKKYGGFDSPTVAYSVLVVAKVEKGKSKKLKSVKELLGITIMERSSFEKNPIDFLEAKGYKEVKKDLIIKLPKYSLFELENGRKRMLASAGELQKGNELALPSKYVNFLYLASHYEKLKGSPEDNEQKQLFVEQHKHYLDEIIEQISEFSKRVILADANLDKVLSAYNKHRDKPIREQAENIIHLFTLTNLGAPAAFKYFDTTIDRKRYTSTKEVLDATLIHQSITGLYETRIDLSQLGGDGGEAAAKPAPGGTLNIEDEHRLHETSKEPDVSLGSTWLSDFPQAWAETGGMGLAVRQAPLIIPLKATSTPVSIKQYPMSQEARLGIKPHIQRLLDQGILVPCQSPWNTPLLPVKKPGTNDYRPVQDLREVNKRVEDIHPTVPNPYNLLSGLPPSHQWYTVLDLKDAFFCLRLHPTSQPLFAFEWRDPEMGISGQLTWTRLPQGFKNSPTLFNEALHRDLADFRIQHPDLILLQYVDDLLLAATSELDCQQGTRALLQTLGNLGYRASAKKAQICQKQVKYLGYLLKEGQRWLTEARKETVMGQPTPKTPRQLREFLGTAGFCRLWIPGFAEMAAPLYPLTKPGTLFNWGPDQQKAYQEIKQALLTAPALGLPDLTKPFELFVDEKQGYAKGVLTQKLGPWRRPVAYLSKKLDPVAAGWPPCLRMVAAIAVLTKDAGKLTMGQPLVILAPHAVEALVKQPPDRWLSNARMTHYQALLLDTDRVQFGPVVALNPATLLPLPEEGLQHNCLDILAEAHGTRPDLTDQPLPDADHTWYTDGSSLLQEGQRKAGAAVTTETEVIWAKALPAGTSAQRAELIALTQALKMAEGKKLNVYTDSRYAFATAHIHGEIYRRRGWLTSEGKEIKNKDEILALLKALFLPKRLSIIHCPGHQKGHSAEARGNRMADQAARKAAITETPDTSTLLAGKRTADGSEFEKRTADGSEFESPKKKAKVE

SEQ ID NO: 2725 - protein, 2100 aa, synthetic construct
MPAAKRVKLDGGDKKYSIGLDIGTNSVGWAVITDEYKVPSKKFKVLGNTDRHSIKKNLIGALLFDSGETAEATRLKRTARRRYTRRKNRICYLQEIFSNEMAKVDDSFFHRLEESFLVEEDKKHERHPIFGNIVDEVAYHEKYPTIYHLRKKLVDSTDKADLRLIYLALAHMIKFRGHFLIEGDLNPDNSDVDKLFIQLVQTYNQLFEENPINASGVDAKAILSARLSKSRRLENLIAQLPGEKKNGLFGNLIALSLGLTPNFKSNFDLAEDAKLQLSKDTYDDDLDNLLAQIGDQYADLFLAAKNLSDAILLSDILRVNTEITKAPLSASMIKRYDEHHQDLTLLKALVRQQLPEKYKEIFFDQSKNGYAGYIDGGASQEEFYKFIKPILEKMDGTEELLVKLNREDLLRKQRTFDNGSIPHQIHLGELHAILRRQEDFYPFLKDNREKIEKILTFRIPYYVGPLARGNSRFAWMTRKSEETITPWNFEEVVDKGASAQSFIERMTNFDKNLPNEKVLPKHSLLYEYFTVYNELTKVKYVTEGMRKPAFLSGEQKKAIVDLLFKTNRKVTVKQLKEDYFKKIECFDSVEISGVEDRFNASLGTYHDLLKIIKDKDFLDNEENEDILEDIVLTLTLFEDREMIEERLKTYAHLFDDKVMKQLKRRRYTGWGRLSRKLINGIRDKQSGKTILDFLKSDGFANRNFMQLIHDDSLTFKEDIQKAQVSGQGDSLHEHIANLAGSPAIKKGILQTVKVVDELVKVMGRHKPENIVIEMARENQTTQKGQKNSRERMKRIEEGIKELGSQILKEHPVENTQLQNEKLYLYYLQNGRDMYVDQELDINRLSDYDVDHIVPQSFLKDDSIDNKVLTRSDKARGKSDNVPSEEVVKKMKNYWRQLLNAKLITQRKFDNLTKAERGGLSELDKAGFIKRQLVETRQITKHVAQILDSRMNTKYDENDKLIREVKVITLKSKLVSDFRKDFQFYKVREINNYHHAHDAYLNAVVGTALIKKYPKLESEFVYGDYKVYDVRKMIAKSEQEIGKATAKYFFYSNIMNFFKTEITLANGEIRKRPLIETNGETGEIVWDKGRDFATVRKVLSMPQVNIVKKTEVQTGGFSKESILPKRNSDKLIARKKDWDPKKYGGFDSPTVAYSVLVVAKVEKGKSKKLKSVKELLGITIMERSSFEKNPIDFLEAKGYKEVKKDLIIKLPKYSLFELENGRKRMLASAGELQKGNELALPSKYVNFLYLASHYEKLKGSPEDNEQKQLFVEQHKHYLDEIIEQISEFSKRVILADANLDKVLSAYNKHRDKPIREQAENIIHLFTLTNLGAPAAFKYFDTTIDRKRYTSTKEVLDATLIHQSITGLYETRIDLSQLGGDGGGGGGSEAAAKGGGGSGGTLNIEDEHRLHETSKEPDVSLGSTWLSDFPQAWAETGGMGLAVRQAPLIIPLKATSTPVSIKQYPMSQEARLGIKPHIQRLLDQGILVPCQSPWNTPLLPVKKPGTNDYRPVQDLREVNKRVEDIHPTVPNPYNLLSGLPPSHQWYTVLDLKDAFFCLRLHPTSQPLFAFEWRDPEMGISGQLTWTRLPQGFKNSPTLFNEALHRDLADFRIQHPDLILLQYVDDLLLAATSELDCQQGTRALLQTLGNLGYRASAKKAQICQKQVKYLGYLLKEGQRWLTEARKETVMGQPTPKTPRQLREFLGTAGFCRLWIPGFAEMAAPLYPLTKPGTLFNWGPDQQKAYQEIKQALLTAPALGLPDLTKPFELFVDEKQGYAKGVLTQKLGPWRRPVAYLSKKLDPVAAGWPPCLRMVAAIAVLTKDAGKLTMGQPLVILAPHAVEALVKQPPDRWLSNARMTHYQALLLDTDRVQFGPVVALNPATLLPLPEEGLQHNCLDILAEAHGTRPDLTDQPLPDADHTWYTDGSSLLQEGQRKAGAAVTTETEVIWAKALPAGTSAQRAELIALTQALKMAEGKKLNVYTDSRYAFATAHIHGEIYRRRGWLTSEGKEIKNKDEILALLKALFLPKRLSIIHCPGHQKGHSAEARGNRMADQAARKAAITETPDTSTLLAGKRTADGSEFEKRTADGSEFESPKKKAKVE

SEQ ID NO: 2726 - protein, 2093 aa, synthetic construct
MPAAKRVKLDGGDKKYSIGLDIGTNSVGWAVITDEYKVPSKKFKVLGNTDRHSIKKNLIGALLFDSGETAEATRLKRTARRRYTRRKNRICYLQEIFSNEMAKVDDSFFHRLEESFLVEEDKKHERHPIFGNIVDEVAYHEKYPTIYHLRKKLVDSTDKADLRLIYLALAHMIKFRGHFLIEGDLNPDNSDVDKLFIQLVQTYNQLFEENPINASGVDAKAILSARLSKSRRLENLIAQLPGEKKNGLFGNLIALSLGLTPNFKSNFDLAEDAKLQLSKDTYDDDLDNLLAQIGDQYADLFLAAKNLSDAILLSDILRVNTEITKAPLSASMIKRYDEHHQDLTLLKALVRQQLPEKYKEIFFDQSKNGYAGYIDGGASQEEFYKFIKPILEKMDGTEELLVKLNREDLLRKQRTFDNGSIPHQIHLGELHAILRRQEDFYPFLKDNREKIEKILTFRIPYYVGPLARGNSRFAWMTRKSEETITPWNFEEVVDKGASAQSFIERMTNFDKNLPNEKVLPKHSLLYEYFTVYNELTKVKYVTEGMRKPAFLSGEQKKAIVDLLFKTNRKVTVKQLKEDYFKKIECFDSVEISGVEDRFNASLGTYHDLLKIIKDKDFLDNEENEDILEDIVLTLTLFEDREMIEERLKTYAHLFDDKVMKQLKRRRYTGWGRLSRKLINGIRDKQSGKTILDFLKSDGFANRNFMQLIHDDSLTFKEDIQKAQVSGQGDSLHEHIANLAGSPAIKKGILQTVKVVDELVKVMGRHKPENIVIEMARENQTTQKGQKNSRERMKRIEEGIKELGSQILKEHPVENTQLQNEKLYLYYLQNGRDMYVDQELDINRLSDYDVDHIVPQSFLKDDSIDNKVLTRSDKARGKSDNVPSEEVVKKMKNYWRQLLNAKLITQRKFDNLTKAERGGLSELDKAGFIKRQLVETRQITKHVAQILDSRMNTKYDENDKLIREVKVITLKSKLVSDFRKDFQFYKVREINNYHHAHDAYLNAVVGTALIKKYPKLESEFVYGDYKVYDVRKMIAKSEQEIGKATAKYFFYSNIMNFFKTEITLANGEIRKRPLIETNGETGEIVWDKGRDFATVRKVLSMPQVNIVKKTEVQTGGFSKESILPKRNSDKLIARKKDWDPKKYGGFDSPTVAYSVLVVAKVEKGKSKKLKSVKELLGITIMERSSFEKNPIDFLEAKGYKEVKKDLIIKLPKYSLFELENGRKRMLASAGELQKGNELALPSKYVNFLYLASHYEKLKGSPEDNEQKQLFVEQHKHYLDEIIEQISEFSKRVILADANLDKVLSAYNKHRDKPIREQAENIIHLFTLTNLGAPAAFKYFDTTIDRKRYTSTKEVLDATLIHQSITGLYETRIDLSQLGGDGGEAAAKGGSGGTLNIEDEHRLHETSKEPDVSLGSTWLSDFPQAWAETGGMGLAVRQAPLIIPLKATSTPVSIKQYPMSQEARLGIKPHIQRLLDQGILVPCQSPWNTPLLPVKKPGTNDYRPVQDLREVNKRVEDIHPTVPNPYNLLSGLPPSHQWYTVLDLKDAFFCLRLHPTSQPLFAFEWRDPEMGISGQLTWTRLPQGFKNSPTLFNEALHRDLADFRIQHPDLILLQYVDDLLLAATSELDCQQGTRALLQTLGNLGYRASAKKAQICQKQVKYLGYLLKEGQRWLTEARKETVMGQPTPKTPRQLREFLGTAGFCRLWIPGFAEMAAPLYPLTKPGTLFNWGPDQQKAYQEIKQALLTAPALGLPDLTKPFELFVDEKQGYAKGVLTQKLGPWRRPVAYLSKKLDPVAAGWPPCLRMVAAIAVLTKDAGKLTMGQPLVILAPHAVEALVKQPPDRWLSNARMTHYQALLLDTDRVQFGPVVALNPATLLPLPEEGLQHNCLDILAEAHGTRPDLTDQPLPDADHTWYTDGSSLLQEGQRKAGAAVTTETEVIWAKALPAGTSAQRAELIALTQALKMAEGKKLNVYTDSRYAFATAHIHGEIYRRRGWLTSEGKEIKNKDEILALLKALFLPKRLSIIHCPGHQKGHSAEARGNRMADQAARKAAITETPDTSTLLAGKRTADGSEFEKRTADGSEFESPKKKAKVE

SEQ ID NO: 2727 - protein, 2096 aa, synthetic construct
MPAAKRVKLDGGDKKYSIGLDIGTNSVGWAVITDEYKVPSKKFKVLGNTDRHSIKKNLIGALLFDSGETAEATRLKRTARRRYTRRKNRICYLQEIFSNEMAKVDDSFFHRLEESFLVEEDKKHERHPIFGNIVDEVAYHEKYPTIYHLRKKLVDSTDKADLRLIYLALAHMIKFRGHFLIEGDLNPDNSDVDKLFIQLVQTYNQLFEENPINASGVDAKAILSARLSKSRRLENLIAQLPGEKKNGLFGNLIALSLGLTPNFKSNFDLAEDAKLQLSKDTYDDDLDNLLAQIGDQYADLFLAAKNLSDAILLSDILRVNTEITKAPLSASMIKRYDEHHQDLTLLKALVRQQLPEKYKEIFFDQSKNGYAGYIDGGASQEEFYKFIKPILEKMDGTEELLVKLNREDLLRKQRTFDNGSIPHQIHLGELHAILRRQEDFYPFLKDNREKIEKILTFRIPYYVGPLARGNSRFAWMTRKSEETITPWNFEEVVDKGASAQSFIERMTNFDKNLPNEKVLPKHSLLYEYFTVYNELTKVKYVTEGMRKPAFLSGEQKKAIVDLLFKTNRKVTVKQLKEDYFKKIECFDSVEISGVEDRFNASLGTYHDLLKIIKDKDFLDNEENEDILEDIVLTLTLFEDREMIEERLKTYAHLFDDKVMKQLKRRRYTGWGRLSRKLINGIRDKQSGKTILDFLKSDGFANRNFMQLIHDDSLTFKEDIQKAQVSGQGDSLHEHIANLAGSPAIKKGILQTVKVVDELVKVMGRHKPENIVIEMARENQTTQKGQKNSRERMKRIEEGIKELGSQILKEHPVENTQLQNEKLYLYYLQNGRDMYVDQELDINRLSDYDVDHIVPQSFLKDDSIDNKVLTRSDKARGKSDNVPSEEVVKKMKNYWRQLLNAKLITQRKFDNLTKAERGGLSELDKAGFIKRQLVETRQITKHVAQILDSRMNTKYDENDKLIREVKVITLKSKLVSDFRKDFQFYKVREINNYHHAHDAYLNAVVGTALIKKYPKLESEFVYGDYKVYDVRKMIAKSEQEIGKATAKYFFYSNIMNFFKTEITLANGEIRKRPLIETNGETGEIVWDKGRDFATVRKVLSMPQVNIVKKTEVQTGGFSKESILPKRNSDKLIARKKDWDPKKYGGFDSPTVAYSVLVVAKVEKGKSKKLKSVKELLGITIMERSSFEKNPIDFLEAKGYKEVKKDLIIKLPKYSLFELENGRKRMLASAGELQKGNELALPSKYVNFLYLASHYEKLKGSPEDNEQKQLFVEQHKHYLDEIIEQISEFSKRVILADANLDKVLSAYNKHRDKPIREQAENIIHLFTLTNLGAPAAFKYFDTTIDRKRYTSTKEVLDATLIHQSITGLYETRIDLSQLGGDGGEAAAKGGSGSSGGTLNIEDEHRLHETSKEPDVSLGSTWLSDFPQAWAETGGMGLAVRQAPLIIPLKATSTPVSIKQYPMSQEARLGIKPHIQRLLDQGILVPCQSPWNTPLLPVKKPGTNDYRPVQDLREVNKRVEDIHPTVPNPYNLLSGLPPSHQWYTVLDLKDAFFCLRLHPTSQPLFAFEWRDPEMGISGQLTWTRLPQGFKNSPTLFNEALHRDLADFRIQHPDLILLQYVDDLLLAATSELDCQQGTRALLQTLGNLGYRASAKKAQICQKQVKYLGYLLKEGQRWLTEARKETVMGQPTPKTPRQLREFLGTAGFCRLWIPGFAEMAAPLYPLTKPGTLFNWGPDQQKAYQEIKQALLTAPALGLPDLTKPFELFVDEKQGYAKGVLTQKLGPWRRPVAYLSKKLDPVAAGWPPCLRMVAAIAVLTKDAGKLTMGQPLVILAPHAVEALVKQPPDRWLSNARMTHYQALLLDTDRVQFGPVVALNPATLLPLPEEGLQHNCLDILAEAHGTRPDLTDQPLPDADHTWYTDGSSLLQEGQRKAGAAVTTETEVIWAKALPAGTSAQRAELIALTQALKMAEGKKLNVYTDSRYAFATAHIHGEIYRRRGWLTSEGKEIKNKDEILALLKALFLPKRLSIIHCPGHQKGHSAEARGNRMADQAARKAAITETPDTSTLLAGKRTADGSEFEKRTADGSEFESPKKKAKVE

SEQ ID NO: 2728 - protein, 2097 aa, synthetic construct
MPAAKRVKLDGGDKKYSIGLDIGTNSVGWAVITDEYKVPSKKFKVLGNTDRHSIKKNLIGALLFDSGETAEATRLKRTARRRYTRRKNRICYLQEIFSNEMAKVDDSFFHRLEESFLVEEDKKHERHPIFGNIVDEVAYHEKYPTIYHLRKKLVDSTDKADLRLIYLALAHMIKFRGHFLIEGDLNPDNSDVDKLFIQLVQTYNQLFEENPINASGVDAKAILSARLSKSRRLENLIAQLPGEKKNGLFGNLIALSLGLTPNFKSNFDLAEDAKLQLSKDTYDDDLDNLLAQIGDQYADLFLAAKNLSDAILLSDILRVNTEITKAPLSASMIKRYDEHHQDLTLLKALVRQQLPEKYKEIFFDQSKNGYAGYIDGGASQEEFYKFIKPILEKMDGTEELLVKLNREDLLRKQRTFDNGSIPHQIHLGELHAILRRQEDFYPFLKDNREKIEKILTFRIPYYVGPLARGNSRFAWMTRKSEETITPWNFEEVVDKGASAQSFIERMTNFDKNLPNEKVLPKHSLLYEYFTVYNELTKVKYVTEGMRKPAFLSGEQKKAIVDLLFKTNRKVTVKQLKEDYFKKIECFDSVEISGVEDRFNASLGTYHDLLKIIKDKDFLDNEENEDILEDIVLTLTLFEDREMIEERLKTYAHLFDDKVMKQLKRRRYTGWGRLSRKLINGIRDKQSGKTILDFLKSDGFANRNFMQLIHDDSLTFKEDIQKAQVSGQGDSLHEHIANLAGSPAIKKGILQTVKVVDELVKVMGRHKPENIVIEMARENQTTQKGQKNSRERMKRIEEGIKELGSQILKEHPVENTQLQNEKLYLYYLQNGRDMYVDQELDINRLSDYDVDHIVPQSFLKDDSIDNKVLTRSDKARGKSDNVPSEEVVKKMKNYWRQLLNAKLITQRKFDNLTKAERGGLSELDKAGFIKRQLVETRQITKHVAQILDSRMNTKYDENDKLIREVKVITLKSKLVSDFRKDFQFYKVREINNYHHAHDAYLNAVVGTALIKKYPKLESEFVYGDYKVYDVRKMIAKSEQEIGKATAKYFFYSNIMNFFKTEITLANGEIRKRPLIETNGETGEIVWDKGRDFATVRKVLSMPQVNIVKKTEVQTGGFSKESILPKRNSDKLIARKKDWDPKKYGGFDSPTVAYSVLVVAKVEKGKSKKLKSVKELLGITIMERSSFEKNPIDFLEAKGYKEVKKDLIIKLPKYSLFELENGRKRMLASAGELQKGNELALPSKYVNFLYLASHYEKLKGSPEDNEQKQLFVEQHKHYLDEIIEQISEFSKRVILADANLDKVLSAYNKHRDKPIREQAENIIHLFTLTNLGAPAAFKYFDTTIDRKRYTSTKEVLDATLIHQSITGLYETRIDLSQLGGDGGGSSGSSGSSGSSGGTLNIEDEHRLHETSKEPDVSLGSTWLSDFPQAWAETGGMGLAVRQAPLIIPLKATSTPVSIKQYPMSQEARLGIKPHIQRLLDQGILVPCQSPWNTPLLPVKKPGTNDYRPVQDLREVNKRVEDIHPTVPNPYNLLSGLPPSHQWYTVLDLKDAFFCLRLHPTSQPLFAFEWRDPEMGISGQLTWTRLPQGFKNSPTLFNEALHRDLADFRIQHPDLILLQYVDDLLLAATSELDCQQGTRALLQTLGNLGYRASAKKAQICQKQVKYLGYLLKEGQRWLTEARKETVMGQPTPKTPRQLREFLGTAGFCRLWIPGFAEMAAPLYPLTKPGTLFNWGPDQQKAYQEIKQALLTAPALGLPDLTKPFELFVDEKQGYAKGVLTQKLGPWRRPVAYLSKKLDPVAAGWPPCLRMVAAIAVLTKDAGKLTMGQPLVILAPHAVEALVKQPPDRWLSNARMTHYQALLLDTDRVQFGPVVALNPATLLPLPEEGLQHNCLDILAEAHGTRPDLTDQPLPDADHTWYTDGSSLLQEGQRKAGAAVTTETEVIWAKALPAGTSAQRAELIALTQALKMAEGKKLNVYTDSRYAFATAHIHGEIYRRRGWLTSEGKEIKNKDEILALLKALFLPKRLSIIHCPGHQKGHSAEARGNRMADQAARKAAITETPDTSTLLAGKRTADGSEFEKRTADGSEFESPKKKAKVE

SEQ ID NO: 2729 - protein, 2095 aa, synthetic construct
MPAAKRVKLDGGDKKYSIGLDIGTNSVGWAVITDEYKVPSKKFKVLGNTDRHSIKKNLIGALLFDSGETAEATRLKRTARRRYTRRKNRICYLQEIFSNEMAKVDDSFFHRLEESFLVEEDKKHERHPIFGNIVDEVAYHEKYPTIYHLRKKLVDSTDKADLRLIYLALAHMIKFRGHFLIEGDLNPDNSDVDKLFIQLVQTYNQLFEENPINASGVDAKAILSARLSKSRRLENLIAQLPGEKKNGLFGNLIALSLGLTPNFKSNFDLAEDAKLQLSKDTYDDDLDNLLAQIGDQYADLFLAAKNLSDAILLSDILRVNTEITKAPLSASMIKRYDEHHQDLTLLKALVRQQLPEKYKEIFFDQSKNGYAGYIDGGASQEEFYKFIKPILEKMDGTEELLVKLNREDLLRKQRTFDNGSIPHQIHLGELHAILRRQEDFYPFLKDNREKIEKILTFRIPYYVGPLARGNSRFAWMTRKSEETITPWNFEEVVDKGASAQSFIERMTNFDKNLPNEKVLPKHSLLYEYFTVYNELTKVKYVTEGMRKPAFLSGEQKKAIVDLLFKTNRKVTVKQLKEDYFKKIECFDSVEISGVEDRFNASLGTYHDLLKIIKDKDFLDNEENEDILEDIVLTLTLFEDREMIEERLKTYAHLFDDKVMKQLKRRRYTGWGRLSRKLINGIRDKQSGKTILDFLKSDGFANRNFMQLIHDDSLTFKEDIQKAQVSGQGDSLHEHIANLAGSPAIKKGILQTVKVVDELVKVMGRHKPENIVIEMARENQTTQKGQKNSRERMKRIEEGIKELGSQILKEHPVENTQLQNEKLYLYYLQNGRDMYVDQELDINRLSDYDVDHIVPQSFLKDDSIDNKVLTRSDKARGKSDNVPSEEVVKKMKNYWRQLLNAKLITQRKFDNLTKAERGGLSELDKAGFIKRQLVETRQITKHVAQILDSRMNTKYDENDKLIREVKVITLKSKLVSDFRKDFQFYKVREINNYHHAHDAYLNAVVGTALIKKYPKLESEFVYGDYKVYDVRKMIAKSEQEIGKATAKYFFYSNIMNFFKTEITLANGEIRKRPLIETNGETGEIVWDKGRDFATVRKVLSMPQVNIVKKTEVQTGGFSKESILPKRNSDKLIARKKDWDPKKYGGFDSPTVAYSVLVVAKVEKGKSKKLKSVKELLGITIMERSSFEKNPIDFLEAKGYKEVKKDLIIKLPKYSLFELENGRKRMLASAGELQKGNELALPSKYVNFLYLASHYEKLKGSPEDNEQKQLFVEQHKHYLDEIIEQISEFSKRVILADANLDKVLSAYNKHRDKPIREQAENIIHLFTLTNLGAPAAFKYFDTTIDRKRYTSTKEVLDATLIHQSITGLYETRIDLSQLGGDGGEAAAKEAAAKGGTLNIEDEHRLHETSKEPDVSLGSTWLSDFPQAWAETGGMGLAVRQAPLIIPLKATSTPVSIKQYPMSQEARLGIKPHIQRLLDQGILVPCQSPWNTPLLPVKKPGTNDYRPVQDLREVNKRVEDIHPTVPNPYNLLSGLPPSHQWYTVLDLKDAFFCLRLHPTSQPLFAFEWRDPEMGISGQLTWTRLPQGFKNSPTLFNEALHRDLADFRIQHPDLILLQYVDDLLLAATSELDCQQGTRALLQTLGNLGYRASAKKAQICQKQVKYLGYLLKEGQRWLTEARKETVMGQPTPKTPRQLREFLGTAGFCRLWIPGFAEMAAPLYPLTKPGTLFNWGPDQQKAYQEIKQALLTAPALGLPDLTKPFELFVDEKQGYAKGVLTQKLGPWRRPVAYLSKKLDPVAAGWPPCLRMVAAIAVLTKDAGKLTMGQPLVILAPHAVEALVKQPPDRWLSNARMTHYQALLLDTDRVQFGPVVALNPATLLPLPEEGLQHNCLDILAEAHGTRPDLTDQPLPDADHTWYTDGSSLLQEGQRKAGAAVTTETEVIWAKALPAGTSAQRAELIALTQALKMAEGKKLNVYTDSRYAFATAHIHGEIYRRRGWLTSEGKEIKNKDEILALLKALFLPKRLSIIHCPGHQKGHSAEARGNRMADQAARKAAITETPDTSTLLAGKRTADGSEFEKRTADGSEFESPKKKAKVE

SEQ ID NO: 2730 - protein, 2090 aa, synthetic construct
MPAAKRVKLDGGDKKYSIGLDIGTNSVGWAVITDEYKVPSKKFKVLGNTDRHSIKKNLIGALLFDSGETAEATRLKRTARRRYTRRKNRICYLQEIFSNEMAKVDDSFFHRLEESFLVEEDKKHERHPIFGNIVDEVAYHEKYPTIYHLRKKLVDSTDKADLRLIYLALAHMIKFRGHFLIEGDLNPDNSDVDKLFIQLVQTYNQLFEENPINASGVDAKAILSARLSKSRRLENLIAQLPGEKKNGLFGNLIALSLGLTPNFKSNFDLAEDAKLQLSKDTYDDDLDNLLAQIGDQYADLFLAAKNLSDAILLSDILRVNTEITKAPLSASMIKRYDEHHQDLTLLKALVRQQLPEKYKEIFFDQSKNGYAGYIDGGASQEEFYKFIKPILEKMDGTEELLVKLNREDLLRKQRTFDNGSIPHQIHLGELHAILRRQEDFYPFLKDNREKIEKILTFRIPYYVGPLARGNSRFAWMTRKSEETITPWNFEEVVDKGASAQSFIERMTNFDKNLPNEKVLPKHSLLYEYFTVYNELTKVKYVTEGMRKPAFLSGEQKKAIVDLLFKTNRKVTVKQLKEDYFKKIECFDSVEISGVEDRFNASLGTYHDLLKIIKDKDFLDNEENEDILEDIVLTLTLFEDREMIEERLKTYAHLFDDKVMKQLKRRRYTGWGRLSRKLINGIRDKQSGKTILDFLKSDGFANRNFMQLIHDDSLTFKEDIQKAQVSGQGDSLHEHIANLAGSPAIKKGILQTVKVVDELVKVMGRHKPENIVIEMARENQTTQKGQKNSRERMKRIEEGIKELGSQILKEHPVENTQLQNEKLYLYYLQNGRDMYVDQELDINRLSDYDVDHIVPQSFLKDDSIDNKVLTRSDKARGKSDNVPSEEVVKKMKNYWRQLLNAKLITQRKFDNLTKAERGGLSELDKAGFIKRQLVETRQITKHVAQILDSRMNTKYDENDKLIREVKVITLKSKLVSDFRKDFQFYKVREINNYHHAHDAYLNAVVGTALIKKYPKLESEFVYGDYKVYDVRKMIAKSEQEIGKATAKYFFYSNIMNFFKTEITLANGEIRKRPLIETNGETGEIVWDKGRDFATVRKVLSMPQVNIVKKTEVQTGGFSKESILPKRNSDKLIARKKDWDPKKYGGFDSPTVAYSVLVVAKVEKGKSKKLKSVKELLGITIMERSSFEKNPIDFLEAKGYKEVKKDLIIKLPKYSLFELENGRKRMLASAGELQKGNELALPSKYVNFLYLASHYEKLKGSPEDNEQKQLFVEQHKHYLDEIIEQISEFSKRVILADANLDKVLSAYNKHRDKPIREQAENIIHLFTLTNLGAPAAFKYFDTTIDRKRYTSTKEVLDATLIHQSITGLYETRIDLSQLGGDGGEAAAKGGTLNIEDEHRLHETSKEPDVSLGSTWLSDFPQAWAETGGMGLAVRQAPLIIPLKATSTPVSIKQYPMSQEARLGIKPHIQRLLDQGILVPCQSPWNTPLLPVKKPGTNDYRPVQDLREVNKRVEDIHPTVPNPYNLLSGLPPSHQWYTVLDLKDAFFCLRLHPTSQPLFAFEWRDPEMGISGQLTWTRLPQGFKNSPTLFNEALHRDLADFRIQHPDLILLQYVDDLLLAATSELDCQQGTRALLQTLGNLGYRASAKKAQICQKQVKYLGYLLKEGQRWLTEARKETVMGQPTPKTPRQLREFLGTAGFCRLWIPGFAEMAAPLYPLTKPGTLFNWGPDQQKAYQEIKQALLTAPALGLPDLTKPFELFVDEKQGYAKGVLTQKLGPWRRPVAYLSKKLDPVAAGWPPCLRMVAAIAVLTKDAGKLTMGQPLVILAPHAVEALVKQPPDRWLSNARMTHYQALLLDTDRVQFGPVVALNPATLLPLPEEGLQHNCLDILAEAHGTRPDLTDQPLPDADHTWYTDGSSLLQEGQRKAGAAVTTETEVIWAKALPAGTSAQRAELIALTQALKMAEGKKLNVYTDSRYAFATAHIHGEIYRRRGWLTSEGKEIKNKDEILALLKALFLPKRLSIIHCPGHQKGHSAEARGNRMADQAARKAAITETPDTSTLLAGKRTADGSEFEKRTADGSEFESPKKKAKVE

SEQ ID NO: 2731 - protein, 2094 aa, synthetic construct
MPAAKRVKLDGGDKKYSIGLDIGTNSVGWAVITDEYKVPSKKFKVLGNTDRHSIKKNLIGALLFDSGETAEATRLKRTARRRYTRRKNRICYLQEIFSNEMAKVDDSFFHRLEESFLVEEDKKHERHPIFGNIVDEVAYHEKYPTIYHLRKKLVDSTDKADLRLIYLALAHMIKFRGHFLIEGDLNPDNSDVDKLFIQLVQTYNQLFEENPINASGVDAKAILSARLSKSRRLENLIAQLPGEKKNGLFGNLIALSLGLTPNFKSNFDLAEDAKLQLSKDTYDDDLDNLLAQIGDQYADLFLAAKNLSDAILLSDILRVNTEITKAPLSASMIKRYDEHHQDLTLLKALVRQQLPEKYKEIFFDQSKNGYAGYIDGGASQEEFYKFIKPILEKMDGTEELLVKLNREDLLRKQRTFDNGSIPHQIHLGELHAILRRQEDFYPFLKDNREKIEKILTFRIPYYVGPLARGNSRFAWMTRKSEETITPWNFEEVVDKGASAQSFIERMTNFDKNLPNEKVLPKHSLLYEYFTVYNELTKVKYVTEGMRKPAFLSGEQKKAIVDLLFKTNRKVTVKQLKEDYFKKIECFDSVEISGVEDRFNASLGTYHDLLKIIKDKDFLDNEENEDILEDIVLTLTLFEDREMIEERLKTYAHLFDDKVMKQLKRRRYTGWGRLSRKLINGIRDKQSGKTILDFLKSDGFANRNFMQLIHDDSLTFKEDIQKAQVSGQGDSLHEHIANLAGSPAIKKGILQTVKVVDELVKVMGRHKPENIVIEMARENQTTQKGQKNSRERMKRIEEGIKELGSQILKEHPVENTQLQNEKLYLYYLQNGRDMYVDQELDINRLSDYDVDHIVPQSFLKDDSIDNKVLTRSDKARGKSDNVPSEEVVKKMKNYWRQLLNAKLITQRKFDNLTKAERGGLSELDKAGFIKRQLVETRQITKHVAQILDSRMNTKYDENDKLIREVKVITLKSKLVSDFRKDFQFYKVREINNYHHAHDAYLNAVVGTALIKKYPKLESEFVYGDYKVYDVRKMIAKSEQEIGKATAKYFFYSNIMNFFKTEITLANGEIRKRPLIETNGETGEIVWDKGRDFATVRKVLSMPQVNIVKKTEVQTGGFSKESILPKRNSDKLIARKKDWDPKKYGGFDSPTVAYSVLVVAKVEKGKSKKLKSVKELLGITIMERSSFEKNPIDFLEAKGYKEVKKDLIIKLPKYSLFELENGRKRMLASAGELQKGNELALPSKYVNFLYLASHYEKLKGSPEDNEQKQLFVEQHKHYLDEIIEQISEFSKRVILADANLDKVLSAYNKHRDKPIREQAENIIHLFTLTNLGAPAAFKYFDTTIDRKRYTSTKEVLDATLIHQSITGLYETRIDLSQLGGDGGPAPAPAPAPGGTLNIEDEHRLHETSKEPDVSLGSTWLSDFPQAWAETGGMGLAVRQAPLIIPLKATSTPVSIKQYPMSQEARLGIKPHIQRLLDQGILVPCQSPWNTPLLPVKKPGTNDYRPVQDLREVNKRVEDIHPTVPNPYNLLSGLPPSHQWYTVLDLKDAFFCLRLHPTSQPLFAFEWRDPEMGISGQLTWTRLPQGFKNSPTLFNEALHRDLADFRIQHPDLILLQYVDDLLLAATSELDCQQGTRALLQTLGNLGYRASAKKAQICQKQVKYLGYLLKEGQRWLTEARKETVMGQPTPKTPRQLREFLGTAGFCRLWIPGFAEMAAPLYPLTKPGTLFNWGPDQQKAYQEIKQALLTAPALGLPDLTKPFELFVDEKQGYAKGVLTQKLGPWRRPVAYLSKKLDPVAAGWPPCLRMVAAIAVLTKDAGKLTMGQPLVILAPHAVEALVKQPPDRWLSNARMTHYQALLLDTDRVQFGPVVALNPATLLPLPEEGLQHNCLDILAEAHGTRPDLTDQPLPDADHTWYTDGSSLLQEGQRKAGAAVTTETEVIWAKALPAGTSAQRAELIALTQALKMAEGKKLNVYTDSRYAFATAHIHGEIYRRRGWLTSEGKEIKNKDEILALLKALFLPKRLSIIHCPGHQKGHSAEARGNRMADQAARKAAITETPDTSTLLAGKRTADGSEFEKRTADGSEFESPKKKAKVE

SEQ ID NO: 2732 - protein, 2096 aa, synthetic construct
MPAAKRVKLDGGDKKYSIGLDIGTNSVGWAVITDEYKVPSKKFKVLGNTDRHSIKKNLIGALLFDSGETAEATRLKRTARRRYTRRKNRICYLQEIFSNEMAKVDDSFFHRLEESFLVEEDKKHERHPIFGNIVDEVAYHEKYPTIYHLRKKLVDSTDKADLRLIYLALAHMIKFRGHFLIEGDLNPDNSDVDKLFIQLVQTYNQLFEENPINASGVDAKAILSARLSKSRRLENLIAQLPGEKKNGLFGNLIALSLGLTPNFKSNFDLAEDAKLQLSKDTYDDDLDNLLAQIGDQYADLFLAAKNLSDAILLSDILRVNTEITKAPLSASMIKRYDEHHQDLTLLKALVRQQLPEKYKEIFFDQSKNGYAGYIDGGASQEEFYKFIKPILEKMDGTEELLVKLNREDLLRKQRTFDNGSIPHQIHLGELHAILRRQEDFYPFLKDNREKIEKILTFRIPYYVGPLARGNSRFAWMTRKSEETITPWNFEEVVDKGASAQSFIERMTNFDKNLPNEKVLPKHSLLYEYFTVYNELTKVKYVTEGMRKPAFLSGEQKKAIVDLLFKTNRKVTVKQLKEDYFKKIECFDSVEISGVEDRFNASLGTYHDLLKIIKDKDFLDNEENEDILEDIVLTLTLFEDREMIEERLKTYAHLFDDKVMKQLKRRRYTGWGRLSRKLINGIRDKQSGKTILDFLKSDGFANRNFMQLIHDDSLTFKEDIQKAQVSGQGDSLHEHIANLAGSPAIKKGILQTVKVVDELVKVMGRHKPENIVIEMARENQTTQKGQKNSRERMKRIEEGIKELGSQILKEHPVENTQLQNEKLYLYYLQNGRDMYVDQELDINRLSDYDVDHIVPQSFLKDDSIDNKVLTRSDKARGKSDNVPSEEVVKKMKNYWRQLLNAKLITQRKFDNLTKAERGGLSELDKAGFIKRQLVETRQITKHVAQILDSRMNTKYDENDKLIREVKVITLKSKLVSDFRKDFQFYKVREINNYHHAHDAYLNAVVGTALIKKYPKLESEFVYGDYKVYDVRKMIAKSEQEIGKATAKYFFYSNIMNFFKTEITLANGEIRKRPLIETNGETGEIVWDKGRDFATVRKVLSMPQVNIVKKTEVQTGGFSKESILPKRNSDKLIARKKDWDPKKYGGFDSPTVAYSVLVVAKVEKGKSKKLKSVKELLGITIMERSSFEKNPIDFLEAKGYKEVKKDLIIKLPKYSLFELENGRKRMLASAGELQKGNELALPSKYVNFLYLASHYEKLKGSPEDNEQKQLFVEQHKHYLDEIIEQISEFSKRVILADANLDKVLSAYNKHRDKPIREQAENIIHLFTLTNLGAPAAFKYFDTTIDRKRYTSTKEVLDATLIHQSITGLYETRIDLSQLGGDGGGSSEAAAKGGGGGTLNIEDEHRLHETSKEPDVSLGSTWLSDFPQAWAETGGMGLAVRQAPLIIPLKATSTPVSIKQYPMSQEARLGIKPHIQRLLDQGILVPCQSPWNTPLLPVKKPGTNDYRPVQDLREVNKRVEDIHPTVPNPYNLLSGLPPSHQWYTVLDLKDAFFCLRLHPTSQPLFAFEWRDPEMGISGQLTWTRLPQGFKNSPTLFNEALHRDLADFRIQHPDLILLQYVDDLLLAATSELDCQQGTRALLQTLGNLGYRASAKKAQICQKQVKYLGYLLKEGQRWLTEARKETVMGQPTPKTPRQLREFLGTAGFCRLWIPGFAEMAAPLYPLTKPGTLFNWGPDQQKAYQEIKQALLTAPALGLPDLTKPFELFVDEKQGYAKGVLTQKLGPWRRPVAYLSKKLDPVAAGWPPCLRMVAAIAVLTKDAGKLTMGQPLVILAPHAVEALVKQPPDRWLSNARMTHYQALLLDTDRVQFGPVVALNPATLLPLPEEGLQHNCLDILAEAHGTRPDLTDQPLPDADHTWYTDGSSLLQEGQRKAGAAVTTETEVIWAKALPAGTSAQRAELIALTQALKMAEGKKLNVYTDSRYAFATAHIHGEIYRRRGWLTSEGKEIKNKDEILALLKALFLPKRLSIIHCPGHQKGHSAEARGNRMADQAARKAAITETPDTSTLLAGKRTADGSEFEKRTADGSEFESPKKKAKVE

SEQ ID NO: 2733 - protein, 2091 aa, synthetic construct
MPAAKRVKLDGGDKKYSIGLDIGTNSVGWAVITDEYKVPSKKFKVLGNTDRHSIKKNLIGALLFDSGETAEATRLKRTARRRYTRRKNRICYLQEIFSNEMAKVDDSFFHRLEESFLVEEDKKHERHPIFGNIVDEVAYHEKYPTIYHLRKKLVDSTDKADLRLIYLALAHMIKFRGHFLIEGDLNPDNSDVDKLFIQLVQTYNQLFEENPINASGVDAKAILSARLSKSRRLENLIAQLPGEKKNGLFGNLIALSLGLTPNFKSNFDLAEDAKLQLSKDTYDDDLDNLLAQIGDQYADLFLAAKNLSDAILLSDILRVNTEITKAPLSASMIKRYDEHHQDLTLLKALVRQQLPEKYKEIFFDQSKNGYAGYIDGGASQEEFYKFIKPILEKMDGTEELLVKLNREDLLRKQRTFDNGSIPHQIHLGELHAILRRQEDFYPFLKDNREKIEKILTFRIPYYVGPLARGNSRFAWMTRKSEETITPWNFEEVVDKGASAQSFIERMTNFDKNLPNEKVLPKHSLLYEYFTVYNELTKVKYVTEGMRKPAFLSGEQKKAIVDLLFKTNRKVTVKQLKEDYFKKIECFDSVEISGVEDRFNASLGTYHDLLKIIKDKDFLDNEENEDILEDIVLTLTLFEDREMIEERLKTYAHLFDDKVMKQLKRRRYTGWGRLSRKLINGIRDKQSGKTILDFLKSDGFANRNFMQLIHDDSLTFKEDIQKAQVSGQGDSLHEHIANLAGSPAIKKGILQTVKVVDELVKVMGRHKPENIVIEMARENQTTQKGQKNSRERMKRIEEGIKELGSQILKEHPVENTQLQNEKLYLYYLQNGRDMYVDQELDINRLSDYDVDHIVPQSFLKDDSIDNKVLTRSDKARGKSDNVPSEEVVKKMKNYWRQLLNAKLITQRKFDNLTKAERGGLSELDKAGFIKRQLVETRQITKHVAQILDSRMNTKYDENDKLIREVKVITLKSKLVSDFRKDFQFYKVREINNYHHAHDAYLNAVVGTALIKKYPKLESEFVYGDYKVYDVRKMIAKSEQEIGKATAKYFFYSNIMNFFKTEITLANGEIRKRPLIETNGETGEIVWDKGRDFATVRKVLSMPQVNIVKKTEVQTGGFSKESILPKRNSDKLIARKKDWDPKKYGGFDSPTVAYSVLVVAKVEKGKSKKLKSVKELLGITIMERSSFEKNPIDFLEAKGYKEVKKDLIIKLPKYSLFELENGRKRMLASAGELQKGNELALPSKYVNFLYLASHYEKLKGSPEDNEQKQLFVEQHKHYLDEIIEQISEFSKRVILADANLDKVLSAYNKHRDKPIREQAENIIHLFTLTNLGAPAAFKYFDTTIDRKRYTSTKEVLDATLIHQSITGLYETRIDLSQLGGDGGPAPGGSGGTLNIEDEHRLHETSKEPDVSLGSTWLSDFPQAWAETGGMGLAVRQAPLIIPLKATSTPVSIKQYPMSQEARLGIKPHIQRLLDQGILVPCQSPWNTPLLPVKKPGTNDYRPVQDLREVNKRVEDIHPTVPNPYNLLSGLPPSHQWYTVLDLKDAFFCLRLHPTSQPLFAFEWRDPEMGISGQLTWTRLPQGFKNSPTLFNEALHRDLADFRIQHPDLILLQYVDDLLLAATSELDCQQGTRALLQTLGNLGYRASAKKAQICQKQVKYLGYLLKEGQRWLTEARKETVMGQPTPKTPRQLREFLGTAGFCRLWIPGFAEMAAPLYPLTKPGTLFNWGPDQQKAYQEIKQALLTAPALGLPDLTKPFELFVDEKQGYAKGVLTQKLGPWRRPVAYLSKKLDPVAAGWPPCLRMVAAIAVLTKDAGKLTMGQPLVILAPHAVEALVKQPPDRWLSNARMTHYQALLLDTDRVQFGPVVALNPATLLPLPEEGLQHNCLDILAEAHGTRPDLTDQPLPDADHTWYTDGSSLLQEGQRKAGAAVTTETEVIWAKALPAGTSAQRAELIALTQALKMAEGKKLNVYTDSRYAFATAHIHGEIYRRRGWLTSEGKEIKNKDEILALLKALFLPKRLSIIHCPGHQKGHSAEARGNRMADQAARKAAITETPDTSTLLAGKRTADGSEFEKRTADGSEFESPKKKAKVE

SEQ ID NO: 2734 - protein, 2118 aa, synthetic construct
MPAAKRVKLDGGDKKYSIGLDIGTNSVGWAVITDEYKVPSKKFKVLGNTDRHSIKKNLIGALLFDSGETAEATRLKRTARRRYTRRKNRICYLQEIFSNEMAKVDDSFFHRLEESFLVEEDKKHERHPIFGNIVDEVAYHEKYPTIYHLRKKLVDSTDKADLRLIYLALAHMIKFRGHFLIEGDLNPDNSDVDKLFIQLVQTYNQLFEENPINASGVDAKAILSARLSKSRRLENLIAQLPGEKKNGLFGNLIALSLGLTPNFKSNFDLAEDAKLQLSKDTYDDDLDNLLAQIGDQYADLFLAAKNLSDAILLSDILRVNTEITKAPLSASMIKRYDEHHQDLTLLKALVRQQLPEKYKEIFFDQSKNGYAGYIDGGASQEEFYKFIKPILEKMDGTEELLVKLNREDLLRKQRTFDNGSIPHQIHLGELHAILRRQEDFYPFLKDNREKIEKILTFRIPYYVGPLARGNSRFAWMTRKSEETITPWNFEEVVDKGASAQSFIERMTNFDKNLPNEKVLPKHSLLYEYFTVYNELTKVKYVTEGMRKPAFLSGEQKKAIVDLLFKTNRKVTVKQLKEDYFKKIECFDSVEISGVEDRFNASLGTYHDLLKIIKDKDFLDNEENEDILEDIVLTLTLFEDREMIEERLKTYAHLFDDKVMKQLKRRRYTGWGRLSRKLINGIRDKQSGKTILDFLKSDGFANRNFMQLIHDDSLTFKEDIQKAQVSGQGDSLHEHIANLAGSPAIKKGILQTVKVVDELVKVMGRHKPENIVIEMARENQTTQKGQKNSRERMKRIEEGIKELGSQILKEHPVENTQLQNEKLYLYYLQNGRDMYVDQELDINRLSDYDVDHIVPQSFLKDDSIDNKVLTRSDKARGKSDNVPSEEVVKKMKNYWRQLLNAKLITQRKFDNLTKAERGGLSELDKAGFIKRQLVETRQITKHVAQILDSRMNTKYDENDKLIREVKVITLKSKLVSDFRKDFQFYKVREINNYHHAHDAYLNAVVGTALIKKYPKLESEFVYGDYKVYDVRKMIAKSEQEIGKATAKYFFYSNIMNFFKTEITLANGEIRKRPLIETNGETGEIVWDKGRDFATVRKVLSMPQVNIVKKTEVQTGGFSKESILPKRNSDKLIARKKDWDPKKYGGFDSPTVAYSVLVVAKVEKGKSKKLKSVKELLGITIMERSSFEKNPIDFLEAKGYKEVKKDLIIKLPKYSLFELENGRKRMLASAGELQKGNELALPSKYVNFLYLASHYEKLKGSPEDNEQKQLFVEQHKHYLDEIIEQISEFSKRVILADANLDKVLSAYNKHRDKPIREQAENIIHLFTLTNLGAPAAFKYFDTTIDRKRYTSTKEVLDATLIHQSITGLYETRIDLSQLGGDGGSGGSSGGSSGSETPGTSESATPESSGGSSGGSSGGTLNIEDEHRLHETSKEPDVSLGSTWLSDFPQAWAETGGMGLAVRQAPLIIPLKATSTPVSIKQYPMSQEARLGIKPHIQRLLDQGILVPCQSPWNTPLLPVKKPGTNDYRPVQDLREVNKRVEDIHPTVPNPYNLLSGLPPSHQWYTVLDLKDAFFCLRLHPTSQPLFAFEWRDPEMGISGQLTWTRLPQGFKNSPTLFNEALHRDLADFRIQHPDLILLQYVDDLLLAATSELDCQQGTRALLQTLGNLGYRASAKKAQICQKQVKYLGYLLKEGQRWLTEARKETVMGQPTPKTPRQLREFLGTAGFCRLWIPGFAEMAAPLYPLTKPGTLFNWGPDQQKAYQEIKQALLTAPALGLPDLTKPFELFVDEKQGYAKGVLTQKLGPWRRPVAYLSKKLDPVAAGWPPCLRMVAAIAVLTKDAGKLTMGQPLVILAPHAVEALVKQPPDRWLSNARMTHYQALLLDTDRVQFGPVVALNPATLLPLPEEGLQHNCLDILAEAHGTRPDLTDQPLPDADHTWYTDGSSLLQEGQRKAGAAVTTETEVIWAKALPAGTSAQRAELIALTQALKMAEGKKLNVYTDSRYAFATAHIHGEIYRRRGWLTSEGKEIKNKDEILALLKALFLPKRLSIIHCPGHQKGHSAEARGNRMADQAARKAAITETPDTSTLLAGKRTADGSEFEKRTADGSEFESPKKKAKVE

SEQ ID NO: 2735 - protein, 2091 aa, synthetic construct
MPAAKRVKLDGGDKKYSIGLDIGTNSVGWAVITDEYKVPSKKFKVLGNTDRHSIKKNLIGALLFDSGETAEATRLKRTARRRYTRRKNRICYLQEIFSNEMAKVDDSFFHRLEESFLVEEDKKHERHPIFGNIVDEVAYHEKYPTIYHLRKKLVDSTDKADLRLIYLALAHMIKFRGHFLIEGDLNPDNSDVDKLFIQLVQTYNQLFEENPINASGVDAKAILSARLSKSRRLENLIAQLPGEKKNGLFGNLIALSLGLTPNFKSNFDLAEDAKLQLSKDTYDDDLDNLLAQIGDQYADLFLAAKNLSDAILLSDILRVNTEITKAPLSASMIKRYDEHHQDLTLLKALVRQQLPEKYKEIFFDQSKNGYAGYIDGGASQEEFYKFIKPILEKMDGTEELLVKLNREDLLRKQRTFDNGSIPHQIHLGELHAILRRQEDFYPFLKDNREKIEKILTFRIPYYVGPLARGNSRFAWMTRKSEETITPWNFEEVVDKGASAQSFIERMTNFDKNLPNEKVLPKHSLLYEYFTVYNELTKVKYVTEGMRKPAFLSGEQKKAIVDLLFKTNRKVTVKQLKEDYFKKIECFDSVEISGVEDRFNASLGTYHDLLKIIKDKDFLDNEENEDILEDIVLTLTLFEDREMIEERLKTYAHLFDDKVMKQLKRRRYTGWGRLSRKLINGIRDKQSGKTILDFLKSDGFANRNFMQLIHDDSLTFKEDIQKAQVSGQGDSLHEHIANLAGSPAIKKGILQTVKVVDELVKVMGRHKPENIVIEMARENQTTQKGQKNSRERMKRIEEGIKELGSQILKEHPVENTQLQNEKLYLYYLQNGRDMYVDQELDINRLSDYDVDHIVPQSFLKDDSIDNKVLTRSDKARGKSDNVPSEEVVKKMKNYWRQLLNAKLITQRKFDNLTKAERGGLSELDKAGFIKRQLVETRQITKHVAQILDSRMNTKYDENDKLIREVKVITLKSKLVSDFRKDFQFYKVREINNYHHAHDAYLNAVVGTALIKKYPKLESEFVYGDYKVYDVRKMIAKSEQEIGKATAKYFFYSNIMNFFKTEITLANGEIRKRPLIETNGETGEIVWDKGRDFATVRKVLSMPQVNIVKKTEVQTGGFSKESILPKRNSDKLIARKKDWDPKKYGGFDSPTVAYSVLVVAKVEKGKSKKLKSVKELLGITIMERSSFEKNPIDFLEAKGYKEVKKDLIIKLPKYSLFELENGRKRMLASAGELQKGNELALPSKYVNFLYLASHYEKLKGSPEDNEQKQLFVEQHKHYLDEIIEQISEFSKRVILADANLDKVLSAYNKHRDKPIREQAENIIHLFTLTNLGAPAAFKYFDTTIDRKRYTSTKEVLDATLIHQSITGLYETRIDLSQLGGDGGGGSPAPGGTLNIEDEHRLHETSKEPDVSLGSTWLSDFPQAWAETGGMGLAVRQAPLIIPLKATSTPVSIKQYPMSQEARLGIKPHIQRLLDQGILVPCQSPWNTPLLPVKKPGTNDYRPVQDLREVNKRVEDIHPTVPNPYNLLSGLPPSHQWYTVLDLKDAFFCLRLHPTSQPLFAFEWRDPEMGISGQLTWTRLPQGFKNSPTLFNEALHRDLADFRIQHPDLILLQYVDDLLLAATSELDCQQGTRALLQTLGNLGYRASAKKAQICQKQVKYLGYLLKEGQRWLTEARKETVMGQPTPKTPRQLREFLGTAGFCRLWIPGFAEMAAPLYPLTKPGTLFNWGPDQQKAYQEIKQALLTAPALGLPDLTKPFELFVDEKQGYAKGVLTQKLGPWRRPVAYLSKKLDPVAAGWPPCLRMVAAIAVLTKDAGKLTMGQPLVILAPHAVEALVKQPPDRWLSNARMTHYQALLLDTDRVQFGPVVALNPATLLPLPEEGLQHNCLDILAEAHGTRPDLTDQPLPDADHTWYTDGSSLLQEGQRKAGAAVTTETEVIWAKALPAGTSAQRAELIALTQALKMAEGKKLNVYTDSRYAFATAHIHGEIYRRRGWLTSEGKEIKNKDEILALLKALFLPKRLSIIHCPGHQKGHSAEARGNRMADQAARKAAITETPDTSTLLAGKRTADGSEFEKRTADGSEFESPKKKAKVE

SEQ ID NO: 2736 - protein, 2100 aa, synthetic construct
MPAAKRVKLDGGDKKYSIGLDIGTNSVGWAVITDEYKVPSKKFKVLGNTDRHSIKKNLIGALLFDSGETAEATRLKRTARRRYTRRKNRICYLQEIFSNEMAKVDDSFFHRLEESFLVEEDKKHERHPIFGNIVDEVAYHEKYPTIYHLRKKLVDSTDKADLRLIYLALAHMIKFRGHFLIEGDLNPDNSDVDKLFIQLVQTYNQLFEENPINASGVDAKAILSARLSKSRRLENLIAQLPGEKKNGLFGNLIALSLGLTPNFKSNFDLAEDAKLQLSKDTYDDDLDNLLAQIGDQYADLFLAAKNLSDAILLSDILRVNTEITKAPLSASMIKRYDEHHQDLTLLKALVRQQLPEKYKEIFFDQSKNGYAGYIDGGASQEEFYKFIKPILEKMDGTEELLVKLNREDLLRKQRTFDNGSIPHQIHLGELHAILRRQEDFYPFLKDNREKIEKILTFRIPYYVGPLARGNSRFAWMTRKSEETITPWNFEEVVDKGASAQSFIERMTNFDKNLPNEKVLPKHSLLYEYFTVYNELTKVKYVTEGMRKPAFLSGEQKKAIVDLLFKTNRKVTVKQLKEDYFKKIECFDSVEISGVEDRFNASLGTYHDLLKIIKDKDFLDNEENEDILEDIVLTLTLFEDREMIEERLKTYAHLFDDKVMKQLKRRRYTGWGRLSRKLINGIRDKQSGKTILDFLKSDGFANRNFMQLIHDDSLTFKEDIQKAQVSGQGDSLHEHIANLAGSPAIKKGILQTVKVVDELVKVMGRHKPENIVIEMARENQTTQKGQKNSRERMKRIEEGIKELGSQILKEHPVENTQLQNEKLYLYYLQNGRDMYVDQELDINRLSDYDVDHIVPQSFLKDDSIDNKVLTRSDKARGKSDNVPSEEVVKKMKNYWRQLLNAKLITQRKFDNLTKAERGGLSELDKAGFIKRQLVETRQITKHVAQILDSRMNTKYDENDKLIREVKVITLKSKLVSDFRKDFQFYKVREINNYHHAHDAYLNAVVGTALIKKYPKLESEFVYGDYKVYDVRKMIAKSEQEIGKATAKYFFYSNIMNFFKTEITLANGEIRKRPLIETNGETGEIVWDKGRDFATVRKVLSMPQVNIVKKTEVQTGGFSKESILPKRNSDKLIARKKDWDPKKYGGFDSPTVAYSVLVVAKVEKGKSKKLKSVKELLGITIMERSSFEKNPIDFLEAKGYKEVKKDLIIKLPKYSLFELENGRKRMLASAGELQKGNELALPSKYVNFLYLASHYEKLKGSPEDNEQKQLFVEQHKHYLDEIIEQISEFSKRVILADANLDKVLSAYNKHRDKPIREQAENIIHLFTLTNLGAPAAFKYFDTTIDRKRYTSTKEVLDATLIHQSITGLYETRIDLSQLGGDGGGGGGSGGGGSGGGGSGGTLNIEDEHRLHETSKEPDVSLGSTWLSDFPQAWAETGGMGLAVRQAPLIIPLKATSTPVSIKQYPMSQEARLGIKPHIQRLLDQGILVPCQSPWNTPLLPVKKPGTNDYRPVQDLREVNKRVEDIHPTVPNPYNLLSGLPPSHQWYTVLDLKDAFFCLRLHPTSQPLFAFEWRDPEMGISGQLTWTRLPQGFKNSPTLFNEALHRDLADFRIQHPDLILLQYVDDLLLAATSELDCQQGTRALLQTLGNLGYRASAKKAQICQKQVKYLGYLLKEGQRWLTEARKETVMGQPTPKTPRQLREFLGTAGFCRLWIPGFAEMAAPLYPLTKPGTLFNWGPDQQKAYQEIKQALLTAPALGLPDLTKPFELFVDEKQGYAKGVLTQKLGPWRRPVAYLSKKLDPVAAGWPPCLRMVAAIAVLTKDAGKLTMGQPLVILAPHAVEALVKQPPDRWLSNARMTHYQALLLDTDRVQFGPVVALNPATLLPLPEEGLQHNCLDILAEAHGTRPDLTDQPLPDADHTWYTDGSSLLQEGQRKAGAAVTTETEVIWAKALPAGTSAQRAELIALTQALKMAEGKKLNVYTDSRYAFATAHIHGEIYRRRGWLTSEGKEIKNKDEILALLKALFLPKRLSIIHCPGHQKGHSAEARGNRMADQAARKAAITETPDTSTLLAGKRTADGSEFEKRTADGSEFESPKKKAKVE

SEQ ID NO: 2737 - protein, 2093 aa, synthetic construct
MPAAKRVKLDGGDKKYSIGLDIGTNSVGWAVITDEYKVPSKKFKVLGNTDRHSIKKNLIGALLFDSGETAEATRLKRTARRRYTRRKNRICYLQEIFSNEMAKVDDSFFHRLEESFLVEEDKKHERHPIFGNIVDEVAYHEKYPTIYHLRKKLVDSTDKADLRLIYLALAHMIKFRGHFLIEGDLNPDNSDVDKLFIQLVQTYNQLFEENPINASGVDAKAILSARLSKSRRLENLIAQLPGEKKNGLFGNLIALSLGLTPNFKSNFDLAEDAKLQLSKDTYDDDLDNLLAQIGDQYADLFLAAKNLSDAILLSDILRVNTEITKAPLSASMIKRYDEHHQDLTLLKALVRQQLPEKYKEIFFDQSKNGYAGYIDGGASQEEFYKFIKPILEKMDGTEELLVKLNREDLLRKQRTFDNGSIPHQIHLGELHAILRRQEDFYPFLKDNREKIEKILTFRIPYYVGPLARGNSRFAWMTRKSEETITPWNFEEVVDKGASAQSFIERMTNFDKNLPNEKVLPKHSLLYEYFTVYNELTKVKYVTEGMRKPAFLSGEQKKAIVDLLFKTNRKVTVKQLKEDYFKKIECFDSVEISGVEDRFNASLGTYHDLLKIIKDKDFLDNEENEDILEDIVLTLTLFEDREMIEERLKTYAHLFDDKVMKQLKRRRYTGWGRLSRKLINGIRDKQSGKTILDFLKSDGFANRNFMQLIHDDSLTFKEDIQKAQVSGQGDSLHEHIANLAGSPAIKKGILQTVKVVDELVKVMGRHKPENIVIEMARENQTTQKGQKNSRERMKRIEEGIKELGSQILKEHPVENTQLQNEKLYLYYLQNGRDMYVDQELDINRLSDYDVDHIVPQSFLKDDSIDNKVLTRSDKARGKSDNVPSEEVVKKMKNYWRQLLNAKLITQRKFDNLTKAERGGLSELDKAGFIKRQLVETRQITKHVAQILDSRMNTKYDENDKLIREVKVITLKSKLVSDFRKDFQFYKVREINNYHHAHDAYLNAVVGTALIKKYPKLESEFVYGDYKVYDVRKMIAKSEQEIGKATAKYFFYSNIMNFFKTEITLANGEIRKRPLIETNGETGEIVWDKGRDFATVRKVLSMPQVNIVKKTEVQTGGFSKESILPKRNSDKLIARKKDWDPKKYGGFDSPTVAYSVLVVAKVEKGKSKKLKSVKELLGITIMERSSFEKNPIDFLEAKGYKEVKKDLIIKLPKYSLFELENGRKRMLASAGELQKGNELALPSKYVNFLYLASHYEKLKGSPEDNEQKQLFVEQHKHYLDEIIEQISEFSKRVILADANLDKVLSAYNKHRDKPIREQAENIIHLFTLTNLGAPAAFKYFDTTIDRKRYTSTKEVLDATLIHQSITGLYETRIDLSQLGGDGGEAAAKGSSGGTLNIEDEHRLHETSKEPDVSLGSTWLSDFPQAWAETGGMGLAVRQAPLIIPLKATSTPVSIKQYPMSQEARLGIKPHIQRLLDQGILVPCQSPWNTPLLPVKKPGTNDYRPVQDLREVNKRVEDIHPTVPNPYNLLSGLPPSHQWYTVLDLKDAFFCLRLHPTSQPLFAFEWRDPEMGISGQLTWTRLPQGFKNSPTLFNEALHRDLADFRIQHPDLILLQYVDDLLLAATSELDCQQGTRALLQTLGNLGYRASAKKAQICQKQVKYLGYLLKEGQRWLTEARKETVMGQPTPKTPRQLREFLGTAGFCRLWIPGFAEMAAPLYPLTKPGTLFNWGPDQQKAYQEIKQALLTAPALGLPDLTKPFELFVDEKQGYAKGVLTQKLGPWRRPVAYLSKKLDPVAAGWPPCLRMVAAIAVLTKDAGKLTMGQPLVILAPHAVEALVKQPPDRWLSNARMTHYQALLLDTDRVQFGPVVALNPATLLPLPEEGLQHNCLDILAEAHGTRPDLTDQPLPDADHTWYTDGSSLLQEGQRKAGAAVTTETEVIWAKALPAGTSAQRAELIALTQALKMAEGKKLNVYTDSRYAFATAHIHGEIYRRRGWLTSEGKEIKNKDEILALLKALFLPKRLSIIHCPGHQKGHSAEARGNRMADQAARKAAITETPDTSTLLAGKRTADGSEFEKRTADGSEFESPKKKAKVE

SEQ ID NO: 2738 - protein, 2094 aa, synthetic construct
MPAAKRVKLDGGDKKYSIGLDIGTNSVGWAVITDEYKVPSKKFKVLGNTDRHSIKKNLIGALLFDSGETAEATRLKRTARRRYTRRKNRICYLQEIFSNEMAKVDDSFFHRLEESFLVEEDKKHERHPIFGNIVDEVAYHEKYPTIYHLRKKLVDSTDKADLRLIYLALAHMIKFRGHFLIEGDLNPDNSDVDKLFIQLVQTYNQLFEENPINASGVDAKAILSARLSKSRRLENLIAQLPGEKKNGLFGNLIALSLGLTPNFKSNFDLAEDAKLQLSKDTYDDDLDNLLAQIGDQYADLFLAAKNLSDAILLSDILRVNTEITKAPLSASMIKRYDEHHQDLTLLKALVRQQLPEKYKEIFFDQSKNGYAGYIDGGASQEEFYKFIKPILEKMDGTEELLVKLNREDLLRKQRTFDNGSIPHQIHLGELHAILRRQEDFYPFLKDNREKIEKILTFRIPYYVGPLARGNSRFAWMTRKSEETITPWNFEEVVDKGASAQSFIERMTNFDKNLPNEKVLPKHSLLYEYFTVYNELTKVKYVTEGMRKPAFLSGEQKKAIVDLLFKTNRKVTVKQLKEDYFKKIECFDSVEISGVEDRFNASLGTYHDLLKIIKDKDFLDNEENEDILEDIVLTLTLFEDREMIEERLKTYAHLFDDKVMKQLKRRRYTGWGRLSRKLINGIRDKQSGKTILDFLKSDGFANRNFMQLIHDDSLTFKEDIQKAQVSGQGDSLHEHIANLAGSPAIKKGILQTVKVVDELVKVMGRHKPENIVIEMARENQTTQKGQKNSRERMKRIEEGIKELGSQILKEHPVENTQLQNEKLYLYYLQNGRDMYVDQELDINRLSDYDVDHIVPQSFLKDDSIDNKVLTRSDKARGKSDNVPSEEVVKKMKNYWRQLLNAKLITQRKFDNLTKAERGGLSELDKAGFIKRQLVETRQITKHVAQILDSRMNTKYDENDKLIREVKVITLKSKLVSDFRKDFQFYKVREINNYHHAHDAYLNAVVGTALIKKYPKLESEFVYGDYKVYDVRKMIAKSEQEIGKATAKYFFYSNIMNFFKTEITLANGEIRKRPLIETNGETGEIVWDKGRDFATVRKVLSMPQVNIVKKTEVQTGGFSKESILPKRNSDKLIARKKDWDPKKYGGFDSPTVAYSVLVVAKVEKGKSKKLKSVKELLGITIMERSSFEKNPIDFLEAKGYKEVKKDLIIKLPKYSLFELENGRKRMLASAGELQKGNELALPSKYVNFLYLASHYEKLKGSPEDNEQKQLFVEQHKHYLDEIIEQISEFSKRVILADANLDKVLSAYNKHRDKPIREQAENIIHLFTLTNLGAPAAFKYFDTTIDRKRYTSTKEVLDATLIHQSITGLYETRIDLSQLGGDGGPAPGGGGGSGGTLNIEDEHRLHETSKEPDVSLGSTWLSDFPQAWAETGGMGLAVRQAPLIIPLKATSTPVSIKQYPMSQEARLGIKPHIQRLLDQGILVPCQSPWNTPLLPVKKPGTNDYRPVQDLREVNKRVEDIHPTVPNPYNLLSGLPPSHQWYTVLDLKDAFFCLRLHPTSQPLFAFEWRDPEMGISGQLTWTRLPQGFKNSPTLFNEALHRDLADFRIQHPDLILLQYVDDLLLAATSELDCQQGTRALLQTLGNLGYRASAKKAQICQKQVKYLGYLLKEGQRWLTEARKETVMGQPTPKTPRQLREFLGTAGFCRLWIPGFAEMAAPLYPLTKPGTLFNWGPDQQKAYQEIKQALLTAPALGLPDLTKPFELFVDEKQGYAKGVLTQKLGPWRRPVAYLSKKLDPVAAGWPPCLRMVAAIAVLTKDAGKLTMGQPLVILAPHAVEALVKQPPDRWLSNARMTHYQALLLDTDRVQFGPVVALNPATLLPLPEEGLQHNCLDILAEAHGTRPDLTDQPLPDADHTWYTDGSSLLQEGQRKAGAAVTTETEVIWAKALPAGTSAQRAELIALTQALKMAEGKKLNVYTDSRYAFATAHIHGEIYRRRGWLTSEGKEIKNKDEILALLKALFLPKRLSIIHCPGHQKGHSAEARGNRMADQAARKAAITETPDTSTLLAGKRTADGSEFEKRTADGSEFESPKKKAKVE

SEQ ID NO: 2739 - protein, 2093 aa, synthetic construct
MPAAKRVKLDGGDKKYSIGLDIGTNSVGWAVITDEYKVPSKKFKVLGNTDRHSIKKNLIGALLFDSGETAEATRLKRTARRRYTRRKNRICYLQEIFSNEMAKVDDSFFHRLEESFLVEEDKKHERHPIFGNIVDEVAYHEKYPTIYHLRKKLVDSTDKADLRLIYLALAHMIKFRGHFLIEGDLNPDNSDVDKLFIQLVQTYNQLFEENPINASGVDAKAILSARLSKSRRLENLIAQLPGEKKNGLFGNLIALSLGLTPNFKSNFDLAEDAKLQLSKDTYDDDLDNLLAQIGDQYADLFLAAKNLSDAILLSDILRVNTEITKAPLSASMIKRYDEHHQDLTLLKALVRQQLPEKYKEIFFDQSKNGYAGYIDGGASQEEFYKFIKPILEKMDGTEELLVKLNREDLLRKQRTFDNGSIPHQIHLGELHAILRRQEDFYPFLKDNREKIEKILTFRIPYYVGPLARGNSRFAWMTRKSEETITPWNFEEVVDKGASAQSFIERMTNFDKNLPNEKVLPKHSLLYEYFTVYNELTKVKYVTEGMRKPAFLSGEQKKAIVDLLFKTNRKVTVKQLKEDYFKKIECFDSVEISGVEDRFNASLGTYHDLLKIIKDKDFLDNEENEDILEDIVLTLTLFEDREMIEERLKTYAHLFDDKVMKQLKRRRYTGWGRLSRKLINGIRDKQSGKTILDFLKSDGFANRNFMQLIHDDSLTFKEDIQKAQVSGQGDSLHEHIANLAGSPAIKKGILQTVKVVDELVKVMGRHKPENIVIEMARENQTTQKGQKNSRERMKRIEEGIKELGSQILKEHPVENTQLQNEKLYLYYLQNGRDMYVDQELDINRLSDYDVDHIVPQSFLKDDSIDNKVLTRSDKARGKSDNVPSEEVVKKMKNYWRQLLNAKLITQRKFDNLTKAERGGLSELDKAGFIKRQLVETRQITKHVAQILDSRMNTKYDENDKLIREVKVITLKSKLVSDFRKDFQFYKVREINNYHHAHDAYLNAVVGTALIKKYPKLESEFVYGDYKVYDVRKMIAKSEQEIGKATAKYFFYSNIMNFFKTEITLANGEIRKRPLIETNGETGEIVWDKGRDFATVRKVLSMPQVNIVKKTEVQTGGFSKESILPKRNSDKLIARKKDWDPKKYGGFDSPTVAYSVLVVAKVEKGKSKKLKSVKELLGITIMERSSFEKNPIDFLEAKGYKEVKKDLIIKLPKYSLFELENGRKRMLASAGELQKGNELALPSKYVNFLYLASHYEKLKGSPEDNEQKQLFVEQHKHYLDEIIEQISEFSKRVILADANLDKVLSAYNKHRDKPIREQAENIIHLFTLTNLGAPAAFKYFDTTIDRKRYTSTKEVLDATLIHQSITGLYETRIDLSQLGGDGGGGGGGGGGGGTLNIEDEHRLHETSKEPDVSLGSTWLSDFPQAWAETGGMGLAVRQAPLIIPLKATSTPVSIKQYPMSQEARLGIKPHIQRLLDQGILVPCQSPWNTPLLPVKKPGTNDYRPVQDLREVNKRVEDIHPTVPNPYNLLSGLPPSHQWYTVLDLKDAFFCLRLHPTSQPLFAFEWRDPEMGISGQLTWTRLPQGFKNSPTLFNEALHRDLADFRIQHPDLILLQYVDDLLLAATSELDCQQGTRALLQTLGNLGYRASAKKAQICQKQVKYLGYLLKEGQRWLTEARKETVMGQPTPKTPRQLREFLGTAGFCRLWIPGFAEMAAPLYPLTKPGTLFNWGPDQQKAYQEIKQALLTAPALGLPDLTKPFELFVDEKQGYAKGVLTQKLGPWRRPVAYLSKKLDPVAAGWPPCLRMVAAIAVLTKDAGKLTMGQPLVILAPHAVEALVKQPPDRWLSNARMTHYQALLLDTDRVQFGPVVALNPATLLPLPEEGLQHNCLDILAEAHGTRPDLTDQPLPDADHTWYTDGSSLLQEGQRKAGAAVTTETEVIWAKALPAGTSAQRAELIALTQALKMAEGKKLNVYTDSRYAFATAHIHGEIYRRRGWLTSEGKEIKNKDEILALLKALFLPKRLSIIHCPGHQKGHSAEARGNRMADQAARKAAITETPDTSTLLAGKRTADGSEFEKRTADGSEFESPKKKAKVE

SEQ ID NO: 2740 - protein, 2093 aa, synthetic construct
MPAAKRVKLDGGDKKYSIGLDIGTNSVGWAVITDEYKVPSKKFKVLGNTDRHSIKKNLIGALLFDSGETAEATRLKRTARRRYTRRKNRICYLQEIFSNEMAKVDDSFFHRLEESFLVEEDKKHERHPIFGNIVDEVAYHEKYPTIYHLRKKLVDSTDKADLRLIYLALAHMIKFRGHFLIEGDLNPDNSDVDKLFIQLVQTYNQLFEENPINASGVDAKAILSARLSKSRRLENLIAQLPGEKKNGLFGNLIALSLGLTPNFKSNFDLAEDAKLQLSKDTYDDDLDNLLAQIGDQYADLFLAAKNLSDAILLSDILRVNTEITKAPLSASMIKRYDEHHQDLTLLKALVRQQLPEKYKEIFFDQSKNGYAGYIDGGASQEEFYKFIKPILEKMDGTEELLVKLNREDLLRKQRTFDNGSIPHQIHLGELHAILRRQEDFYPFLKDNREKIEKILTFRIPYYVGPLARGNSRFAWMTRKSEETITPWNFEEVVDKGASAQSFIERMTNFDKNLPNEKVLPKHSLLYEYFTVYNELTKVKYVTEGMRKPAFLSGEQKKAIVDLLFKTNRKVTVKQLKEDYFKKIECFDSVEISGVEDRFNASLGTYHDLLKIIKDKDFLDNEENEDILEDIVLTLTLFEDREMIEERLKTYAHLFDDKVMKQLKRRRYTGWGRLSRKLINGIRDKQSGKTILDFLKSDGFANRNFMQLIHDDSLTFKEDIQKAQVSGQGDSLHEHIANLAGSPAIKKGILQTVKVVDELVKVMGRHKPENIVIEMARENQTTQKGQKNSRERMKRIEEGIKELGSQILKEHPVENTQLQNEKLYLYYLQNGRDMYVDQELDINRLSDYDVDHIVPQSFLKDDSIDNKVLTRSDKARGKSDNVPSEEVVKKMKNYWRQLLNAKLITQRKFDNLTKAERGGLSELDKAGFIKRQLVETRQITKHVAQILDSRMNTKYDENDKLIREVKVITLKSKLVSDFRKDFQFYKVREINNYHHAHDAYLNAVVGTALIKKYPKLESEFVYGDYKVYDVRKMIAKSEQEIGKATAKYFFYSNIMNFFKTEITLANGEIRKRPLIETNGETGEIVWDKGRDFATVRKVLSMPQVNIVKKTEVQTGGFSKESILPKRNSDKLIARKKDWDPKKYGGFDSPTVAYSVLVVAKVEKGKSKKLKSVKELLGITIMERSSFEKNPIDFLEAKGYKEVKKDLIIKLPKYSLFELENGRKRMLASAGELQKGNELALPSKYVNFLYLASHYEKLKGSPEDNEQKQLFVEQHKHYLDEIIEQISEFSKRVILADANLDKVLSAYNKHRDKPIREQAENIIHLFTLTNLGAPAAFKYFDTTIDRKRYTSTKEVLDATLIHQSITGLYETRIDLSQLGGDGGPAPEAAAKGGTLNIEDEHRLHETSKEPDVSLGSTWLSDFPQAWAETGGMGLAVRQAPLIIPLKATSTPVSIKQYPMSQEARLGIKPHIQRLLDQGILVPCQSPWNTPLLPVKKPGTNDYRPVQDLREVNKRVEDIHPTVPNPYNLLSGLPPSHQWYTVLDLKDAFFCLRLHPTSQPLFAFEWRDPEMGISGQLTWTRLPQGFKNSPTLFNEALHRDLADFRIQHPDLILLQYVDDLLLAATSELDCQQGTRALLQTLGNLGYRASAKKAQICQKQVKYLGYLLKEGQRWLTEARKETVMGQPTPKTPRQLREFLGTAGFCRLWIPGFAEMAAPLYPLTKPGTLFNWGPDQQKAYQEIKQALLTAPALGLPDLTKPFELFVDEKQGYAKGVLTQKLGPWRRPVAYLSKKLDPVAAGWPPCLRMVAAIAVLTKDAGKLTMGQPLVILAPHAVEALVKQPPDRWLSNARMTHYQALLLDTDRVQFGPVVALNPATLLPLPEEGLQHNCLDILAEAHGTRPDLTDQPLPDADHTWYTDGSSLLQEGQRKAGAAVTTETEVIWAKALPAGTSAQRAELIALTQALKMAEGKKLNVYTDSRYAFATAHIHGEIYRRRGWLTSEGKEIKNKDEILALLKALFLPKRLSIIHCPGHQKGHSAEARGNRMADQAARKAAITETPDTSTLLAGKRTADGSEFEKRTADGSEFESPKKKAKVE

SEQ ID NO: 2741 - protein, 2115 aa, synthetic construct
MPAAKRVKLDGGDKKYSIGLDIGTNSVGWAVITDEYKVPSKKFKVLGNTDRHSIKKNLIGALLFDSGETAEATRLKRTARRRYTRRKNRICYLQEIFSNEMAKVDDSFFHRLEESFLVEEDKKHERHPIFGNIVDEVAYHEKYPTIYHLRKKLVDSTDKADLRLIYLALAHMIKFRGHFLIEGDLNPDNSDVDKLFIQLVQTYNQLFEENPINASGVDAKAILSARLSKSRRLENLIAQLPGEKKNGLFGNLIALSLGLTPNFKSNFDLAEDAKLQLSKDTYDDDLDNLLAQIGDQYADLFLAAKNLSDAILLSDILRVNTEITKAPLSASMIKRYDEHHQDLTLLKALVRQQLPEKYKEIFFDQSKNGYAGYIDGGASQEEFYKFIKPILEKMDGTEELLVKLNREDLLRKQRTFDNGSIPHQIHLGELHAILRRQEDFYPFLKDNREKIEKILTFRIPYYVGPLARGNSRFAWMTRKSEETITPWNFEEVVDKGASAQSFIERMTNFDKNLPNEKVLPKHSLLYEYFTVYNELTKVKYVTEGMRKPAFLSGEQKKAIVDLLFKTNRKVTVKQLKEDYFKKIECFDSVEISGVEDRFNASLGTYHDLLKIIKDKDFLDNEENEDILEDIVLTLTLFEDREMIEERLKTYAHLFDDKVMKQLKRRRYTGWGRLSRKLINGIRDKQSGKTILDFLKSDGFANRNFMQLIHDDSLTFKEDIQKAQVSGQGDSLHEHIANLAGSPAIKKGILQTVKVVDELVKVMGRHKPENIVIEMARENQTTQKGQKNSRERMKRIEEGIKELGSQILKEHPVENTQLQNEKLYLYYLQNGRDMYVDQELDINRLSDYDVDHIVPQSFLKDDSIDNKVLTRSDKARGKSDNVPSEEVVKKMKNYWRQLLNAKLITQRKFDNLTKAERGGLSELDKAGFIKRQLVETRQITKHVAQILDSRMNTKYDENDKLIREVKVITLKSKLVSDFRKDFQFYKVREINNYHHAHDAYLNAVVGTALIKKYPKLESEFVYGDYKVYDVRKMIAKSEQEIGKATAKYFFYSNIMNFFKTEITLANGEIRKRPLIETNGETGEIVWDKGRDFATVRKVLSMPQVNIVKKTEVQTGGFSKESILPKRNSDKLIARKKDWDPKKYGGFDSPTVAYSVLVVAKVEKGKSKKLKSVKELLGITIMERSSFEKNPIDFLEAKGYKEVKKDLIIKLPKYSLFELENGRKRMLASAGELQKGNELALPSKYVNFLYLASHYEKLKGSPEDNEQKQLFVEQHKHYLDEIIEQISEFSKRVILADANLDKVLSAYNKHRDKPIREQAENIIHLFTLTNLGAPAAFKYFDTTIDRKRYTSTKEVLDATLIHQSITGLYETRIDLSQLGGDGGGGGGSGGGGSGGGGSGGGGSGGGGSGGGGSGGTLNIEDEHRLHETSKEPDVSLGSTWLSDFPQAWAETGGMGLAVRQAPLIIPLKATSTPVSIKQYPMSQEARLGIKPHIQRLLDQGILVPCQSPWNTPLLPVKKPGTNDYRPVQDLREVNKRVEDIHPTVPNPYNLLSGLPPSHQWYTVLDLKDAFFCLRLHPTSQPLFAFEWRDPEMGISGQLTWTRLPQGFKNSPTLFNEALHRDLADFRIQHPDLILLQYVDDLLLAATSELDCQQGTRALLQTLGNLGYRASAKKAQICQKQVKYLGYLLKEGQRWLTEARKETVMGQPTPKTPRQLREFLGTAGFCRLWIPGFAEMAAPLYPLTKPGTLFNWGPDQQKAYQEIKQALLTAPALGLPDLTKPFELFVDEKQGYAKGVLTQKLGPWRRPVAYLSKKLDPVAAGWPPCLRMVAAIAVLTKDAGKLTMGQPLVILAPHAVEALVKQPPDRWLSNARMTHYQALLLDTDRVQFGPVVALNPATLLPLPEEGLQHNCLDILAEAHGTRPDLTDQPLPDADHTWYTDGSSLLQEGQRKAGAAVTTETEVIWAKALPAGTSAQRAELIALTQALKMAEGKKLNVYTDSRYAFATAHIHGEIYRRRGWLTSEGKEIKNKDEILALLKALFLPKRLSIIHCPGHQKGHSAEARGNRMADQAARKAAITETPDTSTLLAGKRTADGSEFEKRTADGSEFESPKKKAKVE

SEQ ID NO: 2742 - protein, 2094 aa, synthetic construct
MPAAKRVKLDGGDKKYSIGLDIGTNSVGWAVITDEYKVPSKKFKVLGNTDRHSIKKNLIGALLFDSGETAEATRLKRTARRRYTRRKNRICYLQEIFSNEMAKVDDSFFHRLEESFLVEEDKKHERHPIFGNIVDEVAYHEKYPTIYHLRKKLVDSTDKADLRLIYLALAHMIKFRGHFLIEGDLNPDNSDVDKLFIQLVQTYNQLFEENPINASGVDAKAILSARLSKSRRLENLIAQLPGEKKNGLFGNLIALSLGLTPNFKSNFDLAEDAKLQLSKDTYDDDLDNLLAQIGDQYADLFLAAKNLSDAILLSDILRVNTEITKAPLSASMIKRYDEHHQDLTLLKALVRQQLPEKYKEIFFDQSKNGYAGYIDGGASQEEFYKFIKPILEKMDGTEELLVKLNREDLLRKQRTFDNGSIPHQIHLGELHAILRRQEDFYPFLKDNREKIEKILTFRIPYYVGPLARGNSRFAWMTRKSEETITPWNFEEVVDKGASAQSFIERMTNFDKNLPNEKVLPKHSLLYEYFTVYNELTKVKYVTEGMRKPAFLSGEQKKAIVDLLFKTNRKVTVKQLKEDYFKKIECFDSVEISGVEDRFNASLGTYHDLLKIIKDKDFLDNEENEDILEDIVLTLTLFEDREMIEERLKTYAHLFDDKVMKQLKRRRYTGWGRLSRKLINGIRDKQSGKTILDFLKSDGFANRNFMQLIHDDSLTFKEDIQKAQVSGQGDSLHEHIANLAGSPAIKKGILQTVKVVDELVKVMGRHKPENIVIEMARENQTTQKGQKNSRERMKRIEEGIKELGSQILKEHPVENTQLQNEKLYLYYLQNGRDMYVDQELDINRLSDYDVDHIVPQSFLKDDSIDNKVLTRSDKARGKSDNVPSEEVVKKMKNYWRQLLNAKLITQRKFDNLTKAERGGLSELDKAGFIKRQLVETRQITKHVAQILDSRMNTKYDENDKLIREVKVITLKSKLVSDFRKDFQFYKVREINNYHHAHDAYLNAVVGTALIKKYPKLESEFVYGDYKVYDVRKMIAKSEQEIGKATAKYFFYSNIMNFFKTEITLANGEIRKRPLIETNGETGEIVWDKGRDFATVRKVLSMPQVNIVKKTEVQTGGFSKESILPKRNSDKLIARKKDWDPKKYGGFDSPTVAYSVLVVAKVEKGKSKKLKSVKELLGITIMERSSFEKNPIDFLEAKGYKEVKKDLIIKLPKYSLFELENGRKRMLASAGELQKGNELALPSKYVNFLYLASHYEKLKGSPEDNEQKQLFVEQHKHYLDEIIEQISEFSKRVILADANLDKVLSAYNKHRDKPIREQAENIIHLFTLTNLGAPAAFKYFDTTIDRKRYTSTKEVLDATLIHQSITGLYETRIDLSQLGGDGGGGGPAPGGSGGTLNIEDEHRLHETSKEPDVSLGSTWLSDFPQAWAETGGMGLAVRQAPLIIPLKATSTPVSIKQYPMSQEARLGIKPHIQRLLDQGILVPCQSPWNTPLLPVKKPGTNDYRPVQDLREVNKRVEDIHPTVPNPYNLLSGLPPSHQWYTVLDLKDAFFCLRLHPTSQPLFAFEWRDPEMGISGQLTWTRLPQGFKNSPTLFNEALHRDLADFRIQHPDLILLQYVDDLLLAATSELDCQQGTRALLQTLGNLGYRASAKKAQICQKQVKYLGYLLKEGQRWLTEARKETVMGQPTPKTPRQLREFLGTAGFCRLWIPGFAEMAAPLYPLTKPGTLFNWGPDQQKAYQEIKQALLTAPALGLPDLTKPFELFVDEKQGYAKGVLTQKLGPWRRPVAYLSKKLDPVAAGWPPCLRMVAAIAVLTKDAGKLTMGQPLVILAPHAVEALVKQPPDRWLSNARMTHYQALLLDTDRVQFGPVVALNPATLLPLPEEGLQHNCLDILAEAHGTRPDLTDQPLPDADHTWYTDGSSLLQEGQRKAGAAVTTETEVIWAKALPAGTSAQRAELIALTQALKMAEGKKLNVYTDSRYAFATAHIHGEIYRRRGWLTSEGKEIKNKDEILALLKALFLPKRLSIIHCPGHQKGHSAEARGNRMADQAARKAAITETPDTSTLLAGKRTADGSEFEKRTADGSEFESPKKKAKVE

SEQ ID NO: 2743 - protein, 2091 aa, synthetic construct
MPAAKRVKLDGGDKKYSIGLDIGTNSVGWAVITDEYKVPSKKFKVLGNTDRHSIKKNLIGALLFDSGETAEATRLKRTARRRYTRRKNRICYLQEIFSNEMAKVDDSFFHRLEESFLVEEDKKHERHPIFGNIVDEVAYHEKYPTIYHLRKKLVDSTDKADLRLIYLALAHMIKFRGHFLIEGDLNPDNSDVDKLFIQLVQTYNQLFEENPINASGVDAKAILSARLSKSRRLENLIAQLPGEKKNGLFGNLIALSLGLTPNFKSNFDLAEDAKLQLSKDTYDDDLDNLLAQIGDQYADLFLAAKNLSDAILLSDILRVNTEITKAPLSASMIKRYDEHHQDLTLLKALVRQQLPEKYKEIFFDQSKNGYAGYIDGGASQEEFYKFIKPILEKMDGTEELLVKLNREDLLRKQRTFDNGSIPHQIHLGELHAILRRQEDFYPFLKDNREKIEKILTFRIPYYVGPLARGNSRFAWMTRKSEETITPWNFEEVVDKGASAQSFIERMTNFDKNLPNEKVLPKHSLLYEYFTVYNELTKVKYVTEGMRKPAFLSGEQKKAIVDLLFKTNRKVTVKQLKEDYFKKIECFDSVEISGVEDRFNASLGTYHDLLKIIKDKDFLDNEENEDILEDIVLTLTLFEDREMIEERLKTYAHLFDDKVMKQLKRRRYTGWGRLSRKLINGIRDKQSGKTILDFLKSDGFANRNFMQLIHDDSLTFKEDIQKAQVSGQGDSLHEHIANLAGSPAIKKGILQTVKVVDELVKVMGRHKPENIVIEMARENQTTQKGQKNSRERMKRIEEGIKELGSQILKEHPVENTQLQNEKLYLYYLQNGRDMYVDQELDINRLSDYDVDHIVPQSFLKDDSIDNKVLTRSDKARGKSDNVPSEEVVKKMKNYWRQLLNAKLITQRKFDNLTKAERGGLSELDKAGFIKRQLVETRQITKHVAQILDSRMNTKYDENDKLIREVKVITLKSKLVSDFRKDFQFYKVREINNYHHAHDAYLNAVVGTALIKKYPKLESEFVYGDYKVYDVRKMIAKSEQEIGKATAKYFFYSNIMNFFKTEITLANGEIRKRPLIETNGETGEIVWDKGRDFATVRKVLSMPQVNIVKKTEVQTGGFSKESILPKRNSDKLIARKKDWDPKKYGGFDSPTVAYSVLVVAKVEKGKSKKLKSVKELLGITIMERSSFEKNPIDFLEAKGYKEVKKDLIIKLPKYSLFELENGRKRMLASAGELQKGNELALPSKYVNFLYLASHYEKLKGSPEDNEQKQLFVEQHKHYLDEIIEQISEFSKRVILADANLDKVLSAYNKHRDKPIREQAENIIHLFTLTNLGAPAAFKYFDTTIDRKRYTSTKEVLDATLIHQSITGLYETRIDLSQLGGDGGPAPGGGGGTLNIEDEHRLHETSKEPDVSLGSTWLSDFPQAWAETGGMGLAVRQAPLIIPLKATSTPVSIKQYPMSQEARLGIKPHIQRLLDQGILVPCQSPWNTPLLPVKKPGTNDYRPVQDLREVNKRVEDIHPTVPNPYNLLSGLPPSHQWYTVLDLKDAFFCLRLHPTSQPLFAFEWRDPEMGISGQLTWTRLPQGFKNSPTLFNEALHRDLADFRIQHPDLILLQYVDDLLLAATSELDCQQGTRALLQTLGNLGYRASAKKAQICQKQVKYLGYLLKEGQRWLTEARKETVMGQPTPKTPRQLREFLGTAGFCRLWIPGFAEMAAPLYPLTKPGTLFNWGPDQQKAYQEIKQALLTAPALGLPDLTKPFELFVDEKQGYAKGVLTQKLGPWRRPVAYLSKKLDPVAAGWPPCLRMVAAIAVLTKDAGKLTMGQPLVILAPHAVEALVKQPPDRWLSNARMTHYQALLLDTDRVQFGPVVALNPATLLPLPEEGLQHNCLDILAEAHGTRPDLTDQPLPDADHTWYTDGSSLLQEGQRKAGAAVTTETEVIWAKALPAGTSAQRAELIALTQALKMAEGKKLNVYTDSRYAFATAHIHGEIYRRRGWLTSEGKEIKNKDEILALLKALFLPKRLSIIHCPGHQKGHSAEARGNRMADQAARKAAITETPDTSTLLAGKRTADGSEFEKRTADGSEFESPKKKAKVE

SEQ ID NO: 2744 - protein, 2096 aa, synthetic construct
MPAAKRVKLDGGDKKYSIGLDIGTNSVGWAVITDEYKVPSKKFKVLGNTDRHSIKKNLIGALLFDSGETAEATRLKRTARRRYTRRKNRICYLQEIFSNEMAKVDDSFFHRLEESFLVEEDKKHERHPIFGNIVDEVAYHEKYPTIYHLRKKLVDSTDKADLRLIYLALAHMIKFRGHFLIEGDLNPDNSDVDKLFIQLVQTYNQLFEENPINASGVDAKAILSARLSKSRRLENLIAQLPGEKKNGLFGNLIALSLGLTPNFKSNFDLAEDAKLQLSKDTYDDDLDNLLAQIGDQYADLFLAAKNLSDAILLSDILRVNTEITKAPLSASMIKRYDEHHQDLTLLKALVRQQLPEKYKEIFFDQSKNGYAGYIDGGASQEEFYKFIKPILEKMDGTEELLVKLNREDLLRKQRTFDNGSIPHQIHLGELHAILRRQEDFYPFLKDNREKIEKILTFRIPYYVGPLARGNSRFAWMTRKSEETITPWNFEEVVDKGASAQSFIERMTNFDKNLPNEKVLPKHSLLYEYFTVYNELTKVKYVTEGMRKPAFLSGEQKKAIVDLLFKTNRKVTVKQLKEDYFKKIECFDSVEISGVEDRFNASLGTYHDLLKIIKDKDFLDNEENEDILEDIVLTLTLFEDREMIEERLKTYAHLFDDKVMKQLKRRRYTGWGRLSRKLINGIRDKQSGKTILDFLKSDGFANRNFMQLIHDDSLTFKEDIQKAQVSGQGDSLHEHIANLAGSPAIKKGILQTVKVVDELVKVMGRHKPENIVIEMARENQTTQKGQKNSRERMKRIEEGIKELGSQILKEHPVENTQLQNEKLYLYYLQNGRDMYVDQELDINRLSDYDVDHIVPQSFLKDDSIDNKVLTRSDKARGKSDNVPSEEVVKKMKNYWRQLLNAKLITQRKFDNLTKAERGGLSELDKAGFIKRQLVETRQITKHVAQILDSRMNTKYDENDKLIREVKVITLKSKLVSDFRKDFQFYKVREINNYHHAHDAYLNAVVGTALIKKYPKLESEFVYGDYKVYDVRKMIAKSEQEIGKATAKYFFYSNIMNFFKTEITLANGEIRKRPLIETNGETGEIVWDKGRDFATVRKVLSMPQVNIVKKTEVQTGGFSKESILPKRNSDKLIARKKDWDPKKYGGFDSPTVAYSVLVVAKVEKGKSKKLKSVKELLGITIMERSSFEKNPIDFLEAKGYKEVKKDLIIKLPKYSLFELENGRKRMLASAGELQKGNELALPSKYVNFLYLASHYEKLKGSPEDNEQKQLFVEQHKHYLDEIIEQISEFSKRVILADANLDKVLSAYNKHRDKPIREQAENIIHLFTLTNLGAPAAFKYFDTTIDRKRYTSTKEVLDATLIHQSITGLYETRIDLSQLGGDGGGGSEAAAKPAPGGTLNIEDEHRLHETSKEPDVSLGSTWLSDFPQAWAETGGMGLAVRQAPLIIPLKATSTPVSIKQYPMSQEARLGIKPHIQRLLDQGILVPCQSPWNTPLLPVKKPGTNDYRPVQDLREVNKRVEDIHPTVPNPYNLLSGLPPSHQWYTVLDLKDAFFCLRLHPTSQPLFAFEWRDPEMGISGQLTWTRLPQGFKNSPTLFNEALHRDLADFRIQHPDLILLQYVDDLLLAATSELDCQQGTRALLQTLGNLGYRASAKKAQICQKQVKYLGYLLKEGQRWLTEARKETVMGQPTPKTPRQLREFLGTAGFCRLWIPGFAEMAAPLYPLTKPGTLFNWGPDQQKAYQEIKQALLTAPALGLPDLTKPFELFVDEKQGYAKGVLTQKLGPWRRPVAYLSKKLDPVAAGWPPCLRMVAAIAVLTKDAGKLTMGQPLVILAPHAVEALVKQPPDRWLSNARMTHYQALLLDTDRVQFGPVVALNPATLLPLPEEGLQHNCLDILAEAHGTRPDLTDQPLPDADHTWYTDGSSLLQEGQRKAGAAVTTETEVIWAKALPAGTSAQRAELIALTQALKMAEGKKLNVYTDSRYAFATAHIHGEIYRRRGWLTSEGKEIKNKDEILALLKALFLPKRLSIIHCPGHQKGHSAEARGNRMADQAARKAAITETPDTSTLLAGKRTADGSEFEKRTADGSEFESPKKKAKVE

SEQ ID NO: 2745 - protein, 2096 aa, synthetic construct
MPAAKRVKLDGGDKKYSIGLDIGTNSVGWAVITDEYKVPSKKFKVLGNTDRHSIKKNLIGALLFDSGETAEATRLKRTARRRYTRRKNRICYLQEIFSNEMAKVDDSFFHRLEESFLVEEDKKHERHPIFGNIVDEVAYHEKYPTIYHLRKKLVDSTDKADLRLIYLALAHMIKFRGHFLIEGDLNPDNSDVDKLFIQLVQTYNQLFEENPINASGVDAKAILSARLSKSRRLENLIAQLPGEKKNGLFGNLIALSLGLTPNFKSNFDLAEDAKLQLSKDTYDDDLDNLLAQIGDQYADLFLAAKNLSDAILLSDILRVNTEITKAPLSASMIKRYDEHHQDLTLLKALVRQQLPEKYKEIFFDQSKNGYAGYIDGGASQEEFYKFIKPILEKMDGTEELLVKLNREDLLRKQRTFDNGSIPHQIHLGELHAILRRQEDFYPFLKDNREKIEKILTFRIPYYVGPLARGNSRFAWMTRKSEETITPWNFEEVVDKGASAQSFIERMTNFDKNLPNEKVLPKHSLLYEYFTVYNELTKVKYVTEGMRKPAFLSGEQKKAIVDLLFKTNRKVTVKQLKEDYFKKIECFDSVEISGVEDRFNASLGTYHDLLKIIKDKDFLDNEENEDILEDIVLTLTLFEDREMIEERLKTYAHLFDDKVMKQLKRRRYTGWGRLSRKLINGIRDKQSGKTILDFLKSDGFANRNFMQLIHDDSLTFKEDIQKAQVSGQGDSLHEHIANLAGSPAIKKGILQTVKVVDELVKVMGRHKPENIVIEMARENQTTQKGQKNSRERMKRIEEGIKELGSQILKEHPVENTQLQNEKLYLYYLQNGRDMYVDQELDINRLSDYDVDHIVPQSFLKDDSIDNKVLTRSDKARGKSDNVPSEEVVKKMKNYWRQLLNAKLITQRKFDNLTKAERGGLSELDKAGFIKRQLVETRQITKHVAQILDSRMNTKYDENDKLIREVKVITLKSKLVSDFRKDFQFYKVREINNYHHAHDAYLNAVVGTALIKKYPKLESEFVYGDYKVYDVRKMIAKSEQEIGKATAKYFFYSNIMNFFKTEITLANGEIRKRPLIETNGETGEIVWDKGRDFATVRKVLSMPQVNIVKKTEVQTGGFSKESILPKRNSDKLIARKKDWDPKKYGGFDSPTVAYSVLVVAKVEKGKSKKLKSVKELLGITIMERSSFEKNPIDFLEAKGYKEVKKDLIIKLPKYSLFELENGRKRMLASAGELQKGNELALPSKYVNFLYLASHYEKLKGSPEDNEQKQLFVEQHKHYLDEIIEQISEFSKRVILADANLDKVLSAYNKHRDKPIREQAENIIHLFTLTNLGAPAAFKYFDTTIDRKRYTSTKEVLDATLIHQSITGLYETRIDLSQLGGDGGEAAAKGGGGGSGGTLNIEDEHRLHETSKEPDVSLGSTWLSDFPQAWAETGGMGLAVRQAPLIIPLKATSTPVSIKQYPMSQEARLGIKPHIQRLLDQGILVPCQSPWNTPLLPVKKPGTNDYRPVQDLREVNKRVEDIHPTVPNPYNLLSGLPPSHQWYTVLDLKDAFFCLRLHPTSQPLFAFEWRDPEMGISGQLTWTRLPQGFKNSPTLFNEALHRDLADFRIQHPDLILLQYVDDLLLAATSELDCQQGTRALLQTLGNLGYRASAKKAQICQKQVKYLGYLLKEGQRWLTEARKETVMGQPTPKTPRQLREFLGTAGFCRLWIPGFAEMAAPLYPLTKPGTLFNWGPDQQKAYQEIKQALLTAPALGLPDLTKPFELFVDEKQGYAKGVLTQKLGPWRRPVAYLSKKLDPVAAGWPPCLRMVAAIAVLTKDAGKLTMGQPLVILAPHAVEALVKQPPDRWLSNARMTHYQALLLDTDRVQFGPVVALNPATLLPLPEEGLQHNCLDILAEAHGTRPDLTDQPLPDADHTWYTDGSSLLQEGQRKAGAAVTTETEVIWAKALPAGTSAQRAELIALTQALKMAEGKKLNVYTDSRYAFATAHIHGEIYRRRGWLTSEGKEIKNKDEILALLKALFLPKRLSIIHCPGHQKGHSAEARGNRMADQAARKAAITETPDTSTLLAGKRTADGSEFEKRTADGSEFESPKKKAKVE

SEQ ID NO: 2746 - protein, 2093 aa, synthetic construct
MPAAKRVKLDGGDKKYSIGLDIGTNSVGWAVITDEYKVPSKKFKVLGNTDRHSIKKNLIGALLFDSGETAEATRLKRTARRRYTRRKNRICYLQEIFSNEMAKVDDSFFHRLEESFLVEEDKKHERHPIFGNIVDEVAYHEKYPTIYHLRKKLVDSTDKADLRLIYLALAHMIKFRGHFLIEGDLNPDNSDVDKLFIQLVQTYNQLFEENPINASGVDAKAILSARLSKSRRLENLIAQLPGEKKNGLFGNLIALSLGLTPNFKSNFDLAEDAKLQLSKDTYDDDLDNLLAQIGDQYADLFLAAKNLSDAILLSDILRVNTEITKAPLSASMIKRYDEHHQDLTLLKALVRQQLPEKYKEIFFDQSKNGYAGYIDGGASQEEFYKFIKPILEKMDGTEELLVKLNREDLLRKQRTFDNGSIPHQIHLGELHAILRRQEDFYPFLKDNREKIEKILTFRIPYYVGPLARGNSRFAWMTRKSEETITPWNFEEVVDKGASAQSFIERMTNFDKNLPNEKVLPKHSLLYEYFTVYNELTKVKYVTEGMRKPAFLSGEQKKAIVDLLFKTNRKVTVKQLKEDYFKKIECFDSVEISGVEDRFNASLGTYHDLLKIIKDKDFLDNEENEDILEDIVLTLTLFEDREMIEERLKTYAHLFDDKVMKQLKRRRYTGWGRLSRKLINGIRDKQSGKTILDFLKSDGFANRNFMQLIHDDSLTFKEDIQKAQVSGQGDSLHEHIANLAGSPAIKKGILQTVKVVDELVKVMGRHKPENIVIEMARENQTTQKGQKNSRERMKRIEEGIKELGSQILKEHPVENTQLQNEKLYLYYLQNGRDMYVDQELDINRLSDYDVDHIVPQSFLKDDSIDNKVLTRSDKARGKSDNVPSEEVVKKMKNYWRQLLNAKLITQRKFDNLTKAERGGLSELDKAGFIKRQLVETRQITKHVAQILDSRMNTKYDENDKLIREVKVITLKSKLVSDFRKDFQFYKVREINNYHHAHDAYLNAVVGTALIKKYPKLESEFVYGDYKVYDVRKMIAKSEQEIGKATAKYFFYSNIMNFFKTEITLANGEIRKRPLIETNGETGEIVWDKGRDFATVRKVLSMPQVNIVKKTEVQTGGFSKESILPKRNSDKLIARKKDWDPKKYGGFDSPTVAYSVLVVAKVEKGKSKKLKSVKELLGITIMERSSFEKNPIDFLEAKGYKEVKKDLIIKLPKYSLFELENGRKRMLASAGELQKGNELALPSKYVNFLYLASHYEKLKGSPEDNEQKQLFVEQHKHYLDEIIEQISEFSKRVILADANLDKVLSAYNKHRDKPIREQAENIIHLFTLTNLGAPAAFKYFDTTIDRKRYTSTKEVLDATLIHQSITGLYETRIDLSQLGGDGGGGGEAAAKGGTLNIEDEHRLHETSKEPDVSLGSTWLSDFPQAWAETGGMGLAVRQAPLIIPLKATSTPVSIKQYPMSQEARLGIKPHIQRLLDQGILVPCQSPWNTPLLPVKKPGTNDYRPVQDLREVNKRVEDIHPTVPNPYNLLSGLPPSHQWYTVLDLKDAFFCLRLHPTSQPLFAFEWRDPEMGISGQLTWTRLPQGFKNSPTLFNEALHRDLADFRIQHPDLILLQYVDDLLLAATSELDCQQGTRALLQTLGNLGYRASAKKAQICQKQVKYLGYLLKEGQRWLTEARKETVMGQPTPKTPRQLREFLGTAGFCRLWIPGFAEMAAPLYPLTKPGTLFNWGPDQQKAYQEIKQALLTAPALGLPDLTKPFELFVDEKQGYAKGVLTQKLGPWRRPVAYLSKKLDPVAAGWPPCLRMVAAIAVLTKDAGKLTMGQPLVILAPHAVEALVKQPPDRWLSNARMTHYQALLLDTDRVQFGPVVALNPATLLPLPEEGLQHNCLDILAEAHGTRPDLTDQPLPDADHTWYTDGSSLLQEGQRKAGAAVTTETEVIWAKALPAGTSAQRAELIALTQALKMAEGKKLNVYTDSRYAFATAHIHGEIYRRRGWLTSEGKEIKNKDEILALLKALFLPKRLSIIHCPGHQKGHSAEARGNRMADQAARKAAITETPDTSTLLAGKRTADGSEFEKRTADGSEFESPKKKAKVE

SEQ ID NO: 2747 - protein, 2096 aa, synthetic construct
MPAAKRVKLDGGDKKYSIGLDIGTNSVGWAVITDEYKVPSKKFKVLGNTDRHSIKKNLIGALLFDSGETAEATRLKRTARRRYTRRKNRICYLQEIFSNEMAKVDDSFFHRLEESFLVEEDKKHERHPIFGNIVDEVAYHEKYPTIYHLRKKLVDSTDKADLRLIYLALAHMIKFRGHFLIEGDLNPDNSDVDKLFIQLVQTYNQLFEENPINASGVDAKAILSARLSKSRRLENLIAQLPGEKKNGLFGNLIALSLGLTPNFKSNFDLAEDAKLQLSKDTYDDDLDNLLAQIGDQYADLFLAAKNLSDAILLSDILRVNTEITKAPLSASMIKRYDEHHQDLTLLKALVRQQLPEKYKEIFFDQSKNGYAGYIDGGASQEEFYKFIKPILEKMDGTEELLVKLNREDLLRKQRTFDNGSIPHQIHLGELHAILRRQEDFYPFLKDNREKIEKILTFRIPYYVGPLARGNSRFAWMTRKSEETITPWNFEEVVDKGASAQSFIERMTNFDKNLPNEKVLPKHSLLYEYFTVYNELTKVKYVTEGMRKPAFLSGEQKKAIVDLLFKTNRKVTVKQLKEDYFKKIECFDSVEISGVEDRFNASLGTYHDLLKIIKDKDFLDNEENEDILEDIVLTLTLFEDREMIEERLKTYAHLFDDKVMKQLKRRRYTGWGRLSRKLINGIRDKQSGKTILDFLKSDGFANRNFMQLIHDDSLTFKEDIQKAQVSGQGDSLHEHIANLAGSPAIKKGILQTVKVVDELVKVMGRHKPENIVIEMARENQTTQKGQKNSRERMKRIEEGIKELGSQILKEHPVENTQLQNEKLYLYYLQNGRDMYVDQELDINRLSDYDVDHIVPQSFLKDDSIDNKVLTRSDKARGKSDNVPSEEVVKKMKNYWRQLLNAKLITQRKFDNLTKAERGGLSELDKAGFIKRQLVETRQITKHVAQILDSRMNTKYDENDKLIREVKVITLKSKLVSDFRKDFQFYKVREINNYHHAHDAYLNAVVGTALIKKYPKLESEFVYGDYKVYDVRKMIAKSEQEIGKATAKYFFYSNIMNFFKTEITLANGEIRKRPLIETNGETGEIVWDKGRDFATVRKVLSMPQVNIVKKTEVQTGGFSKESILPKRNSDKLIARKKDWDPKKYGGFDSPTVAYSVLVVAKVEKGKSKKLKSVKELLGITIMERSSFEKNPIDFLEAKGYKEVKKDLIIKLPKYSLFELENGRKRMLASAGELQKGNELALPSKYVNFLYLASHYEKLKGSPEDNEQKQLFVEQHKHYLDEIIEQISEFSKRVILADANLDKVLSAYNKHRDKPIREQAENIIHLFTLTNLGAPAAFKYFDTTIDRKRYTSTKEVLDATLIHQSITGLYETRIDLSQLGGDGGGGSGSSEAAAKGGTLNIEDEHRLHETSKEPDVSLGSTWLSDFPQAWAETGGMGLAVRQAPLIIPLKATSTPVSIKQYPMSQEARLGIKPHIQRLLDQGILVPCQSPWNTPLLPVKKPGTNDYRPVQDLREVNKRVEDIHPTVPNPYNLLSGLPPSHQWYTVLDLKDAFFCLRLHPTSQPLFAFEWRDPEMGISGQLTWTRLPQGFKNSPTLFNEALHRDLADFRIQHPDLILLQYVDDLLLAATSELDCQQGTRALLQTLGNLGYRASAKKAQICQKQVKYLGYLLKEGQRWLTEARKETVMGQPTPKTPRQLREFLGTAGFCRLWIPGFAEMAAPLYPLTKPGTLFNWGPDQQKAYQEIKQALLTAPALGLPDLTKPFELFVDEKQGYAKGVLTQKLGPWRRPVAYLSKKLDPVAAGWPPCLRMVAAIAVLTKDAGKLTMGQPLVILAPHAVEALVKQPPDRWLSNARMTHYQALLLDTDRVQFGPVVALNPATLLPLPEEGLQHNCLDILAEAHGTRPDLTDQPLPDADHTWYTDGSSLLQEGQRKAGAAVTTETEVIWAKALPAGTSAQRAELIALTQALKMAEGKKLNVYTDSRYAFATAHIHGEIYRRRGWLTSEGKEIKNKDEILALLKALFLPKRLSIIHCPGHQKGHSAEARGNRMADQAARKAAITETPDTSTLLAGKRTADGSEFEKRTADGSEFESPKKKAKVE

SEQ ID NO: 2748 - protein, 2096 aa, synthetic construct
MPAAKRVKLDGGDKKYSIGLDIGTNSVGWAVITDEYKVPSKKFKVLGNTDRHSIKKNLIGALLFDSGETAEATRLKRTARRRYTRRKNRICYLQEIFSNEMAKVDDSFFHRLEESFLVEEDKKHERHPIFGNIVDEVAYHEKYPTIYHLRKKLVDSTDKADLRLIYLALAHMIKFRGHFLIEGDLNPDNSDVDKLFIQLVQTYNQLFEENPINASGVDAKAILSARLSKSRRLENLIAQLPGEKKNGLFGNLIALSLGLTPNFKSNFDLAEDAKLQLSKDTYDDDLDNLLAQIGDQYADLFLAAKNLSDAILLSDILRVNTEITKAPLSASMIKRYDEHHQDLTLLKALVRQQLPEKYKEIFFDQSKNGYAGYIDGGASQEEFYKFIKPILEKMDGTEELLVKLNREDLLRKQRTFDNGSIPHQIHLGELHAILRRQEDFYPFLKDNREKIEKILTFRIPYYVGPLARGNSRFAWMTRKSEETITPWNFEEVVDKGASAQSFIERMTNFDKNLPNEKVLPKHSLLYEYFTVYNELTKVKYVTEGMRKPAFLSGEQKKAIVDLLFKTNRKVTVKQLKEDYFKKIECFDSVEISGVEDRFNASLGTYHDLLKIIKDKDFLDNEENEDILEDIVLTLTLFEDREMIEERLKTYAHLFDDKVMKQLKRRRYTGWGRLSRKLINGIRDKQSGKTILDFLKSDGFANRNFMQLIHDDSLTFKEDIQKAQVSGQGDSLHEHIANLAGSPAIKKGILQTVKVVDELVKVMGRHKPENIVIEMARENQTTQKGQKNSRERMKRIEEGIKELGSQILKEHPVENTQLQNEKLYLYYLQNGRDMYVDQELDINRLSDYDVDHIVPQSFLKDDSIDNKVLTRSDKARGKSDNVPSEEVVKKMKNYWRQLLNAKLITQRKFDNLTKAERGGLSELDKAGFIKRQLVETRQITKHVAQILDSRMNTKYDENDKLIREVKVITLKSKLVSDFRKDFQFYKVREINNYHHAHDAYLNAVVGTALIKKYPKLESEFVYGDYKVYDVRKMIAKSEQEIGKATAKYFFYSNIMNFFKTEITLANGEIRKRPLIETNGETGEIVWDKGRDFATVRKVLSMPQVNIVKKTEVQTGGFSKESILPKRNSDKLIARKKDWDPKKYGGFDSPTVAYSVLVVAKVEKGKSKKLKSVKELLGITIMERSSFEKNPIDFLEAKGYKEVKKDLIIKLPKYSLFELENGRKRMLASAGELQKGNELALPSKYVNFLYLASHYEKLKGSPEDNEQKQLFVEQHKHYLDEIIEQISEFSKRVILADANLDKVLSAYNKHRDKPIREQAENIIHLFTLTNLGAPAAFKYFDTTIDRKRYTSTKEVLDATLIHQSITGLYETRIDLSQLGGDGGPAPGSSEAAAKGGTLNIEDEHRLHETSKEPDVSLGSTWLSDFPQAWAETGGMGLAVRQAPLIIPLKATSTPVSIKQYPMSQEARLGIKPHIQRLLDQGILVPCQSPWNTPLLPVKKPGTNDYRPVQDLREVNKRVEDIHPTVPNPYNLLSGLPPSHQWYTVLDLKDAFFCLRLHPTSQPLFAFEWRDPEMGISGQLTWTRLPQGFKNSPTLFNEALHRDLADFRIQHPDLILLQYVDDLLLAATSELDCQQGTRALLQTLGNLGYRASAKKAQICQKQVKYLGYLLKEGQRWLTEARKETVMGQPTPKTPRQLREFLGTAGFCRLWIPGFAEMAAPLYPLTKPGTLFNWGPDQQKAYQEIKQALLTAPALGLPDLTKPFELFVDEKQGYAKGVLTQKLGPWRRPVAYLSKKLDPVAAGWPPCLRMVAAIAVLTKDAGKLTMGQPLVILAPHAVEALVKQPPDRWLSNARMTHYQALLLDTDRVQFGPVVALNPATLLPLPEEGLQHNCLDILAEAHGTRPDLTDQPLPDADHTWYTDGSSLLQEGQRKAGAAVTTETEVIWAKALPAGTSAQRAELIALTQALKMAEGKKLNVYTDSRYAFATAHIHGEIYRRRGWLTSEGKEIKNKDEILALLKALFLPKRLSIIHCPGHQKGHSAEARGNRMADQAARKAAITETPDTSTLLAGKRTADGSEFEKRTADGSEFESPKKKAKVE

SEQ ID NO: 2749 - protein, 2095 aa, synthetic construct
MPAAKRVKLDGGDKKYSIGLDIGTNSVGWAVITDEYKVPSKKFKVLGNTDRHSIKKNLIGALLFDSGETAEATRLKRTARRRYTRRKNRICYLQEIFSNEMAKVDDSFFHRLEESFLVEEDKKHERHPIFGNIVDEVAYHEKYPTIYHLRKKLVDSTDKADLRLIYLALAHMIKFRGHFLIEGDLNPDNSDVDKLFIQLVQTYNQLFEENPINASGVDAKAILSARLSKSRRLENLIAQLPGEKKNGLFGNLIALSLGLTPNFKSNFDLAEDAKLQLSKDTYDDDLDNLLAQIGDQYADLFLAAKNLSDAILLSDILRVNTEITKAPLSASMIKRYDEHHQDLTLLKALVRQQLPEKYKEIFFDQSKNGYAGYIDGGASQEEFYKFIKPILEKMDGTEELLVKLNREDLLRKQRTFDNGSIPHQIHLGELHAILRRQEDFYPFLKDNREKIEKILTFRIPYYVGPLARGNSRFAWMTRKSEETITPWNFEEVVDKGASAQSFIERMTNFDKNLPNEKVLPKHSLLYEYFTVYNELTKVKYVTEGMRKPAFLSGEQKKAIVDLLFKTNRKVTVKQLKEDYFKKIECFDSVEISGVEDRFNASLGTYHDLLKIIKDKDFLDNEENEDILEDIVLTLTLFEDREMIEERLKTYAHLFDDKVMKQLKRRRYTGWGRLSRKLINGIRDKQSGKTILDFLKSDGFANRNFMQLIHDDSLTFKEDIQKAQVSGQGDSLHEHIANLAGSPAIKKGILQTVKVVDELVKVMGRHKPENIVIEMARENQTTQKGQKNSRERMKRIEEGIKELGSQILKEHPVENTQLQNEKLYLYYLQNGRDMYVDQELDINRLSDYDVDHIVPQSFLKDDSIDNKVLTRSDKARGKSDNVPSEEVVKKMKNYWRQLLNAKLITQRKFDNLTKAERGGLSELDKAGFIKRQLVETRQITKHVAQILDSRMNTKYDENDKLIREVKVITLKSKLVSDFRKDFQFYKVREINNYHHAHDAYLNAVVGTALIKKYPKLESEFVYGDYKVYDVRKMIAKSEQEIGKATAKYFFYSNIMNFFKTEITLANGEIRKRPLIETNGETGEIVWDKGRDFATVRKVLSMPQVNIVKKTEVQTGGFSKESILPKRNSDKLIARKKDWDPKKYGGFDSPTVAYSVLVVAKVEKGKSKKLKSVKELLGITIMERSSFEKNPIDFLEAKGYKEVKKDLIIKLPKYSLFELENGRKRMLASAGELQKGNELALPSKYVNFLYLASHYEKLKGSPEDNEQKQLFVEQHKHYLDEIIEQISEFSKRVILADANLDKVLSAYNKHRDKPIREQAENIIHLFTLTNLGAPAAFKYFDTTIDRKRYTSTKEVLDATLIHQSITGLYETRIDLSQLGGDGGGGGGSGGGGSGGTLNIEDEHRLHETSKEPDVSLGSTWLSDFPQAWAETGGMGLAVRQAPLIIPLKATSTPVSIKQYPMSQEARLGIKPHIQRLLDQGILVPCQSPWNTPLLPVKKPGTNDYRPVQDLREVNKRVEDIHPTVPNPYNLLSGLPPSHQWYTVLDLKDAFFCLRLHPTSQPLFAFEWRDPEMGISGQLTWTRLPQGFKNSPTLFNEALHRDLADFRIQHPDLILLQYVDDLLLAATSELDCQQGTRALLQTLGNLGYRASAKKAQICQKQVKYLGYLLKEGQRWLTEARKETVMGQPTPKTPRQLREFLGTAGFCRLWIPGFAEMAAPLYPLTKPGTLFNWGPDQQKAYQEIKQALLTAPALGLPDLTKPFELFVDEKQGYAKGVLTQKLGPWRRPVAYLSKKLDPVAAGWPPCLRMVAAIAVLTKDAGKLTMGQPLVILAPHAVEALVKQPPDRWLSNARMTHYQALLLDTDRVQFGPVVALNPATLLPLPEEGLQHNCLDILAEAHGTRPDLTDQPLPDADHTWYTDGSSLLQEGQRKAGAAVTTETEVIWAKALPAGTSAQRAELIALTQALKMAEGKKLNVYTDSRYAFATAHIHGEIYRRRGWLTSEGKEIKNKDEILALLKALFLPKRLSIIHCPGHQKGHSAEARGNRMADQAARKAAITETPDTSTLLAGKRTADGSEFEKRTADGSEFESPKKKAKVE

SEQ ID NO: 2750 - protein, 2091 aa, synthetic construct
MPAAKRVKLDGGDKKYSIGLDIGTNSVGWAVITDEYKVPSKKFKVLGNTDRHSIKKNLIGALLFDSGETAEATRLKRTARRRYTRRKNRICYLQEIFSNEMAKVDDSFFHRLEESFLVEEDKKHERHPIFGNIVDEVAYHEKYPTIYHLRKKLVDSTDKADLRLIYLALAHMIKFRGHFLIEGDLNPDNSDVDKLFIQLVQTYNQLFEENPINASGVDAKAILSARLSKSRRLENLIAQLPGEKKNGLFGNLIALSLGLTPNFKSNFDLAEDAKLQLSKDTYDDDLDNLLAQIGDQYADLFLAAKNLSDAILLSDILRVNTEITKAPLSASMIKRYDEHHQDLTLLKALVRQQLPEKYKEIFFDQSKNGYAGYIDGGASQEEFYKFIKPILEKMDGTEELLVKLNREDLLRKQRTFDNGSIPHQIHLGELHAILRRQEDFYPFLKDNREKIEKILTFRIPYYVGPLARGNSRFAWMTRKSEETITPWNFEEVVDKGASAQSFIERMTNFDKNLPNEKVLPKHSLLYEYFTVYNELTKVKYVTEGMRKPAFLSGEQKKAIVDLLFKTNRKVTVKQLKEDYFKKIECFDSVEISGVEDRFNASLGTYHDLLKIIKDKDFLDNEENEDILEDIVLTLTLFEDREMIEERLKTYAHLFDDKVMKQLKRRRYTGWGRLSRKLINGIRDKQSGKTILDFLKSDGFANRNFMQLIHDDSLTFKEDIQKAQVSGQGDSLHEHIANLAGSPAIKKGILQTVKVVDELVKVMGRHKPENIVIEMARENQTTQKGQKNSRERMKRIEEGIKELGSQILKEHPVENTQLQNEKLYLYYLQNGRDMYVDQELDINRLSDYDVDHIVPQSFLKDDSIDNKVLTRSDKARGKSDNVPSEEVVKKMKNYWRQLLNAKLITQRKFDNLTKAERGGLSELDKAGFIKRQLVETRQITKHVAQILDSRMNTKYDENDKLIREVKVITLKSKLVSDFRKDFQFYKVREINNYHHAHDAYLNAVVGTALIKKYPKLESEFVYGDYKVYDVRKMIAKSEQEIGKATAKYFFYSNIMNFFKTEITLANGEIRKRPLIETNGETGEIVWDKGRDFATVRKVLSMPQVNIVKKTEVQTGGFSKESILPKRNSDKLIARKKDWDPKKYGGFDSPTVAYSVLVVAKVEKGKSKKLKSVKELLGITIMERSSFEKNPIDFLEAKGYKEVKKDLIIKLPKYSLFELENGRKRMLASAGELQKGNELALPSKYVNFLYLASHYEKLKGSPEDNEQKQLFVEQHKHYLDEIIEQISEFSKRVILADANLDKVLSAYNKHRDKPIREQAENIIHLFTLTNLGAPAAFKYFDTTIDRKRYTSTKEVLDATLIHQSITGLYETRIDLSQLGGDGGGSSPAPGGTLNIEDEHRLHETSKEPDVSLGSTWLSDFPQAWAETGGMGLAVRQAPLIIPLKATSTPVSIKQYPMSQEARLGIKPHIQRLLDQGILVPCQSPWNTPLLPVKKPGTNDYRPVQDLREVNKRVEDIHPTVPNPYNLLSGLPPSHQWYTVLDLKDAFFCLRLHPTSQPLFAFEWRDPEMGISGQLTWTRLPQGFKNSPTLFNEALHRDLADFRIQHPDLILLQYVDDLLLAATSELDCQQGTRALLQTLGNLGYRASAKKAQICQKQVKYLGYLLKEGQRWLTEARKETVMGQPTPKTPRQLREFLGTAGFCRLWIPGFAEMAAPLYPLTKPGTLFNWGPDQQKAYQEIKQALLTAPALGLPDLTKPFELFVDEKQGYAKGVLTQKLGPWRRPVAYLSKKLDPVAAGWPPCLRMVAAIAVLTKDAGKLTMGQPLVILAPHAVEALVKQPPDRWLSNARMTHYQALLLDTDRVQFGPVVALNPATLLPLPEEGLQHNCLDILAEAHGTRPDLTDQPLPDADHTWYTDGSSLLQEGQRKAGAAVTTETEVIWAKALPAGTSAQRAELIALTQALKMAEGKKLNVYTDSRYAFATAHIHGEIYRRRGWLTSEGKEIKNKDEILALLKALFLPKRLSIIHCPGHQKGHSAEARGNRMADQAARKAAITETPDTSTLLAGKRTADGSEFEKRTADGSEFESPKKKAKVE

SEQ ID NO: 2751 - protein, 2096 aa, synthetic construct
MPAAKRVKLDGGDKKYSIGLDIGTNSVGWAVITDEYKVPSKKFKVLGNTDRHSIKKNLIGALLFDSGETAEATRLKRTARRRYTRRKNRICYLQEIFSNEMAKVDDSFFHRLEESFLVEEDKKHERHPIFGNIVDEVAYHEKYPTIYHLRKKLVDSTDKADLRLIYLALAHMIKFRGHFLIEGDLNPDNSDVDKLFIQLVQTYNQLFEENPINASGVDAKAILSARLSKSRRLENLIAQLPGEKKNGLFGNLIALSLGLTPNFKSNFDLAEDAKLQLSKDTYDDDLDNLLAQIGDQYADLFLAAKNLSDAILLSDILRVNTEITKAPLSASMIKRYDEHHQDLTLLKALVRQQLPEKYKEIFFDQSKNGYAGYIDGGASQEEFYKFIKPILEKMDGTEELLVKLNREDLLRKQRTFDNGSIPHQIHLGELHAILRRQEDFYPFLKDNREKIEKILTFRIPYYVGPLARGNSRFAWMTRKSEETITPWNFEEVVDKGASAQSFIERMTNFDKNLPNEKVLPKHSLLYEYFTVYNELTKVKYVTEGMRKPAFLSGEQKKAIVDLLFKTNRKVTVKQLKEDYFKKIECFDSVEISGVEDRFNASLGTYHDLLKIIKDKDFLDNEENEDILEDIVLTLTLFEDREMIEERLKTYAHLFDDKVMKQLKRRRYTGWGRLSRKLINGIRDKQSGKTILDFLKSDGFANRNFMQLIHDDSLTFKEDIQKAQVSGQGDSLHEHIANLAGSPAIKKGILQTVKVVDELVKVMGRHKPENIVIEMARENQTTQKGQKNSRERMKRIEEGIKELGSQILKEHPVENTQLQNEKLYLYYLQNGRDMYVDQELDINRLSDYDVDHIVPQSFLKDDSIDNKVLTRSDKARGKSDNVPSEEVVKKMKNYWRQLLNAKLITQRKFDNLTKAERGGLSELDKAGFIKRQLVETRQITKHVAQILDSRMNTKYDENDKLIREVKVITLKSKLVSDFRKDFQFYKVREINNYHHAHDAYLNAVVGTALIKKYPKLESEFVYGDYKVYDVRKMIAKSEQEIGKATAKYFFYSNIMNFFKTEITLANGEIRKRPLIETNGETGEIVWDKGRDFATVRKVLSMPQVNIVKKTEVQTGGFSKESILPKRNSDKLIARKKDWDPKKYGGFDSPTVAYSVLVVAKVEKGKSKKLKSVKELLGITIMERSSFEKNPIDFLEAKGYKEVKKDLIIKLPKYSLFELENGRKRMLASAGELQKGNELALPSKYVNFLYLASHYEKLKGSPEDNEQKQLFVEQHKHYLDEIIEQISEFSKRVILADANLDKVLSAYNKHRDKPIREQAENIIHLFTLTNLGAPAAFKYFDTTIDRKRYTSTKEVLDATLIHQSITGLYETRIDLSQLGGDGGGGSGGGEAAAKGGTLNIEDEHRLHETSKEPDVSLGSTWLSDFPQAWAETGGMGLAVRQAPLIIPLKATSTPVSIKQYPMSQEARLGIKPHIQRLLDQGILVPCQSPWNTPLLPVKKPGTNDYRPVQDLREVNKRVEDIHPTVPNPYNLLSGLPPSHQWYTVLDLKDAFFCLRLHPTSQPLFAFEWRDPEMGISGQLTWTRLPQGFKNSPTLFNEALHRDLADFRIQHPDLILLQYVDDLLLAATSELDCQQGTRALLQTLGNLGYRASAKKAQICQKQVKYLGYLLKEGQRWLTEARKETVMGQPTPKTPRQLREFLGTAGFCRLWIPGFAEMAAPLYPLTKPGTLFNWGPDQQKAYQEIKQALLTAPALGLPDLTKPFELFVDEKQGYAKGVLTQKLGPWRRPVAYLSKKLDPVAAGWPPCLRMVAAIAVLTKDAGKLTMGQPLVILAPHAVEALVKQPPDRWLSNARMTHYQALLLDTDRVQFGPVVALNPATLLPLPEEGLQHNCLDILAEAHGTRPDLTDQPLPDADHTWYTDGSSLLQEGQRKAGAAVTTETEVIWAKALPAGTSAQRAELIALTQALKMAEGKKLNVYTDSRYAFATAHIHGEIYRRRGWLTSEGKEIKNKDEILALLKALFLPKRLSIIHCPGHQKGHSAEARGNRMADQAARKAAITETPDTSTLLAGKRTADGSEFEKRTADGSEFESPKKKAKVE

SEQ ID NO: 2752 - protein, 2094 aa, synthetic construct
MPAAKRVKLDGGDKKYSIGLDIGTNSVGWAVITDEYKVPSKKFKVLGNTDRHSIKKNLIGALLFDSGETAEATRLKRTARRRYTRRKNRICYLQEIFSNEMAKVDDSFFHRLEESFLVEEDKKHERHPIFGNIVDEVAYHEKYPTIYHLRKKLVDSTDKADLRLIYLALAHMIKFRGHFLIEGDLNPDNSDVDKLFIQLVQTYNQLFEENPINASGVDAKAILSARLSKSRRLENLIAQLPGEKKNGLFGNLIALSLGLTPNFKSNFDLAEDAKLQLSKDTYDDDLDNLLAQIGDQYADLFLAAKNLSDAILLSDILRVNTEITKAPLSASMIKRYDEHHQDLTLLKALVRQQLPEKYKEIFFDQSKNGYAGYIDGGASQEEFYKFIKPILEKMDGTEELLVKLNREDLLRKQRTFDNGSIPHQIHLGELHAILRRQEDFYPFLKDNREKIEKILTFRIPYYVGPLARGNSRFAWMTRKSEETITPWNFEEVVDKGASAQSFIERMTNFDKNLPNEKVLPKHSLLYEYFTVYNELTKVKYVTEGMRKPAFLSGEQKKAIVDLLFKTNRKVTVKQLKEDYFKKIECFDSVEISGVEDRFNASLGTYHDLLKIIKDKDFLDNEENEDILEDIVLTLTLFEDREMIEERLKTYAHLFDDKVMKQLKRRRYTGWGRLSRKLINGIRDKQSGKTILDFLKSDGFANRNFMQLIHDDSLTFKEDIQKAQVSGQGDSLHEHIANLAGSPAIKKGILQTVKVVDELVKVMGRHKPENIVIEMARENQTTQKGQKNSRERMKRIEEGIKELGSQILKEHPVENTQLQNEKLYLYYLQNGRDMYVDQELDINRLSDYDVDHIVPQSFLKDDSIDNKVLTRSDKARGKSDNVPSEEVVKKMKNYWRQLLNAKLITQRKFDNLTKAERGGLSELDKAGFIKRQLVETRQITKHVAQILDSRMNTKYDENDKLIREVKVITLKSKLVSDFRKDFQFYKVREINNYHHAHDAYLNAVVGTALIKKYPKLESEFVYGDYKVYDVRKMIAKSEQEIGKATAKYFFYSNIMNFFKTEITLANGEIRKRPLIETNGETGEIVWDKGRDFATVRKVLSMPQVNIVKKTEVQTGGFSKESILPKRNSDKLIARKKDWDPKKYGGFDSPTVAYSVLVVAKVEKGKSKKLKSVKELLGITIMERSSFEKNPIDFLEAKGYKEVKKDLIIKLPKYSLFELENGRKRMLASAGELQKGNELALPSKYVNFLYLASHYEKLKGSPEDNEQKQLFVEQHKHYLDEIIEQISEFSKRVILADANLDKVLSAYNKHRDKPIREQAENIIHLFTLTNLGAPAAFKYFDTTIDRKRYTSTKEVLDATLIHQSITGLYETRIDLSQLGGDGGGGSPAPGSSGGTLNIEDEHRLHETSKEPDVSLGSTWLSDFPQAWAETGGMGLAVRQAPLIIPLKATSTPVSIKQYPMSQEARLGIKPHIQRLLDQGILVPCQSPWNTPLLPVKKPGTNDYRPVQDLREVNKRVEDIHPTVPNPYNLLSGLPPSHQWYTVLDLKDAFFCLRLHPTSQPLFAFEWRDPEMGISGQLTWTRLPQGFKNSPTLFNEALHRDLADFRIQHPDLILLQYVDDLLLAATSELDCQQGTRALLQTLGNLGYRASAKKAQICQKQVKYLGYLLKEGQRWLTEARKETVMGQPTPKTPRQLREFLGTAGFCRLWIPGFAEMAAPLYPLTKPGTLFNWGPDQQKAYQEIKQALLTAPALGLPDLTKPFELFVDEKQGYAKGVLTQKLGPWRRPVAYLSKKLDPVAAGWPPCLRMVAAIAVLTKDAGKLTMGQPLVILAPHAVEALVKQPPDRWLSNARMTHYQALLLDTDRVQFGPVVALNPATLLPLPEEGLQHNCLDILAEAHGTRPDLTDQPLPDADHTWYTDGSSLLQEGQRKAGAAVTTETEVIWAKALPAGTSAQRAELIALTQALKMAEGKKLNVYTDSRYAFATAHIHGEIYRRRGWLTSEGKEIKNKDEILALLKALFLPKRLSIIHCPGHQKGHSAEARGNRMADQAARKAAITETPDTSTLLAGKRTADGSEFEKRTADGSEFESPKKKAKVE

SEQ ID NO: 2753 - protein, 2096 aa, synthetic construct
MPAAKRVKLDGGDKKYSIGLDIGTNSVGWAVITDEYKVPSKKFKVLGNTDRHSIKKNLIGALLFDSGETAEATRLKRTARRRYTRRKNRICYLQEIFSNEMAKVDDSFFHRLEESFLVEEDKKHERHPIFGNIVDEVAYHEKYPTIYHLRKKLVDSTDKADLRLIYLALAHMIKFRGHFLIEGDLNPDNSDVDKLFIQLVQTYNQLFEENPINASGVDAKAILSARLSKSRRLENLIAQLPGEKKNGLFGNLIALSLGLTPNFKSNFDLAEDAKLQLSKDTYDDDLDNLLAQIGDQYADLFLAAKNLSDAILLSDILRVNTEITKAPLSASMIKRYDEHHQDLTLLKALVRQQLPEKYKEIFFDQSKNGYAGYIDGGASQEEFYKFIKPILEKMDGTEELLVKLNREDLLRKQRTFDNGSIPHQIHLGELHAILRRQEDFYPFLKDNREKIEKILTFRIPYYVGPLARGNSRFAWMTRKSEETITPWNFEEVVDKGASAQSFIERMTNFDKNLPNEKVLPKHSLLYEYFTVYNELTKVKYVTEGMRKPAFLSGEQKKAIVDLLFKTNRKVTVKQLKEDYFKKIECFDSVEISGVEDRFNASLGTYHDLLKIIKDKDFLDNEENEDILEDIVLTLTLFEDREMIEERLKTYAHLFDDKVMKQLKRRRYTGWGRLSRKLINGIRDKQSGKTILDFLKSDGFANRNFMQLIHDDSLTFKEDIQKAQVSGQGDSLHEHIANLAGSPAIKKGILQTVKVVDELVKVMGRHKPENIVIEMARENQTTQKGQKNSRERMKRIEEGIKELGSQILKEHPVENTQLQNEKLYLYYLQNGRDMYVDQELDINRLSDYDVDHIVPQSFLKDDSIDNKVLTRSDKARGKSDNVPSEEVVKKMKNYWRQLLNAKLITQRKFDNLTKAERGGLSELDKAGFIKRQLVETRQITKHVAQILDSRMNTKYDENDKLIREVKVITLKSKLVSDFRKDFQFYKVREINNYHHAHDAYLNAVVGTALIKKYPKLESEFVYGDYKVYDVRKMIAKSEQEIGKATAKYFFYSNIMNFFKTEITLANGEIRKRPLIETNGETGEIVWDKGRDFATVRKVLSMPQVNIVKKTEVQTGGFSKESILPKRNSDKLIARKKDWDPKKYGGFDSPTVAYSVLVVAKVEKGKSKKLKSVKELLGITIMERSSFEKNPIDFLEAKGYKEVKKDLIIKLPKYSLFELENGRKRMLASAGELQKGNELALPSKYVNFLYLASHYEKLKGSPEDNEQKQLFVEQHKHYLDEIIEQISEFSKRVILADANLDKVLSAYNKHRDKPIREQAENIIHLFTLTNLGAPAAFKYFDTTIDRKRYTSTKEVLDATLIHQSITGLYETRIDLSQLGGDGGPAPGGSEAAAKGGTLNIEDEHRLHETSKEPDVSLGSTWLSDFPQAWAETGGMGLAVRQAPLIIPLKATSTPVSIKQYPMSQEARLGIKPHIQRLLDQGILVPCQSPWNTPLLPVKKPGTNDYRPVQDLREVNKRVEDIHPTVPNPYNLLSGLPPSHQWYTVLDLKDAFFCLRLHPTSQPLFAFEWRDPEMGISGQLTWTRLPQGFKNSPTLFNEALHRDLADFRIQHPDLILLQYVDDLLLAATSELDCQQGTRALLQTLGNLGYRASAKKAQICQKQVKYLGYLLKEGQRWLTEARKETVMGQPTPKTPRQLREFLGTAGFCRLWIPGFAEMAAPLYPLTKPGTLFNWGPDQQKAYQEIKQALLTAPALGLPDLTKPFELFVDEKQGYAKGVLTQKLGPWRRPVAYLSKKLDPVAAGWPPCLRMVAAIAVLTKDAGKLTMGQPLVILAPHAVEALVKQPPDRWLSNARMTHYQALLLDTDRVQFGPVVALNPATLLPLPEEGLQHNCLDILAEAHGTRPDLTDQPLPDADHTWYTDGSSLLQEGQRKAGAAVTTETEVIWAKALPAGTSAQRAELIALTQALKMAEGKKLNVYTDSRYAFATAHIHGEIYRRRGWLTSEGKEIKNKDEILALLKALFLPKRLSIIHCPGHQKGHSAEARGNRMADQAARKAAITETPDTSTLLAGKRTADGSEFEKRTADGSEFESPKKKAKVE

SEQ ID NO: 2754 - protein, 2090 aa, synthetic construct
MPAAKRVKLDGGDKKYSIGLDIGTNSVGWAVITDEYKVPSKKFKVLGNTDRHSIKKNLIGALLFDSGETAEATRLKRTARRRYTRRKNRICYLQEIFSNEMAKVDDSFFHRLEESFLVEEDKKHERHPIFGNIVDEVAYHEKYPTIYHLRKKLVDSTDKADLRLIYLALAHMIKFRGHFLIEGDLNPDNSDVDKLFIQLVQTYNQLFEENPINASGVDAKAILSARLSKSRRLENLIAQLPGEKKNGLFGNLIALSLGLTPNFKSNFDLAEDAKLQLSKDTYDDDLDNLLAQIGDQYADLFLAAKNLSDAILLSDILRVNTEITKAPLSASMIKRYDEHHQDLTLLKALVRQQLPEKYKEIFFDQSKNGYAGYIDGGASQEEFYKFIKPILEKMDGTEELLVKLNREDLLRKQRTFDNGSIPHQIHLGELHAILRRQEDFYPFLKDNREKIEKILTFRIPYYVGPLARGNSRFAWMTRKSEETITPWNFEEVVDKGASAQSFIERMTNFDKNLPNEKVLPKHSLLYEYFTVYNELTKVKYVTEGMRKPAFLSGEQKKAIVDLLFKTNRKVTVKQLKEDYFKKIECFDSVEISGVEDRFNASLGTYHDLLKIIKDKDFLDNEENEDILEDIVLTLTLFEDREMIEERLKTYAHLFDDKVMKQLKRRRYTGWGRLSRKLINGIRDKQSGKTILDFLKSDGFANRNFMQLIHDDSLTFKEDIQKAQVSGQGDSLHEHIANLAGSPAIKKGILQTVKVVDELVKVMGRHKPENIVIEMARENQTTQKGQKNSRERMKRIEEGIKELGSQILKEHPVENTQLQNEKLYLYYLQNGRDMYVDQELDINRLSDYDVDHIVPQSFLKDDSIDNKVLTRSDKARGKSDNVPSEEVVKKMKNYWRQLLNAKLITQRKFDNLTKAERGGLSELDKAGFIKRQLVETRQITKHVAQILDSRMNTKYDENDKLIREVKVITLKSKLVSDFRKDFQFYKVREINNYHHAHDAYLNAVVGTALIKKYPKLESEFVYGDYKVYDVRKMIAKSEQEIGKATAKYFFYSNIMNFFKTEITLANGEIRKRPLIETNGETGEIVWDKGRDFATVRKVLSMPQVNIVKKTEVQTGGFSKESILPKRNSDKLIARKKDWDPKKYGGFDSPTVAYSVLVVAKVEKGKSKKLKSVKELLGITIMERSSFEKNPIDFLEAKGYKEVKKDLIIKLPKYSLFELENGRKRMLASAGELQKGNELALPSKYVNFLYLASHYEKLKGSPEDNEQKQLFVEQHKHYLDEIIEQISEFSKRVILADANLDKVLSAYNKHRDKPIREQAENIIHLFTLTNLGAPAAFKYFDTTIDRKRYTSTKEVLDATLIHQSITGLYETRIDLSQLGGDGGGGGGSGGTLNIEDEHRLHETSKEPDVSLGSTWLSDFPQAWAETGGMGLAVRQAPLIIPLKATSTPVSIKQYPMSQEARLGIKPHIQRLLDQGILVPCQSPWNTPLLPVKKPGTNDYRPVQDLREVNKRVEDIHPTVPNPYNLLSGLPPSHQWYTVLDLKDAFFCLRLHPTSQPLFAFEWRDPEMGISGQLTWTRLPQGFKNSPTLFNEALHRDLADFRIQHPDLILLQYVDDLLLAATSELDCQQGTRALLQTLGNLGYRASAKKAQICQKQVKYLGYLLKEGQRWLTEARKETVMGQPTPKTPRQLREFLGTAGFCRLWIPGFAEMAAPLYPLTKPGTLFNWGPDQQKAYQEIKQALLTAPALGLPDLTKPFELFVDEKQGYAKGVLTQKLGPWRRPVAYLSKKLDPVAAGWPPCLRMVAAIAVLTKDAGKLTMGQPLVILAPHAVEALVKQPPDRWLSNARMTHYQALLLDTDRVQFGPVVALNPATLLPLPEEGLQHNCLDILAEAHGTRPDLTDQPLPDADHTWYTDGSSLLQEGQRKAGAAVTTETEVIWAKALPAGTSAQRAELIALTQALKMAEGKKLNVYTDSRYAFATAHIHGEIYRRRGWLTSEGKEIKNKDEILALLKALFLPKRLSIIHCPGHQKGHSAEARGNRMADQAARKAAITETPDTSTLLAGKRTADGSEFEKRTADGSEFESPKKKAKVE

SEQ ID NO: 2755 - protein, 2096 aa, synthetic construct
MPAAKRVKLDGGDKKYSIGLDIGTNSVGWAVITDEYKVPSKKFKVLGNTDRHSIKKNLIGALLFDSGETAEATRLKRTARRRYTRRKNRICYLQEIFSNEMAKVDDSFFHRLEESFLVEEDKKHERHPIFGNIVDEVAYHEKYPTIYHLRKKLVDSTDKADLRLIYLALAHMIKFRGHFLIEGDLNPDNSDVDKLFIQLVQTYNQLFEENPINASGVDAKAILSARLSKSRRLENLIAQLPGEKKNGLFGNLIALSLGLTPNFKSNFDLAEDAKLQLSKDTYDDDLDNLLAQIGDQYADLFLAAKNLSDAILLSDILRVNTEITKAPLSASMIKRYDEHHQDLTLLKALVRQQLPEKYKEIFFDQSKNGYAGYIDGGASQEEFYKFIKPILEKMDGTEELLVKLNREDLLRKQRTFDNGSIPHQIHLGELHAILRRQEDFYPFLKDNREKIEKILTFRIPYYVGPLARGNSRFAWMTRKSEETITPWNFEEVVDKGASAQSFIERMTNFDKNLPNEKVLPKHSLLYEYFTVYNELTKVKYVTEGMRKPAFLSGEQKKAIVDLLFKTNRKVTVKQLKEDYFKKIECFDSVEISGVEDRFNASLGTYHDLLKIIKDKDFLDNEENEDILEDIVLTLTLFEDREMIEERLKTYAHLFDDKVMKQLKRRRYTGWGRLSRKLINGIRDKQSGKTILDFLKSDGFANRNFMQLIHDDSLTFKEDIQKAQVSGQGDSLHEHIANLAGSPAIKKGILQTVKVVDELVKVMGRHKPENIVIEMARENQTTQKGQKNSRERMKRIEEGIKELGSQILKEHPVENTQLQNEKLYLYYLQNGRDMYVDQELDINRLSDYDVDHIVPQSFLKDDSIDNKVLTRSDKARGKSDNVPSEEVVKKMKNYWRQLLNAKLITQRKFDNLTKAERGGLSELDKAGFIKRQLVETRQITKHVAQILDSRMNTKYDENDKLIREVKVITLKSKLVSDFRKDFQFYKVREINNYHHAHDAYLNAVVGTALIKKYPKLESEFVYGDYKVYDVRKMIAKSEQEIGKATAKYFFYSNIMNFFKTEITLANGEIRKRPLIETNGETGEIVWDKGRDFATVRKVLSMPQVNIVKKTEVQTGGFSKESILPKRNSDKLIARKKDWDPKKYGGFDSPTVAYSVLVVAKVEKGKSKKLKSVKELLGITIMERSSFEKNPIDFLEAKGYKEVKKDLIIKLPKYSLFELENGRKRMLASAGELQKGNELALPSKYVNFLYLASHYEKLKGSPEDNEQKQLFVEQHKHYLDEIIEQISEFSKRVILADANLDKVLSAYNKHRDKPIREQAENIIHLFTLTNLGAPAAFKYFDTTIDRKRYTSTKEVLDATLIHQSITGLYETRIDLSQLGGDGGEAAAKGGSPAPGGTLNIEDEHRLHETSKEPDVSLGSTWLSDFPQAWAETGGMGLAVRQAPLIIPLKATSTPVSIKQYPMSQEARLGIKPHIQRLLDQGILVPCQSPWNTPLLPVKKPGTNDYRPVQDLREVNKRVEDIHPTVPNPYNLLSGLPPSHQWYTVLDLKDAFFCLRLHPTSQPLFAFEWRDPEMGISGQLTWTRLPQGFKNSPTLFNEALHRDLADFRIQHPDLILLQYVDDLLLAATSELDCQQGTRALLQTLGNLGYRASAKKAQICQKQVKYLGYLLKEGQRWLTEARKETVMGQPTPKTPRQLREFLGTAGFCRLWIPGFAEMAAPLYPLTKPGTLFNWGPDQQKAYQEIKQALLTAPALGLPDLTKPFELFVDEKQGYAKGVLTQKLGPWRRPVAYLSKKLDPVAAGWPPCLRMVAAIAVLTKDAGKLTMGQPLVILAPHAVEALVKQPPDRWLSNARMTHYQALLLDTDRVQFGPVVALNPATLLPLPEEGLQHNCLDILAEAHGTRPDLTDQPLPDADHTWYTDGSSLLQEGQRKAGAAVTTETEVIWAKALPAGTSAQRAELIALTQALKMAEGKKLNVYTDSRYAFATAHIHGEIYRRRGWLTSEGKEIKNKDEILALLKALFLPKRLSIIHCPGHQKGHSAEARGNRMADQAARKAAITETPDTSTLLAGKRTADGSEFEKRTADGSEFESPKKKAKVE

SEQ ID NO: 2756 - protein, 2096 aa, synthetic construct
MPAAKRVKLDGGDKKYSIGLDIGTNSVGWAVITDEYKVPSKKFKVLGNTDRHSIKKNLIGALLFDSGETAEATRLKRTARRRYTRRKNRICYLQEIFSNEMAKVDDSFFHRLEESFLVEEDKKHERHPIFGNIVDEVAYHEKYPTIYHLRKKLVDSTDKADLRLIYLALAHMIKFRGHFLIEGDLNPDNSDVDKLFIQLVQTYNQLFEENPINASGVDAKAILSARLSKSRRLENLIAQLPGEKKNGLFGNLIALSLGLTPNFKSNFDLAEDAKLQLSKDTYDDDLDNLLAQIGDQYADLFLAAKNLSDAILLSDILRVNTEITKAPLSASMIKRYDEHHQDLTLLKALVRQQLPEKYKEIFFDQSKNGYAGYIDGGASQEEFYKFIKPILEKMDGTEELLVKLNREDLLRKQRTFDNGSIPHQIHLGELHAILRRQEDFYPFLKDNREKIEKILTFRIPYYVGPLARGNSRFAWMTRKSEETITPWNFEEVVDKGASAQSFIERMTNFDKNLPNEKVLPKHSLLYEYFTVYNELTKVKYVTEGMRKPAFLSGEQKKAIVDLLFKTNRKVTVKQLKEDYFKKIECFDSVEISGVEDRFNASLGTYHDLLKIIKDKDFLDNEENEDILEDIVLTLTLFEDREMIEERLKTYAHLFDDKVMKQLKRRRYTGWGRLSRKLINGIRDKQSGKTILDFLKSDGFANRNFMQLIHDDSLTFKEDIQKAQVSGQGDSLHEHIANLAGSPAIKKGILQTVKVVDELVKVMGRHKPENIVIEMARENQTTQKGQKNSRERMKRIEEGIKELGSQILKEHPVENTQLQNEKLYLYYLQNGRDMYVDQELDINRLSDYDVDHIVPQSFLKDDSIDNKVLTRSDKARGKSDNVPSEEVVKKMKNYWRQLLNAKLITQRKFDNLTKAERGGLSELDKAGFIKRQLVETRQITKHVAQILDSRMNTKYDENDKLIREVKVITLKSKLVSDFRKDFQFYKVREINNYHHAHDAYLNAVVGTALIKKYPKLESEFVYGDYKVYDVRKMIAKSEQEIGKATAKYFFYSNIMNFFKTEITLANGEIRKRPLIETNGETGEIVWDKGRDFATVRKVLSMPQVNIVKKTEVQTGGFSKESILPKRNSDKLIARKKDWDPKKYGGFDSPTVAYSVLVVAKVEKGKSKKLKSVKELLGITIMERSSFEKNPIDFLEAKGYKEVKKDLIIKLPKYSLFELENGRKRMLASAGELQKGNELALPSKYVNFLYLASHYEKLKGSPEDNEQKQLFVEQHKHYLDEIIEQISEFSKRVILADANLDKVLSAYNKHRDKPIREQAENIIHLFTLTNLGAPAAFKYFDTTIDRKRYTSTKEVLDATLIHQSITGLYETRIDLSQLGGDGGPAPEAAAKGGSGGTLNIEDEHRLHETSKEPDVSLGSTWLSDFPQAWAETGGMGLAVRQAPLIIPLKATSTPVSIKQYPMSQEARLGIKPHIQRLLDQGILVPCQSPWNTPLLPVKKPGTNDYRPVQDLREVNKRVEDIHPTVPNPYNLLSGLPPSHQWYTVLDLKDAFFCLRLHPTSQPLFAFEWRDPEMGISGQLTWTRLPQGFKNSPTLFNEALHRDLADFRIQHPDLILLQYVDDLLLAATSELDCQQGTRALLQTLGNLGYRASAKKAQICQKQVKYLGYLLKEGQRWLTEARKETVMGQPTPKTPRQLREFLGTAGFCRLWIPGFAEMAAPLYPLTKPGTLFNWGPDQQKAYQEIKQALLTAPALGLPDLTKPFELFVDEKQGYAKGVLTQKLGPWRRPVAYLSKKLDPVAAGWPPCLRMVAAIAVLTKDAGKLTMGQPLVILAPHAVEALVKQPPDRWLSNARMTHYQALLLDTDRVQFGPVVALNPATLLPLPEEGLQHNCLDILAEAHGTRPDLTDQPLPDADHTWYTDGSSLLQEGQRKAGAAVTTETEVIWAKALPAGTSAQRAELIALTQALKMAEGKKLNVYTDSRYAFATAHIHGEIYRRRGWLTSEGKEIKNKDEILALLKALFLPKRLSIIHCPGHQKGHSAEARGNRMADQAARKAAITETPDTSTLLAGKRTADGSEFEKRTADGSEFESPKKKAKVE

SEQ ID NO: 2757 - protein, 2094 aa, synthetic construct
MPAAKRVKLDGGDKKYSIGLDIGTNSVGWAVITDEYKVPSKKFKVLGNTDRHSIKKNLIGALLFDSGETAEATRLKRTARRRYTRRKNRICYLQEIFSNEMAKVDDSFFHRLEESFLVEEDKKHERHPIFGNIVDEVAYHEKYPTIYHLRKKLVDSTDKADLRLIYLALAHMIKFRGHFLIEGDLNPDNSDVDKLFIQLVQTYNQLFEENPINASGVDAKAILSARLSKSRRLENLIAQLPGEKKNGLFGNLIALSLGLTPNFKSNFDLAEDAKLQLSKDTYDDDLDNLLAQIGDQYADLFLAAKNLSDAILLSDILRVNTEITKAPLSASMIKRYDEHHQDLTLLKALVRQQLPEKYKEIFFDQSKNGYAGYIDGGASQEEFYKFIKPILEKMDGTEELLVKLNREDLLRKQRTFDNGSIPHQIHLGELHAILRRQEDFYPFLKDNREKIEKILTFRIPYYVGPLARGNSRFAWMTRKSEETITPWNFEEVVDKGASAQSFIERMTNFDKNLPNEKVLPKHSLLYEYFTVYNELTKVKYVTEGMRKPAFLSGEQKKAIVDLLFKTNRKVTVKQLKEDYFKKIECFDSVEISGVEDRFNASLGTYHDLLKIIKDKDFLDNEENEDILEDIVLTLTLFEDREMIEERLKTYAHLFDDKVMKQLKRRRYTGWGRLSRKLINGIRDKQSGKTILDFLKSDGFANRNFMQLIHDDSLTFKEDIQKAQVSGQGDSLHEHIANLAGSPAIKKGILQTVKVVDELVKVMGRHKPENIVIEMARENQTTQKGQKNSRERMKRIEEGIKELGSQILKEHPVENTQLQNEKLYLYYLQNGRDMYVDQELDINRLSDYDVDHIVPQSFLKDDSIDNKVLTRSDKARGKSDNVPSEEVVKKMKNYWRQLLNAKLITQRKFDNLTKAERGGLSELDKAGFIKRQLVETRQITKHVAQILDSRMNTKYDENDKLIREVKVITLKSKLVSDFRKDFQFYKVREINNYHHAHDAYLNAVVGTALIKKYPKLESEFVYGDYKVYDVRKMIAKSEQEIGKATAKYFFYSNIMNFFKTEITLANGEIRKRPLIETNGETGEIVWDKGRDFATVRKVLSMPQVNIVKKTEVQTGGFSKESILPKRNSDKLIARKKDWDPKKYGGFDSPTVAYSVLVVAKVEKGKSKKLKSVKELLGITIMERSSFEKNPIDFLEAKGYKEVKKDLIIKLPKYSLFELENGRKRMLASAGELQKGNELALPSKYVNFLYLASHYEKLKGSPEDNEQKQLFVEQHKHYLDEIIEQISEFSKRVILADANLDKVLSAYNKHRDKPIREQAENIIHLFTLTNLGAPAAFKYFDTTIDRKRYTSTKEVLDATLIHQSITGLYETRIDLSQLGGDGGPAPGSSGGSGGTLNIEDEHRLHETSKEPDVSLGSTWLSDFPQAWAETGGMGLAVRQAPLIIPLKATSTPVSIKQYPMSQEARLGIKPHIQRLLDQGILVPCQSPWNTPLLPVKKPGTNDYRPVQDLREVNKRVEDIHPTVPNPYNLLSGLPPSHQWYTVLDLKDAFFCLRLHPTSQPLFAFEWRDPEMGISGQLTWTRLPQGFKNSPTLFNEALHRDLADFRIQHPDLILLQYVDDLLLAATSELDCQQGTRALLQTLGNLGYRASAKKAQICQKQVKYLGYLLKEGQRWLTEARKETVMGQPTPKTPRQLREFLGTAGFCRLWIPGFAEMAAPLYPLTKPGTLFNWGPDQQKAYQEIKQALLTAPALGLPDLTKPFELFVDEKQGYAKGVLTQKLGPWRRPVAYLSKKLDPVAAGWPPCLRMVAAIAVLTKDAGKLTMGQPLVILAPHAVEALVKQPPDRWLSNARMTHYQALLLDTDRVQFGPVVALNPATLLPLPEEGLQHNCLDILAEAHGTRPDLTDQPLPDADHTWYTDGSSLLQEGQRKAGAAVTTETEVIWAKALPAGTSAQRAELIALTQALKMAEGKKLNVYTDSRYAFATAHIHGEIYRRRGWLTSEGKEIKNKDEILALLKALFLPKRLSIIHCPGHQKGHSAEARGNRMADQAARKAAITETPDTSTLLAGKRTADGSEFEKRTADGSEFESPKKKAKVE

SEQ ID NO: 2758 - protein, 2096 aa, synthetic construct
MPAAKRVKLDGGDKKYSIGLDIGTNSVGWAVITDEYKVPSKKFKVLGNTDRHSIKKNLIGALLFDSGETAEATRLKRTARRRYTRRKNRICYLQEIFSNEMAKVDDSFFHRLEESFLVEEDKKHERHPIFGNIVDEVAYHEKYPTIYHLRKKLVDSTDKADLRLIYLALAHMIKFRGHFLIEGDLNPDNSDVDKLFIQLVQTYNQLFEENPINASGVDAKAILSARLSKSRRLENLIAQLPGEKKNGLFGNLIALSLGLTPNFKSNFDLAEDAKLQLSKDTYDDDLDNLLAQIGDQYADLFLAAKNLSDAILLSDILRVNTEITKAPLSASMIKRYDEHHQDLTLLKALVRQQLPEKYKEIFFDQSKNGYAGYIDGGASQEEFYKFIKPILEKMDGTEELLVKLNREDLLRKQRTFDNGSIPHQIHLGELHAILRRQEDFYPFLKDNREKIEKILTFRIPYYVGPLARGNSRFAWMTRKSEETITPWNFEEVVDKGASAQSFIERMTNFDKNLPNEKVLPKHSLLYEYFTVYNELTKVKYVTEGMRKPAFLSGEQKKAIVDLLFKTNRKVTVKQLKEDYFKKIECFDSVEISGVEDRFNASLGTYHDLLKIIKDKDFLDNEENEDILEDIVLTLTLFEDREMIEERLKTYAHLFDDKVMKQLKRRRYTGWGRLSRKLINGIRDKQSGKTILDFLKSDGFANRNFMQLIHDDSLTFKEDIQKAQVSGQGDSLHEHIANLAGSPAIKKGILQTVKVVDELVKVMGRHKPENIVIEMARENQTTQKGQKNSRERMKRIEEGIKELGSQILKEHPVENTQLQNEKLYLYYLQNGRDMYVDQELDINRLSDYDVDHIVPQSFLKDDSIDNKVLTRSDKARGKSDNVPSEEVVKKMKNYWRQLLNAKLITQRKFDNLTKAERGGLSELDKAGFIKRQLVETRQITKHVAQILDSRMNTKYDENDKLIREVKVITLKSKLVSDFRKDFQFYKVREINNYHHAHDAYLNAVVGTALIKKYPKLESEFVYGDYKVYDVRKMIAKSEQEIGKATAKYFFYSNIMNFFKTEITLANGEIRKRPLIETNGETGEIVWDKGRDFATVRKVLSMPQVNIVKKTEVQTGGFSKESILPKRNSDKLIARKKDWDPKKYGGFDSPTVAYSVLVVAKVEKGKSKKLKSVKELLGITIMERSSFEKNPIDFLEAKGYKEVKKDLIIKLPKYSLFELENGRKRMLASAGELQKGNELALPSKYVNFLYLASHYEKLKGSPEDNEQKQLFVEQHKHYLDEIIEQISEFSKRVILADANLDKVLSAYNKHRDKPIREQAENIIHLFTLTNLGAPAAFKYFDTTIDRKRYTSTKEVLDATLIHQSITGLYETRIDLSQLGGDGGGSSPAPEAAAKGGTLNIEDEHRLHETSKEPDVSLGSTWLSDFPQAWAETGGMGLAVRQAPLIIPLKATSTPVSIKQYPMSQEARLGIKPHIQRLLDQGILVPCQSPWNTPLLPVKKPGTNDYRPVQDLREVNKRVEDIHPTVPNPYNLLSGLPPSHQWYTVLDLKDAFFCLRLHPTSQPLFAFEWRDPEMGISGQLTWTRLPQGFKNSPTLFNEALHRDLADFRIQHPDLILLQYVDDLLLAATSELDCQQGTRALLQTLGNLGYRASAKKAQICQKQVKYLGYLLKEGQRWLTEARKETVMGQPTPKTPRQLREFLGTAGFCRLWIPGFAEMAAPLYPLTKPGTLFNWGPDQQKAYQEIKQALLTAPALGLPDLTKPFELFVDEKQGYAKGVLTQKLGPWRRPVAYLSKKLDPVAAGWPPCLRMVAAIAVLTKDAGKLTMGQPLVILAPHAVEALVKQPPDRWLSNARMTHYQALLLDTDRVQFGPVVALNPATLLPLPEEGLQHNCLDILAEAHGTRPDLTDQPLPDADHTWYTDGSSLLQEGQRKAGAAVTTETEVIWAKALPAGTSAQRAELIALTQALKMAEGKKLNVYTDSRYAFATAHIHGEIYRRRGWLTSEGKEIKNKDEILALLKALFLPKRLSIIHCPGHQKGHSAEARGNRMADQAARKAAITETPDTSTLLAGKRTADGSEFEKRTADGSEFESPKKKAKVE

SEQ ID NO: 2759 - protein, 2096 aa, synthetic construct
MPAAKRVKLDGGDKKYSIGLDIGTNSVGWAVITDEYKVPSKKFKVLGNTDRHSIKKNLIGALLFDSGETAEATRLKRTARRRYTRRKNRICYLQEIFSNEMAKVDDSFFHRLEESFLVEEDKKHERHPIFGNIVDEVAYHEKYPTIYHLRKKLVDSTDKADLRLIYLALAHMIKFRGHFLIEGDLNPDNSDVDKLFIQLVQTYNQLFEENPINASGVDAKAILSARLSKSRRLENLIAQLPGEKKNGLFGNLIALSLGLTPNFKSNFDLAEDAKLQLSKDTYDDDLDNLLAQIGDQYADLFLAAKNLSDAILLSDILRVNTEITKAPLSASMIKRYDEHHQDLTLLKALVRQQLPEKYKEIFFDQSKNGYAGYIDGGASQEEFYKFIKPILEKMDGTEELLVKLNREDLLRKQRTFDNGSIPHQIHLGELHAILRRQEDFYPFLKDNREKIEKILTFRIPYYVGPLARGNSRFAWMTRKSEETITPWNFEEVVDKGASAQSFIERMTNFDKNLPNEKVLPKHSLLYEYFTVYNELTKVKYVTEGMRKPAFLSGEQKKAIVDLLFKTNRKVTVKQLKEDYFKKIECFDSVEISGVEDRFNASLGTYHDLLKIIKDKDFLDNEENEDILEDIVLTLTLFEDREMIEERLKTYAHLFDDKVMKQLKRRRYTGWGRLSRKLINGIRDKQSGKTILDFLKSDGFANRNFMQLIHDDSLTFKEDIQKAQVSGQGDSLHEHIANLAGSPAIKKGILQTVKVVDELVKVMGRHKPENIVIEMARENQTTQKGQKNSRERMKRIEEGIKELGSQILKEHPVENTQLQNEKLYLYYLQNGRDMYVDQELDINRLSDYDVDHIVPQSFLKDDSIDNKVLTRSDKARGKSDNVPSEEVVKKMKNYWRQLLNAKLITQRKFDNLTKAERGGLSELDKAGFIKRQLVETRQITKHVAQILDSRMNTKYDENDKLIREVKVITLKSKLVSDFRKDFQFYKVREINNYHHAHDAYLNAVVGTALIKKYPKLESEFVYGDYKVYDVRKMIAKSEQEIGKATAKYFFYSNIMNFFKTEITLANGEIRKRPLIETNGETGEIVWDKGRDFATVRKVLSMPQVNIVKKTEVQTGGFSKESILPKRNSDKLIARKKDWDPKKYGGFDSPTVAYSVLVVAKVEKGKSKKLKSVKELLGITIMERSSFEKNPIDFLEAKGYKEVKKDLIIKLPKYSLFELENGRKRMLASAGELQKGNELALPSKYVNFLYLASHYEKLKGSPEDNEQKQLFVEQHKHYLDEIIEQISEFSKRVILADANLDKVLSAYNKHRDKPIREQAENIIHLFTLTNLGAPAAFKYFDTTIDRKRYTSTKEVLDATLIHQSITGLYETRIDLSQLGGDGGPAPEAAAKGSSGGTLNIEDEHRLHETSKEPDVSLGSTWLSDFPQAWAETGGMGLAVRQAPLIIPLKATSTPVSIKQYPMSQEARLGIKPHIQRLLDQGILVPCQSPWNTPLLPVKKPGTNDYRPVQDLREVNKRVEDIHPTVPNPYNLLSGLPPSHQWYTVLDLKDAFFCLRLHPTSQPLFAFEWRDPEMGISGQLTWTRLPQGFKNSPTLFNEALHRDLADFRIQHPDLILLQYVDDLLLAATSELDCQQGTRALLQTLGNLGYRASAKKAQICQKQVKYLGYLLKEGQRWLTEARKETVMGQPTPKTPRQLREFLGTAGFCRLWIPGFAEMAAPLYPLTKPGTLFNWGPDQQKAYQEIKQALLTAPALGLPDLTKPFELFVDEKQGYAKGVLTQKLGPWRRPVAYLSKKLDPVAAGWPPCLRMVAAIAVLTKDAGKLTMGQPLVILAPHAVEALVKQPPDRWLSNARMTHYQALLLDTDRVQFGPVVALNPATLLPLPEEGLQHNCLDILAEAHGTRPDLTDQPLPDADHTWYTDGSSLLQEGQRKAGAAVTTETEVIWAKALPAGTSAQRAELIALTQALKMAEGKKLNVYTDSRYAFATAHIHGEIYRRRGWLTSEGKEIKNKDEILALLKALFLPKRLSIIHCPGHQKGHSAEARGNRMADQAARKAAITETPDTSTLLAGKRTADGSEFEKRTADGSEFESPKKKAKVE

SEQ ID NO: 2760 - protein, 2096 aa, synthetic construct
MPAAKRVKLDGGDKKYSIGLDIGTNSVGWAVITDEYKVPSKKFKVLGNTDRHSIKKNLIGALLFDSGETAEATRLKRTARRRYTRRKNRICYLQEIFSNEMAKVDDSFFHRLEESFLVEEDKKHERHPIFGNIVDEVAYHEKYPTIYHLRKKLVDSTDKADLRLIYLALAHMIKFRGHFLIEGDLNPDNSDVDKLFIQLVQTYNQLFEENPINASGVDAKAILSARLSKSRRLENLIAQLPGEKKNGLFGNLIALSLGLTPNFKSNFDLAEDAKLQLSKDTYDDDLDNLLAQIGDQYADLFLAAKNLSDAILLSDILRVNTEITKAPLSASMIKRYDEHHQDLTLLKALVRQQLPEKYKEIFFDQSKNGYAGYIDGGASQEEFYKFIKPILEKMDGTEELLVKLNREDLLRKQRTFDNGSIPHQIHLGELHAILRRQEDFYPFLKDNREKIEKILTFRIPYYVGPLARGNSRFAWMTRKSEETITPWNFEEVVDKGASAQSFIERMTNFDKNLPNEKVLPKHSLLYEYFTVYNELTKVKYVTEGMRKPAFLSGEQKKAIVDLLFKTNRKVTVKQLKEDYFKKIECFDSVEISGVEDRFNASLGTYHDLLKIIKDKDFLDNEENEDILEDIVLTLTLFEDREMIEERLKTYAHLFDDKVMKQLKRRRYTGWGRLSRKLINGIRDKQSGKTILDFLKSDGFANRNFMQLIHDDSLTFKEDIQKAQVSGQGDSLHEHIANLAGSPAIKKGILQTVKVVDELVKVMGRHKPENIVIEMARENQTTQKGQKNSRERMKRIEEGIKELGSQILKEHPVENTQLQNEKLYLYYLQNGRDMYVDQELDINRLSDYDVDHIVPQSFLKDDSIDNKVLTRSDKARGKSDNVPSEEVVKKMKNYWRQLLNAKLITQRKFDNLTKAERGGLSELDKAGFIKRQLVETRQITKHVAQILDSRMNTKYDENDKLIREVKVITLKSKLVSDFRKDFQFYKVREINNYHHAHDAYLNAVVGTALIKKYPKLESEFVYGDYKVYDVRKMIAKSEQEIGKATAKYFFYSNIMNFFKTEITLANGEIRKRPLIETNGETGEIVWDKGRDFATVRKVLSMPQVNIVKKTEVQTGGFSKESILPKRNSDKLIARKKDWDPKKYGGFDSPTVAYSVLVVAKVEKGKSKKLKSVKELLGITIMERSSFEKNPIDFLEAKGYKEVKKDLIIKLPKYSLFELENGRKRMLASAGELQKGNELALPSKYVNFLYLASHYEKLKGSPEDNEQKQLFVEQHKHYLDEIIEQISEFSKRVILADANLDKVLSAYNKHRDKPIREQAENIIHLFTLTNLGAPAAFKYFDTTIDRKRYTSTKEVLDATLIHQSITGLYETRIDLSQLGGDGGGSSGGSEAAAKGGTLNIEDEHRLHETSKEPDVSLGSTWLSDFPQAWAETGGMGLAVRQAPLIIPLKATSTPVSIKQYPMSQEARLGIKPHIQRLLDQGILVPCQSPWNTPLLPVKKPGTNDYRPVQDLREVNKRVEDIHPTVPNPYNLLSGLPPSHQWYTVLDLKDAFFCLRLHPTSQPLFAFEWRDPEMGISGQLTWTRLPQGFKNSPTLFNEALHRDLADFRIQHPDLILLQYVDDLLLAATSELDCQQGTRALLQTLGNLGYRASAKKAQICQKQVKYLGYLLKEGQRWLTEARKETVMGQPTPKTPRQLREFLGTAGFCRLWIPGFAEMAAPLYPLTKPGTLFNWGPDQQKAYQEIKQALLTAPALGLPDLTKPFELFVDEKQGYAKGVLTQKLGPWRRPVAYLSKKLDPVAAGWPPCLRMVAAIAVLTKDAGKLTMGQPLVILAPHAVEALVKQPPDRWLSNARMTHYQALLLDTDRVQFGPVVALNPATLLPLPEEGLQHNCLDILAEAHGTRPDLTDQPLPDADHTWYTDGSSLLQEGQRKAGAAVTTETEVIWAKALPAGTSAQRAELIALTQALKMAEGKKLNVYTDSRYAFATAHIHGEIYRRRGWLTSEGKEIKNKDEILALLKALFLPKRLSIIHCPGHQKGHSAEARGNRMADQAARKAAITETPDTSTLLAGKRTADGSEFEKRTADGSEFESPKKKAKVE

SEQ ID NO: 2761 - protein, 2096 aa, synthetic construct
MPAAKRVKLDGGDKKYSIGLDIGTNSVGWAVITDEYKVPSKKFKVLGNTDRHSIKKNLIGALLFDSGETAEATRLKRTARRRYTRRKNRICYLQEIFSNEMAKVDDSFFHRLEESFLVEEDKKHERHPIFGNIVDEVAYHEKYPTIYHLRKKLVDSTDKADLRLIYLALAHMIKFRGHFLIEGDLNPDNSDVDKLFIQLVQTYNQLFEENPINASGVDAKAILSARLSKSRRLENLIAQLPGEKKNGLFGNLIALSLGLTPNFKSNFDLAEDAKLQLSKDTYDDDLDNLLAQIGDQYADLFLAAKNLSDAILLSDILRVNTEITKAPLSASMIKRYDEHHQDLTLLKALVRQQLPEKYKEIFFDQSKNGYAGYIDGGASQEEFYKFIKPILEKMDGTEELLVKLNREDLLRKQRTFDNGSIPHQIHLGELHAILRRQEDFYPFLKDNREKIEKILTFRIPYYVGPLARGNSRFAWMTRKSEETITPWNFEEVVDKGASAQSFIERMTNFDKNLPNEKVLPKHSLLYEYFTVYNELTKVKYVTEGMRKPAFLSGEQKKAIVDLLFKTNRKVTVKQLKEDYFKKIECFDSVEISGVEDRFNASLGTYHDLLKIIKDKDFLDNEENEDILEDIVLTLTLFEDREMIEERLKTYAHLFDDKVMKQLKRRRYTGWGRLSRKLINGIRDKQSGKTILDFLKSDGFANRNFMQLIHDDSLTFKEDIQKAQVSGQGDSLHEHIANLAGSPAIKKGILQTVKVVDELVKVMGRHKPENIVIEMARENQTTQKGQKNSRERMKRIEEGIKELGSQILKEHPVENTQLQNEKLYLYYLQNGRDMYVDQELDINRLSDYDVDHIVPQSFLKDDSIDNKVLTRSDKARGKSDNVPSEEVVKKMKNYWRQLLNAKLITQRKFDNLTKAERGGLSELDKAGFIKRQLVETRQITKHVAQILDSRMNTKYDENDKLIREVKVITLKSKLVSDFRKDFQFYKVREINNYHHAHDAYLNAVVGTALIKKYPKLESEFVYGDYKVYDVRKMIAKSEQEIGKATAKYFFYSNIMNFFKTEITLANGEIRKRPLIETNGETGEIVWDKGRDFATVRKVLSMPQVNIVKKTEVQTGGFSKESILPKRNSDKLIARKKDWDPKKYGGFDSPTVAYSVLVVAKVEKGKSKKLKSVKELLGITIMERSSFEKNPIDFLEAKGYKEVKKDLIIKLPKYSLFELENGRKRMLASAGELQKGNELALPSKYVNFLYLASHYEKLKGSPEDNEQKQLFVEQHKHYLDEIIEQISEFSKRVILADANLDKVLSAYNKHRDKPIREQAENIIHLFTLTNLGAPAAFKYFDTTIDRKRYTSTKEVLDATLIHQSITGLYETRIDLSQLGGDGGGGSEAAAKGSSGGTLNIEDEHRLHETSKEPDVSLGSTWLSDFPQAWAETGGMGLAVRQAPLIIPLKATSTPVSIKQYPMSQEARLGIKPHIQRLLDQGILVPCQSPWNTPLLPVKKPGTNDYRPVQDLREVNKRVEDIHPTVPNPYNLLSGLPPSHQWYTVLDLKDAFFCLRLHPTSQPLFAFEWRDPEMGISGQLTWTRLPQGFKNSPTLFNEALHRDLADFRIQHPDLILLQYVDDLLLAATSELDCQQGTRALLQTLGNLGYRASAKKAQICQKQVKYLGYLLKEGQRWLTEARKETVMGQPTPKTPRQLREFLGTAGFCRLWIPGFAEMAAPLYPLTKPGTLFNWGPDQQKAYQEIKQALLTAPALGLPDLTKPFELFVDEKQGYAKGVLTQKLGPWRRPVAYLSKKLDPVAAGWPPCLRMVAAIAVLTKDAGKLTMGQPLVILAPHAVEALVKQPPDRWLSNARMTHYQALLLDTDRVQFGPVVALNPATLLPLPEEGLQHNCLDILAEAHGTRPDLTDQPLPDADHTWYTDGSSLLQEGQRKAGAAVTTETEVIWAKALPAGTSAQRAELIALTQALKMAEGKKLNVYTDSRYAFATAHIHGEIYRRRGWLTSEGKEIKNKDEILALLKALFLPKRLSIIHCPGHQKGHSAEARGNRMADQAARKAAITETPDTSTLLAGKRTADGSEFEKRTADGSEFESPKKKAKVE

SEQ ID NO: 2762 - protein, 2094 aa, synthetic construct
MPAAKRVKLDGGDKKYSIGLDIGTNSVGWAVITDEYKVPSKKFKVLGNTDRHSIKKNLIGALLFDSGETAEATRLKRTARRRYTRRKNRICYLQEIFSNEMAKVDDSFFHRLEESFLVEEDKKHERHPIFGNIVDEVAYHEKYPTIYHLRKKLVDSTDKADLRLIYLALAHMIKFRGHFLIEGDLNPDNSDVDKLFIQLVQTYNQLFEENPINASGVDAKAILSARLSKSRRLENLIAQLPGEKKNGLFGNLIALSLGLTPNFKSNFDLAEDAKLQLSKDTYDDDLDNLLAQIGDQYADLFLAAKNLSDAILLSDILRVNTEITKAPLSASMIKRYDEHHQDLTLLKALVRQQLPEKYKEIFFDQSKNGYAGYIDGGASQEEFYKFIKPILEKMDGTEELLVKLNREDLLRKQRTFDNGSIPHQIHLGELHAILRRQEDFYPFLKDNREKIEKILTFRIPYYVGPLARGNSRFAWMTRKSEETITPWNFEEVVDKGASAQSFIERMTNFDKNLPNEKVLPKHSLLYEYFTVYNELTKVKYVTEGMRKPAFLSGEQKKAIVDLLFKTNRKVTVKQLKEDYFKKIECFDSVEISGVEDRFNASLGTYHDLLKIIKDKDFLDNEENEDILEDIVLTLTLFEDREMIEERLKTYAHLFDDKVMKQLKRRRYTGWGRLSRKLINGIRDKQSGKTILDFLKSDGFANRNFMQLIHDDSLTFKEDIQKAQVSGQGDSLHEHIANLAGSPAIKKGILQTVKVVDELVKVMGRHKPENIVIEMARENQTTQKGQKNSRERMKRIEEGIKELGSQILKEHPVENTQLQNEKLYLYYLQNGRDMYVDQELDINRLSDYDVDHIVPQSFLKDDSIDNKVLTRSDKARGKSDNVPSEEVVKKMKNYWRQLLNAKLITQRKFDNLTKAERGGLSELDKAGFIKRQLVETRQITKHVAQILDSRMNTKYDENDKLIREVKVITLKSKLVSDFRKDFQFYKVREINNYHHAHDAYLNAVVGTALIKKYPKLESEFVYGDYKVYDVRKMIAKSEQEIGKATAKYFFYSNIMNFFKTEITLANGEIRKRPLIETNGETGEIVWDKGRDFATVRKVLSMPQVNIVKKTEVQTGGFSKESILPKRNSDKLIARKKDWDPKKYGGFDSPTVAYSVLVVAKVEKGKSKKLKSVKELLGITIMERSSFEKNPIDFLEAKGYKEVKKDLIIKLPKYSLFELENGRKRMLASAGELQKGNELALPSKYVNFLYLASHYEKLKGSPEDNEQKQLFVEQHKHYLDEIIEQISEFSKRVILADANLDKVLSAYNKHRDKPIREQAENIIHLFTLTNLGAPAAFKYFDTTIDRKRYTSTKEVLDATLIHQSITGLYETRIDLSQLGGDGGGGSPAPGGGGGTLNIEDEHRLHETSKEPDVSLGSTWLSDFPQAWAETGGMGLAVRQAPLIIPLKATSTPVSIKQYPMSQEARLGIKPHIQRLLDQGILVPCQSPWNTPLLPVKKPGTNDYRPVQDLREVNKRVEDIHPTVPNPYNLLSGLPPSHQWYTVLDLKDAFFCLRLHPTSQPLFAFEWRDPEMGISGQLTWTRLPQGFKNSPTLFNEALHRDLADFRIQHPDLILLQYVDDLLLAATSELDCQQGTRALLQTLGNLGYRASAKKAQICQKQVKYLGYLLKEGQRWLTEARKETVMGQPTPKTPRQLREFLGTAGFCRLWIPGFAEMAAPLYPLTKPGTLFNWGPDQQKAYQEIKQALLTAPALGLPDLTKPFELFVDEKQGYAKGVLTQKLGPWRRPVAYLSKKLDPVAAGWPPCLRMVAAIAVLTKDAGKLTMGQPLVILAPHAVEALVKQPPDRWLSNARMTHYQALLLDTDRVQFGPVVALNPATLLPLPEEGLQHNCLDILAEAHGTRPDLTDQPLPDADHTWYTDGSSLLQEGQRKAGAAVTTETEVIWAKALPAGTSAQRAELIALTQALKMAEGKKLNVYTDSRYAFATAHIHGEIYRRRGWLTSEGKEIKNKDEILALLKALFLPKRLSIIHCPGHQKGHSAEARGNRMADQAARKAAITETPDTSTLLAGKRTADGSEFEKRTADGSEFESPKKKAKVE

SEQ ID NO: 2763 - protein, 2097 aa, synthetic construct
MPAAKRVKLDGGDKKYSIGLDIGTNSVGWAVITDEYKVPSKKFKVLGNTDRHSIKKNLIGALLFDSGETAEATRLKRTARRRYTRRKNRICYLQEIFSNEMAKVDDSFFHRLEESFLVEEDKKHERHPIFGNIVDEVAYHEKYPTIYHLRKKLVDSTDKADLRLIYLALAHMIKFRGHFLIEGDLNPDNSDVDKLFIQLVQTYNQLFEENPINASGVDAKAILSARLSKSRRLENLIAQLPGEKKNGLFGNLIALSLGLTPNFKSNFDLAEDAKLQLSKDTYDDDLDNLLAQIGDQYADLFLAAKNLSDAILLSDILRVNTEITKAPLSASMIKRYDEHHQDLTLLKALVRQQLPEKYKEIFFDQSKNGYAGYIDGGASQEEFYKFIKPILEKMDGTEELLVKLNREDLLRKQRTFDNGSIPHQIHLGELHAILRRQEDFYPFLKDNREKIEKILTFRIPYYVGPLARGNSRFAWMTRKSEETITPWNFEEVVDKGASAQSFIERMTNFDKNLPNEKVLPKHSLLYEYFTVYNELTKVKYVTEGMRKPAFLSGEQKKAIVDLLFKTNRKVTVKQLKEDYFKKIECFDSVEISGVEDRFNASLGTYHDLLKIIKDKDFLDNEENEDILEDIVLTLTLFEDREMIEERLKTYAHLFDDKVMKQLKRRRYTGWGRLSRKLINGIRDKQSGKTILDFLKSDGFANRNFMQLIHDDSLTFKEDIQKAQVSGQGDSLHEHIANLAGSPAIKKGILQTVKVVDELVKVMGRHKPENIVIEMARENQTTQKGQKNSRERMKRIEEGIKELGSQILKEHPVENTQLQNEKLYLYYLQNGRDMYVDQELDINRLSDYDVDHIVPQSFLKDDSIDNKVLTRSDKARGKSDNVPSEEVVKKMKNYWRQLLNAKLITQRKFDNLTKAERGGLSELDKAGFIKRQLVETRQITKHVAQILDSRMNTKYDENDKLIREVKVITLKSKLVSDFRKDFQFYKVREINNYHHAHDAYLNAVVGTALIKKYPKLESEFVYGDYKVYDVRKMIAKSEQEIGKATAKYFFYSNIMNFFKTEITLANGEIRKRPLIETNGETGEIVWDKGRDFATVRKVLSMPQVNIVKKTEVQTGGFSKESILPKRNSDKLIARKKDWDPKKYGGFDSPTVAYSVLVVAKVEKGKSKKLKSVKELLGITIMERSSFEKNPIDFLEAKGYKEVKKDLIIKLPKYSLFELENGRKRMLASAGELQKGNELALPSKYVNFLYLASHYEKLKGSPEDNEQKQLFVEQHKHYLDEIIEQISEFSKRVILADANLDKVLSAYNKHRDKPIREQAENIIHLFTLTNLGAPAAFKYFDTTIDRKRYTSTKEVLDATLIHQSITGLYETRIDLSQLGGDGGGGSGGSGGSGGSGGTLNIEDEHRLHETSKEPDVSLGSTWLSDFPQAWAETGGMGLAVRQAPLIIPLKATSTPVSIKQYPMSQEARLGIKPHIQRLLDQGILVPCQSPWNTPLLPVKKPGTNDYRPVQDLREVNKRVEDIHPTVPNPYNLLSGLPPSHQWYTVLDLKDAFFCLRLHPTSQPLFAFEWRDPEMGISGQLTWTRLPQGFKNSPTLFNEALHRDLADFRIQHPDLILLQYVDDLLLAATSELDCQQGTRALLQTLGNLGYRASAKKAQICQKQVKYLGYLLKEGQRWLTEARKETVMGQPTPKTPRQLREFLGTAGFCRLWIPGFAEMAAPLYPLTKPGTLFNWGPDQQKAYQEIKQALLTAPALGLPDLTKPFELFVDEKQGYAKGVLTQKLGPWRRPVAYLSKKLDPVAAGWPPCLRMVAAIAVLTKDAGKLTMGQPLVILAPHAVEALVKQPPDRWLSNARMTHYQALLLDTDRVQFGPVVALNPATLLPLPEEGLQHNCLDILAEAHGTRPDLTDQPLPDADHTWYTDGSSLLQEGQRKAGAAVTTETEVIWAKALPAGTSAQRAELIALTQALKMAEGKKLNVYTDSRYAFATAHIHGEIYRRRGWLTSEGKEIKNKDEILALLKALFLPKRLSIIHCPGHQKGHSAEARGNRMADQAARKAAITETPDTSTLLAGKRTADGSEFEKRTADGSEFESPKKKAKVE

SEQ ID NO: 2764 - protein, 2096 aa, synthetic construct
MPAAKRVKLDGGDKKYSIGLDIGTNSVGWAVITDEYKVPSKKFKVLGNTDRHSIKKNLIGALLFDSGETAEATRLKRTARRRYTRRKNRICYLQEIFSNEMAKVDDSFFHRLEESFLVEEDKKHERHPIFGNIVDEVAYHEKYPTIYHLRKKLVDSTDKADLRLIYLALAHMIKFRGHFLIEGDLNPDNSDVDKLFIQLVQTYNQLFEENPINASGVDAKAILSARLSKSRRLENLIAQLPGEKKNGLFGNLIALSLGLTPNFKSNFDLAEDAKLQLSKDTYDDDLDNLLAQIGDQYADLFLAAKNLSDAILLSDILRVNTEITKAPLSASMIKRYDEHHQDLTLLKALVRQQLPEKYKEIFFDQSKNGYAGYIDGGASQEEFYKFIKPILEKMDGTEELLVKLNREDLLRKQRTFDNGSIPHQIHLGELHAILRRQEDFYPFLKDNREKIEKILTFRIPYYVGPLARGNSRFAWMTRKSEETITPWNFEEVVDKGASAQSFIERMTNFDKNLPNEKVLPKHSLLYEYFTVYNELTKVKYVTEGMRKPAFLSGEQKKAIVDLLFKTNRKVTVKQLKEDYFKKIECFDSVEISGVEDRFNASLGTYHDLLKIIKDKDFLDNEENEDILEDIVLTLTLFEDREMIEERLKTYAHLFDDKVMKQLKRRRYTGWGRLSRKLINGIRDKQSGKTILDFLKSDGFANRNFMQLIHDDSLTFKEDIQKAQVSGQGDSLHEHIANLAGSPAIKKGILQTVKVVDELVKVMGRHKPENIVIEMARENQTTQKGQKNSRERMKRIEEGIKELGSQILKEHPVENTQLQNEKLYLYYLQNGRDMYVDQELDINRLSDYDVDHIVPQSFLKDDSIDNKVLTRSDKARGKSDNVPSEEVVKKMKNYWRQLLNAKLITQRKFDNLTKAERGGLSELDKAGFIKRQLVETRQITKHVAQILDSRMNTKYDENDKLIREVKVITLKSKLVSDFRKDFQFYKVREINNYHHAHDAYLNAVVGTALIKKYPKLESEFVYGDYKVYDVRKMIAKSEQEIGKATAKYFFYSNIMNFFKTEITLANGEIRKRPLIETNGETGEIVWDKGRDFATVRKVLSMPQVNIVKKTEVQTGGFSKESILPKRNSDKLIARKKDWDPKKYGGFDSPTVAYSVLVVAKVEKGKSKKLKSVKELLGITIMERSSFEKNPIDFLEAKGYKEVKKDLIIKLPKYSLFELENGRKRMLASAGELQKGNELALPSKYVNFLYLASHYEKLKGSPEDNEQKQLFVEQHKHYLDEIIEQISEFSKRVILADANLDKVLSAYNKHRDKPIREQAENIIHLFTLTNLGAPAAFKYFDTTIDRKRYTSTKEVLDATLIHQSITGLYETRIDLSQLGGDGGGGGGSSEAAAKGGTLNIEDEHRLHETSKEPDVSLGSTWLSDFPQAWAETGGMGLAVRQAPLIIPLKATSTPVSIKQYPMSQEARLGIKPHIQRLLDQGILVPCQSPWNTPLLPVKKPGTNDYRPVQDLREVNKRVEDIHPTVPNPYNLLSGLPPSHQWYTVLDLKDAFFCLRLHPTSQPLFAFEWRDPEMGISGQLTWTRLPQGFKNSPTLFNEALHRDLADFRIQHPDLILLQYVDDLLLAATSELDCQQGTRALLQTLGNLGYRASAKKAQICQKQVKYLGYLLKEGQRWLTEARKETVMGQPTPKTPRQLREFLGTAGFCRLWIPGFAEMAAPLYPLTKPGTLFNWGPDQQKAYQEIKQALLTAPALGLPDLTKPFELFVDEKQGYAKGVLTQKLGPWRRPVAYLSKKLDPVAAGWPPCLRMVAAIAVLTKDAGKLTMGQPLVILAPHAVEALVKQPPDRWLSNARMTHYQALLLDTDRVQFGPVVALNPATLLPLPEEGLQHNCLDILAEAHGTRPDLTDQPLPDADHTWYTDGSSLLQEGQRKAGAAVTTETEVIWAKALPAGTSAQRAELIALTQALKMAEGKKLNVYTDSRYAFATAHIHGEIYRRRGWLTSEGKEIKNKDEILALLKALFLPKRLSIIHCPGHQKGHSAEARGNRMADQAARKAAITETPDTSTLLAGKRTADGSEFEKRTADGSEFESPKKKAKVE

SEQ ID NO: 2765 - protein, 2096 aa, synthetic construct
MPAAKRVKLDGGDKKYSIGLDIGTNSVGWAVITDEYKVPSKKFKVLGNTDRHSIKKNLIGALLFDSGETAEATRLKRTARRRYTRRKNRICYLQEIFSNEMAKVDDSFFHRLEESFLVEEDKKHERHPIFGNIVDEVAYHEKYPTIYHLRKKLVDSTDKADLRLIYLALAHMIKFRGHFLIEGDLNPDNSDVDKLFIQLVQTYNQLFEENPINASGVDAKAILSARLSKSRRLENLIAQLPGEKKNGLFGNLIALSLGLTPNFKSNFDLAEDAKLQLSKDTYDDDLDNLLAQIGDQYADLFLAAKNLSDAILLSDILRVNTEITKAPLSASMIKRYDEHHQDLTLLKALVRQQLPEKYKEIFFDQSKNGYAGYIDGGASQEEFYKFIKPILEKMDGTEELLVKLNREDLLRKQRTFDNGSIPHQIHLGELHAILRRQEDFYPFLKDNREKIEKILTFRIPYYVGPLARGNSRFAWMTRKSEETITPWNFEEVVDKGASAQSFIERMTNFDKNLPNEKVLPKHSLLYEYFTVYNELTKVKYVTEGMRKPAFLSGEQKKAIVDLLFKTNRKVTVKQLKEDYFKKIECFDSVEISGVEDRFNASLGTYHDLLKIIKDKDFLDNEENEDILEDIVLTLTLFEDREMIEERLKTYAHLFDDKVMKQLKRRRYTGWGRLSRKLINGIRDKQSGKTILDFLKSDGFANRNFMQLIHDDSLTFKEDIQKAQVSGQGDSLHEHIANLAGSPAIKKGILQTVKVVDELVKVMGRHKPENIVIEMARENQTTQKGQKNSRERMKRIEEGIKELGSQILKEHPVENTQLQNEKLYLYYLQNGRDMYVDQELDINRLSDYDVDHIVPQSFLKDDSIDNKVLTRSDKARGKSDNVPSEEVVKKMKNYWRQLLNAKLITQRKFDNLTKAERGGLSELDKAGFIKRQLVETRQITKHVAQILDSRMNTKYDENDKLIREVKVITLKSKLVSDFRKDFQFYKVREINNYHHAHDAYLNAVVGTALIKKYPKLESEFVYGDYKVYDVRKMIAKSEQEIGKATAKYFFYSNIMNFFKTEITLANGEIRKRPLIETNGETGEIVWDKGRDFATVRKVLSMPQVNIVKKTEVQTGGFSKESILPKRNSDKLIARKKDWDPKKYGGFDSPTVAYSVLVVAKVEKGKSKKLKSVKELLGITIMERSSFEKNPIDFLEAKGYKEVKKDLIIKLPKYSLFELENGRKRMLASAGELQKGNELALPSKYVNFLYLASHYEKLKGSPEDNEQKQLFVEQHKHYLDEIIEQISEFSKRVILADANLDKVLSAYNKHRDKPIREQAENIIHLFTLTNLGAPAAFKYFDTTIDRKRYTSTKEVLDATLIHQSITGLYETRIDLSQLGGDGGEAAAKPAPGGGGGTLNIEDEHRLHETSKEPDVSLGSTWLSDFPQAWAETGGMGLAVRQAPLIIPLKATSTPVSIKQYPMSQEARLGIKPHIQRLLDQGILVPCQSPWNTPLLPVKKPGTNDYRPVQDLREVNKRVEDIHPTVPNPYNLLSGLPPSHQWYTVLDLKDAFFCLRLHPTSQPLFAFEWRDPEMGISGQLTWTRLPQGFKNSPTLFNEALHRDLADFRIQHPDLILLQYVDDLLLAATSELDCQQGTRALLQTLGNLGYRASAKKAQICQKQVKYLGYLLKEGQRWLTEARKETVMGQPTPKTPRQLREFLGTAGFCRLWIPGFAEMAAPLYPLTKPGTLFNWGPDQQKAYQEIKQALLTAPALGLPDLTKPFELFVDEKQGYAKGVLTQKLGPWRRPVAYLSKKLDPVAAGWPPCLRMVAAIAVLTKDAGKLTMGQPLVILAPHAVEALVKQPPDRWLSNARMTHYQALLLDTDRVQFGPVVALNPATLLPLPEEGLQHNCLDILAEAHGTRPDLTDQPLPDADHTWYTDGSSLLQEGQRKAGAAVTTETEVIWAKALPAGTSAQRAELIALTQALKMAEGKKLNVYTDSRYAFATAHIHGEIYRRRGWLTSEGKEIKNKDEILALLKALFLPKRLSIIHCPGHQKGHSAEARGNRMADQAARKAAITETPDTSTLLAGKRTADGSEFEKRTADGSEFESPKKKAKVE

SEQ ID NO: 2766 - protein, 2094 aa, synthetic construct
MPAAKRVKLDGGDKKYSIGLDIGTNSVGWAVITDEYKVPSKKFKVLGNTDRHSIKKNLIGALLFDSGETAEATRLKRTARRRYTRRKNRICYLQEIFSNEMAKVDDSFFHRLEESFLVEEDKKHERHPIFGNIVDEVAYHEKYPTIYHLRKKLVDSTDKADLRLIYLALAHMIKFRGHFLIEGDLNPDNSDVDKLFIQLVQTYNQLFEENPINASGVDAKAILSARLSKSRRLENLIAQLPGEKKNGLFGNLIALSLGLTPNFKSNFDLAEDAKLQLSKDTYDDDLDNLLAQIGDQYADLFLAAKNLSDAILLSDILRVNTEITKAPLSASMIKRYDEHHQDLTLLKALVRQQLPEKYKEIFFDQSKNGYAGYIDGGASQEEFYKFIKPILEKMDGTEELLVKLNREDLLRKQRTFDNGSIPHQIHLGELHAILRRQEDFYPFLKDNREKIEKILTFRIPYYVGPLARGNSRFAWMTRKSEETITPWNFEEVVDKGASAQSFIERMTNFDKNLPNEKVLPKHSLLYEYFTVYNELTKVKYVTEGMRKPAFLSGEQKKAIVDLLFKTNRKVTVKQLKEDYFKKIECFDSVEISGVEDRFNASLGTYHDLLKIIKDKDFLDNEENEDILEDIVLTLTLFEDREMIEERLKTYAHLFDDKVMKQLKRRRYTGWGRLSRKLINGIRDKQSGKTILDFLKSDGFANRNFMQLIHDDSLTFKEDIQKAQVSGQGDSLHEHIANLAGSPAIKKGILQTVKVVDELVKVMGRHKPENIVIEMARENQTTQKGQKNSRERMKRIEEGIKELGSQILKEHPVENTQLQNEKLYLYYLQNGRDMYVDQELDINRLSDYDVDHIVPQSFLKDDSIDNKVLTRSDKARGKSDNVPSEEVVKKMKNYWRQLLNAKLITQRKFDNLTKAERGGLSELDKAGFIKRQLVETRQITKHVAQILDSRMNTKYDENDKLIREVKVITLKSKLVSDFRKDFQFYKVREINNYHHAHDAYLNAVVGTALIKKYPKLESEFVYGDYKVYDVRKMIAKSEQEIGKATAKYFFYSNIMNFFKTEITLANGEIRKRPLIETNGETGEIVWDKGRDFATVRKVLSMPQVNIVKKTEVQTGGFSKESILPKRNSDKLIARKKDWDPKKYGGFDSPTVAYSVLVVAKVEKGKSKKLKSVKELLGITIMERSSFEKNPIDFLEAKGYKEVKKDLIIKLPKYSLFELENGRKRMLASAGELQKGNELALPSKYVNFLYLASHYEKLKGSPEDNEQKQLFVEQHKHYLDEIIEQISEFSKRVILADANLDKVLSAYNKHRDKPIREQAENIIHLFTLTNLGAPAAFKYFDTTIDRKRYTSTKEVLDATLIHQSITGLYETRIDLSQLGGDGGGGSGGGPAPGGTLNIEDEHRLHETSKEPDVSLGSTWLSDFPQAWAETGGMGLAVRQAPLIIPLKATSTPVSIKQYPMSQEARLGIKPHIQRLLDQGILVPCQSPWNTPLLPVKKPGTNDYRPVQDLREVNKRVEDIHPTVPNPYNLLSGLPPSHQWYTVLDLKDAFFCLRLHPTSQPLFAFEWRDPEMGISGQLTWTRLPQGFKNSPTLFNEALHRDLADFRIQHPDLILLQYVDDLLLAATSELDCQQGTRALLQTLGNLGYRASAKKAQICQKQVKYLGYLLKEGQRWLTEARKETVMGQPTPKTPRQLREFLGTAGFCRLWIPGFAEMAAPLYPLTKPGTLFNWGPDQQKAYQEIKQALLTAPALGLPDLTKPFELFVDEKQGYAKGVLTQKLGPWRRPVAYLSKKLDPVAAGWPPCLRMVAAIAVLTKDAGKLTMGQPLVILAPHAVEALVKQPPDRWLSNARMTHYQALLLDTDRVQFGPVVALNPATLLPLPEEGLQHNCLDILAEAHGTRPDLTDQPLPDADHTWYTDGSSLLQEGQRKAGAAVTTETEVIWAKALPAGTSAQRAELIALTQALKMAEGKKLNVYTDSRYAFATAHIHGEIYRRRGWLTSEGKEIKNKDEILALLKALFLPKRLSIIHCPGHQKGHSAEARGNRMADQAARKAAITETPDTSTLLAGKRTADGSEFEKRTADGSEFESPKKKAKVE

SEQ ID NO: 2767 - protein, 2096 aa, synthetic construct
MPAAKRVKLDGGDKKYSIGLDIGTNSVGWAVITDEYKVPSKKFKVLGNTDRHSIKKNLIGALLFDSGETAEATRLKRTARRRYTRRKNRICYLQEIFSNEMAKVDDSFFHRLEESFLVEEDKKHERHPIFGNIVDEVAYHEKYPTIYHLRKKLVDSTDKADLRLIYLALAHMIKFRGHFLIEGDLNPDNSDVDKLFIQLVQTYNQLFEENPINASGVDAKAILSARLSKSRRLENLIAQLPGEKKNGLFGNLIALSLGLTPNFKSNFDLAEDAKLQLSKDTYDDDLDNLLAQIGDQYADLFLAAKNLSDAILLSDILRVNTEITKAPLSASMIKRYDEHHQDLTLLKALVRQQLPEKYKEIFFDQSKNGYAGYIDGGASQEEFYKFIKPILEKMDGTEELLVKLNREDLLRKQRTFDNGSIPHQIHLGELHAILRRQEDFYPFLKDNREKIEKILTFRIPYYVGPLARGNSRFAWMTRKSEETITPWNFEEVVDKGASAQSFIERMTNFDKNLPNEKVLPKHSLLYEYFTVYNELTKVKYVTEGMRKPAFLSGEQKKAIVDLLFKTNRKVTVKQLKEDYFKKIECFDSVEISGVEDRFNASLGTYHDLLKIIKDKDFLDNEENEDILEDIVLTLTLFEDREMIEERLKTYAHLFDDKVMKQLKRRRYTGWGRLSRKLINGIRDKQSGKTILDFLKSDGFANRNFMQLIHDDSLTFKEDIQKAQVSGQGDSLHEHIANLAGSPAIKKGILQTVKVVDELVKVMGRHKPENIVIEMARENQTTQKGQKNSRERMKRIEEGIKELGSQILKEHPVENTQLQNEKLYLYYLQNGRDMYVDQELDINRLSDYDVDHIVPQSFLKDDSIDNKVLTRSDKARGKSDNVPSEEVVKKMKNYWRQLLNAKLITQRKFDNLTKAERGGLSELDKAGFIKRQLVETRQITKHVAQILDSRMNTKYDENDKLIREVKVITLKSKLVSDFRKDFQFYKVREINNYHHAHDAYLNAVVGTALIKKYPKLESEFVYGDYKVYDVRKMIAKSEQEIGKATAKYFFYSNIMNFFKTEITLANGEIRKRPLIETNGETGEIVWDKGRDFATVRKVLSMPQVNIVKKTEVQTGGFSKESILPKRNSDKLIARKKDWDPKKYGGFDSPTVAYSVLVVAKVEKGKSKKLKSVKELLGITIMERSSFEKNPIDFLEAKGYKEVKKDLIIKLPKYSLFELENGRKRMLASAGELQKGNELALPSKYVNFLYLASHYEKLKGSPEDNEQKQLFVEQHKHYLDEIIEQISEFSKRVILADANLDKVLSAYNKHRDKPIREQAENIIHLFTLTNLGAPAAFKYFDTTIDRKRYTSTKEVLDATLIHQSITGLYETRIDLSQLGGDGGEAAAKGGSGGGGGTLNIEDEHRLHETSKEPDVSLGSTWLSDFPQAWAETGGMGLAVRQAPLIIPLKATSTPVSIKQYPMSQEARLGIKPHIQRLLDQGILVPCQSPWNTPLLPVKKPGTNDYRPVQDLREVNKRVEDIHPTVPNPYNLLSGLPPSHQWYTVLDLKDAFFCLRLHPTSQPLFAFEWRDPEMGISGQLTWTRLPQGFKNSPTLFNEALHRDLADFRIQHPDLILLQYVDDLLLAATSELDCQQGTRALLQTLGNLGYRASAKKAQICQKQVKYLGYLLKEGQRWLTEARKETVMGQPTPKTPRQLREFLGTAGFCRLWIPGFAEMAAPLYPLTKPGTLFNWGPDQQKAYQEIKQALLTAPALGLPDLTKPFELFVDEKQGYAKGVLTQKLGPWRRPVAYLSKKLDPVAAGWPPCLRMVAAIAVLTKDAGKLTMGQPLVILAPHAVEALVKQPPDRWLSNARMTHYQALLLDTDRVQFGPVVALNPATLLPLPEEGLQHNCLDILAEAHGTRPDLTDQPLPDADHTWYTDGSSLLQEGQRKAGAAVTTETEVIWAKALPAGTSAQRAELIALTQALKMAEGKKLNVYTDSRYAFATAHIHGEIYRRRGWLTSEGKEIKNKDEILALLKALFLPKRLSIIHCPGHQKGHSAEARGNRMADQAARKAAITETPDTSTLLAGKRTADGSEFEKRTADGSEFESPKKKAKVE

SEQ ID NO: 2768 - protein, 2094 aa, synthetic construct
MPAAKRVKLDGGDKKYSIGLDIGTNSVGWAVITDEYKVPSKKFKVLGNTDRHSIKKNLIGALLFDSGETAEATRLKRTARRRYTRRKNRICYLQEIFSNEMAKVDDSFFHRLEESFLVEEDKKHERHPIFGNIVDEVAYHEKYPTIYHLRKKLVDSTDKADLRLIYLALAHMIKFRGHFLIEGDLNPDNSDVDKLFIQLVQTYNQLFEENPINASGVDAKAILSARLSKSRRLENLIAQLPGEKKNGLFGNLIALSLGLTPNFKSNFDLAEDAKLQLSKDTYDDDLDNLLAQIGDQYADLFLAAKNLSDAILLSDILRVNTEITKAPLSASMIKRYDEHHQDLTLLKALVRQQLPEKYKEIFFDQSKNGYAGYIDGGASQEEFYKFIKPILEKMDGTEELLVKLNREDLLRKQRTFDNGSIPHQIHLGELHAILRRQEDFYPFLKDNREKIEKILTFRIPYYVGPLARGNSRFAWMTRKSEETITPWNFEEVVDKGASAQSFIERMTNFDKNLPNEKVLPKHSLLYEYFTVYNELTKVKYVTEGMRKPAFLSGEQKKAIVDLLFKTNRKVTVKQLKEDYFKKIECFDSVEISGVEDRFNASLGTYHDLLKIIKDKDFLDNEENEDILEDIVLTLTLFEDREMIEERLKTYAHLFDDKVMKQLKRRRYTGWGRLSRKLINGIRDKQSGKTILDFLKSDGFANRNFMQLIHDDSLTFKEDIQKAQVSGQGDSLHEHIANLAGSPAIKKGILQTVKVVDELVKVMGRHKPENIVIEMARENQTTQKGQKNSRERMKRIEEGIKELGSQILKEHPVENTQLQNEKLYLYYLQNGRDMYVDQELDINRLSDYDVDHIVPQSFLKDDSIDNKVLTRSDKARGKSDNVPSEEVVKKMKNYWRQLLNAKLITQRKFDNLTKAERGGLSELDKAGFIKRQLVETRQITKHVAQILDSRMNTKYDENDKLIREVKVITLKSKLVSDFRKDFQFYKVREINNYHHAHDAYLNAVVGTALIKKYPKLESEFVYGDYKVYDVRKMIAKSEQEIGKATAKYFFYSNIMNFFKTEITLANGEIRKRPLIETNGETGEIVWDKGRDFATVRKVLSMPQVNIVKKTEVQTGGFSKESILPKRNSDKLIARKKDWDPKKYGGFDSPTVAYSVLVVAKVEKGKSKKLKSVKELLGITIMERSSFEKNPIDFLEAKGYKEVKKDLIIKLPKYSLFELENGRKRMLASAGELQKGNELALPSKYVNFLYLASHYEKLKGSPEDNEQKQLFVEQHKHYLDEIIEQISEFSKRVILADANLDKVLSAYNKHRDKPIREQAENIIHLFTLTNLGAPAAFKYFDTTIDRKRYTSTKEVLDATLIHQSITGLYETRIDLSQLGGDGGGSSGGSPAPGGTLNIEDEHRLHETSKEPDVSLGSTWLSDFPQAWAETGGMGLAVRQAPLIIPLKATSTPVSIKQYPMSQEARLGIKPHIQRLLDQGILVPCQSPWNTPLLPVKKPGTNDYRPVQDLREVNKRVEDIHPTVPNPYNLLSGLPPSHQWYTVLDLKDAFFCLRLHPTSQPLFAFEWRDPEMGISGQLTWTRLPQGFKNSPTLFNEALHRDLADFRIQHPDLILLQYVDDLLLAATSELDCQQGTRALLQTLGNLGYRASAKKAQICQKQVKYLGYLLKEGQRWLTEARKETVMGQPTPKTPRQLREFLGTAGFCRLWIPGFAEMAAPLYPLTKPGTLFNWGPDQQKAYQEIKQALLTAPALGLPDLTKPFELFVDEKQGYAKGVLTQKLGPWRRPVAYLSKKLDPVAAGWPPCLRMVAAIAVLTKDAGKLTMGQPLVILAPHAVEALVKQPPDRWLSNARMTHYQALLLDTDRVQFGPVVALNPATLLPLPEEGLQHNCLDILAEAHGTRPDLTDQPLPDADHTWYTDGSSLLQEGQRKAGAAVTTETEVIWAKALPAGTSAQRAELIALTQALKMAEGKKLNVYTDSRYAFATAHIHGEIYRRRGWLTSEGKEIKNKDEILALLKALFLPKRLSIIHCPGHQKGHSAEARGNRMADQAARKAAITETPDTSTLLAGKRTADGSEFEKRTADGSEFESPKKKAKVE

SEQ ID NO: 2769 - protein, 2094 aa, synthetic construct
MPAAKRVKLDGGDKKYSIGLDIGTNSVGWAVITDEYKVPSKKFKVLGNTDRHSIKKNLIGALLFDSGETAEATRLKRTARRRYTRRKNRICYLQEIFSNEMAKVDDSFFHRLEESFLVEEDKKHERHPIFGNIVDEVAYHEKYPTIYHLRKKLVDSTDKADLRLIYLALAHMIKFRGHFLIEGDLNPDNSDVDKLFIQLVQTYNQLFEENPINASGVDAKAILSARLSKSRRLENLIAQLPGEKKNGLFGNLIALSLGLTPNFKSNFDLAEDAKLQLSKDTYDDDLDNLLAQIGDQYADLFLAAKNLSDAILLSDILRVNTEITKAPLSASMIKRYDEHHQDLTLLKALVRQQLPEKYKEIFFDQSKNGYAGYIDGGASQEEFYKFIKPILEKMDGTEELLVKLNREDLLRKQRTFDNGSIPHQIHLGELHAILRRQEDFYPFLKDNREKIEKILTFRIPYYVGPLARGNSRFAWMTRKSEETITPWNFEEVVDKGASAQSFIERMTNFDKNLPNEKVLPKHSLLYEYFTVYNELTKVKYVTEGMRKPAFLSGEQKKAIVDLLFKTNRKVTVKQLKEDYFKKIECFDSVEISGVEDRFNASLGTYHDLLKIIKDKDFLDNEENEDILEDIVLTLTLFEDREMIEERLKTYAHLFDDKVMKQLKRRRYTGWGRLSRKLINGIRDKQSGKTILDFLKSDGFANRNFMQLIHDDSLTFKEDIQKAQVSGQGDSLHEHIANLAGSPAIKKGILQTVKVVDELVKVMGRHKPENIVIEMARENQTTQKGQKNSRERMKRIEEGIKELGSQILKEHPVENTQLQNEKLYLYYLQNGRDMYVDQELDINRLSDYDVDHIVPQSFLKDDSIDNKVLTRSDKARGKSDNVPSEEVVKKMKNYWRQLLNAKLITQRKFDNLTKAERGGLSELDKAGFIKRQLVETRQITKHVAQILDSRMNTKYDENDKLIREVKVITLKSKLVSDFRKDFQFYKVREINNYHHAHDAYLNAVVGTALIKKYPKLESEFVYGDYKVYDVRKMIAKSEQEIGKATAKYFFYSNIMNFFKTEITLANGEIRKRPLIETNGETGEIVWDKGRDFATVRKVLSMPQVNIVKKTEVQTGGFSKESILPKRNSDKLIARKKDWDPKKYGGFDSPTVAYSVLVVAKVEKGKSKKLKSVKELLGITIMERSSFEKNPIDFLEAKGYKEVKKDLIIKLPKYSLFELENGRKRMLASAGELQKGNELALPSKYVNFLYLASHYEKLKGSPEDNEQKQLFVEQHKHYLDEIIEQISEFSKRVILADANLDKVLSAYNKHRDKPIREQAENIIHLFTLTNLGAPAAFKYFDTTIDRKRYTSTKEVLDATLIHQSITGLYETRIDLSQLGGDGGGGGGGSPAPGGTLNIEDEHRLHETSKEPDVSLGSTWLSDFPQAWAETGGMGLAVRQAPLIIPLKATSTPVSIKQYPMSQEARLGIKPHIQRLLDQGILVPCQSPWNTPLLPVKKPGTNDYRPVQDLREVNKRVEDIHPTVPNPYNLLSGLPPSHQWYTVLDLKDAFFCLRLHPTSQPLFAFEWRDPEMGISGQLTWTRLPQGFKNSPTLFNEALHRDLADFRIQHPDLILLQYVDDLLLAATSELDCQQGTRALLQTLGNLGYRASAKKAQICQKQVKYLGYLLKEGQRWLTEARKETVMGQPTPKTPRQLREFLGTAGFCRLWIPGFAEMAAPLYPLTKPGTLFNWGPDQQKAYQEIKQALLTAPALGLPDLTKPFELFVDEKQGYAKGVLTQKLGPWRRPVAYLSKKLDPVAAGWPPCLRMVAAIAVLTKDAGKLTMGQPLVILAPHAVEALVKQPPDRWLSNARMTHYQALLLDTDRVQFGPVVALNPATLLPLPEEGLQHNCLDILAEAHGTRPDLTDQPLPDADHTWYTDGSSLLQEGQRKAGAAVTTETEVIWAKALPAGTSAQRAELIALTQALKMAEGKKLNVYTDSRYAFATAHIHGEIYRRRGWLTSEGKEIKNKDEILALLKALFLPKRLSIIHCPGHQKGHSAEARGNRMADQAARKAAITETPDTSTLLAGKRTADGSEFEKRTADGSEFESPKKKAKVE

SEQ ID NO: 2770 - protein, 2094 aa, synthetic construct
MPAAKRVKLDGGDKKYSIGLDIGTNSVGWAVITDEYKVPSKKFKVLGNTDRHSIKKNLIGALLFDSGETAEATRLKRTARRRYTRRKNRICYLQEIFSNEMAKVDDSFFHRLEESFLVEEDKKHERHPIFGNIVDEVAYHEKYPTIYHLRKKLVDSTDKADLRLIYLALAHMIKFRGHFLIEGDLNPDNSDVDKLFIQLVQTYNQLFEENPINASGVDAKAILSARLSKSRRLENLIAQLPGEKKNGLFGNLIALSLGLTPNFKSNFDLAEDAKLQLSKDTYDDDLDNLLAQIGDQYADLFLAAKNLSDAILLSDILRVNTEITKAPLSASMIKRYDEHHQDLTLLKALVRQQLPEKYKEIFFDQSKNGYAGYIDGGASQEEFYKFIKPILEKMDGTEELLVKLNREDLLRKQRTFDNGSIPHQIHLGELHAILRRQEDFYPFLKDNREKIEKILTFRIPYYVGPLARGNSRFAWMTRKSEETITPWNFEEVVDKGASAQSFIERMTNFDKNLPNEKVLPKHSLLYEYFTVYNELTKVKYVTEGMRKPAFLSGEQKKAIVDLLFKTNRKVTVKQLKEDYFKKIECFDSVEISGVEDRFNASLGTYHDLLKIIKDKDFLDNEENEDILEDIVLTLTLFEDREMIEERLKTYAHLFDDKVMKQLKRRRYTGWGRLSRKLINGIRDKQSGKTILDFLKSDGFANRNFMQLIHDDSLTFKEDIQKAQVSGQGDSLHEHIANLAGSPAIKKGILQTVKVVDELVKVMGRHKPENIVIEMARENQTTQKGQKNSRERMKRIEEGIKELGSQILKEHPVENTQLQNEKLYLYYLQNGRDMYVDQELDINRLSDYDVDHIVPQSFLKDDSIDNKVLTRSDKARGKSDNVPSEEVVKKMKNYWRQLLNAKLITQRKFDNLTKAERGGLSELDKAGFIKRQLVETRQITKHVAQILDSRMNTKYDENDKLIREVKVITLKSKLVSDFRKDFQFYKVREINNYHHAHDAYLNAVVGTALIKKYPKLESEFVYGDYKVYDVRKMIAKSEQEIGKATAKYFFYSNIMNFFKTEITLANGEIRKRPLIETNGETGEIVWDKGRDFATVRKVLSMPQVNIVKKTEVQTGGFSKESILPKRNSDKLIARKKDWDPKKYGGFDSPTVAYSVLVVAKVEKGKSKKLKSVKELLGITIMERSSFEKNPIDFLEAKGYKEVKKDLIIKLPKYSLFELENGRKRMLASAGELQKGNELALPSKYVNFLYLASHYEKLKGSPEDNEQKQLFVEQHKHYLDEIIEQISEFSKRVILADANLDKVLSAYNKHRDKPIREQAENIIHLFTLTNLGAPAAFKYFDTTIDRKRYTSTKEVLDATLIHQSITGLYETRIDLSQLGGDGGGGGGSSPAPGGTLNIEDEHRLHETSKEPDVSLGSTWLSDFPQAWAETGGMGLAVRQAPLIIPLKATSTPVSIKQYPMSQEARLGIKPHIQRLLDQGILVPCQSPWNTPLLPVKKPGTNDYRPVQDLREVNKRVEDIHPTVPNPYNLLSGLPPSHQWYTVLDLKDAFFCLRLHPTSQPLFAFEWRDPEMGISGQLTWTRLPQGFKNSPTLFNEALHRDLADFRIQHPDLILLQYVDDLLLAATSELDCQQGTRALLQTLGNLGYRASAKKAQICQKQVKYLGYLLKEGQRWLTEARKETVMGQPTPKTPRQLREFLGTAGFCRLWIPGFAEMAAPLYPLTKPGTLFNWGPDQQKAYQEIKQALLTAPALGLPDLTKPFELFVDEKQGYAKGVLTQKLGPWRRPVAYLSKKLDPVAAGWPPCLRMVAAIAVLTKDAGKLTMGQPLVILAPHAVEALVKQPPDRWLSNARMTHYQALLLDTDRVQFGPVVALNPATLLPLPEEGLQHNCLDILAEAHGTRPDLTDQPLPDADHTWYTDGSSLLQEGQRKAGAAVTTETEVIWAKALPAGTSAQRAELIALTQALKMAEGKKLNVYTDSRYAFATAHIHGEIYRRRGWLTSEGKEIKNKDEILALLKALFLPKRLSIIHCPGHQKGHSAEARGNRMADQAARKAAITETPDTSTLLAGKRTADGSEFEKRTADGSEFESPKKKAKVE

SEQ ID NO: 2771 - protein, 2105 aa, synthetic construct
MPAAKRVKLDGGDKKYSIGLDIGTNSVGWAVITDEYKVPSKKFKVLGNTDRHSIKKNLIGALLFDSGETAEATRLKRTARRRYTRRKNRICYLQEIFSNEMAKVDDSFFHRLEESFLVEEDKKHERHPIFGNIVDEVAYHEKYPTIYHLRKKLVDSTDKADLRLIYLALAHMIKFRGHFLIEGDLNPDNSDVDKLFIQLVQTYNQLFEENPINASGVDAKAILSARLSKSRRLENLIAQLPGEKKNGLFGNLIALSLGLTPNFKSNFDLAEDAKLQLSKDTYDDDLDNLLAQIGDQYADLFLAAKNLSDAILLSDILRVNTEITKAPLSASMIKRYDEHHQDLTLLKALVRQQLPEKYKEIFFDQSKNGYAGYIDGGASQEEFYKFIKPILEKMDGTEELLVKLNREDLLRKQRTFDNGSIPHQIHLGELHAILRRQEDFYPFLKDNREKIEKILTFRIPYYVGPLARGNSRFAWMTRKSEETITPWNFEEVVDKGASAQSFIERMTNFDKNLPNEKVLPKHSLLYEYFTVYNELTKVKYVTEGMRKPAFLSGEQKKAIVDLLFKTNRKVTVKQLKEDYFKKIECFDSVEISGVEDRFNASLGTYHDLLKIIKDKDFLDNEENEDILEDIVLTLTLFEDREMIEERLKTYAHLFDDKVMKQLKRRRYTGWGRLSRKLINGIRDKQSGKTILDFLKSDGFANRNFMQLIHDDSLTFKEDIQKAQVSGQGDSLHEHIANLAGSPAIKKGILQTVKVVDELVKVMGRHKPENIVIEMARENQTTQKGQKNSRERMKRIEEGIKELGSQILKEHPVENTQLQNEKLYLYYLQNGRDMYVDQELDINRLSDYDVDHIVPQSFLKDDSIDNKVLTRSDKARGKSDNVPSEEVVKKMKNYWRQLLNAKLITQRKFDNLTKAERGGLSELDKAGFIKRQLVETRQITKHVAQILDSRMNTKYDENDKLIREVKVITLKSKLVSDFRKDFQFYKVREINNYHHAHDAYLNAVVGTALIKKYPKLESEFVYGDYKVYDVRKMIAKSEQEIGKATAKYFFYSNIMNFFKTEITLANGEIRKRPLIETNGETGEIVWDKGRDFATVRKVLSMPQVNIVKKTEVQTGGFSKESILPKRNSDKLIARKKDWDPKKYGGFDSPTVAYSVLVVAKVEKGKSKKLKSVKELLGITIMERSSFEKNPIDFLEAKGYKEVKKDLIIKLPKYSLFELENGRKRMLASAGELQKGNELALPSKYVNFLYLASHYEKLKGSPEDNEQKQLFVEQHKHYLDEIIEQISEFSKRVILADANLDKVLSAYNKHRDKPIREQAENIIHLFTLTNLGAPAAFKYFDTTIDRKRYTSTKEVLDATLIHQSITGLYETRIDLSQLGGDGGGGGGSGGGGSGGGGSGGGGSGGTLNIEDEHRLHETSKEPDVSLGSTWLSDFPQAWAETGGMGLAVRQAPLIIPLKATSTPVSIKQYPMSQEARLGIKPHIQRLLDQGILVPCQSPWNTPLLPVKKPGTNDYRPVQDLREVNKRVEDIHPTVPNPYNLLSGLPPSHQWYTVLDLKDAFFCLRLHPTSQPLFAFEWRDPEMGISGQLTWTRLPQGFKNSPTLFNEALHRDLADFRIQHPDLILLQYVDDLLLAATSELDCQQGTRALLQTLGNLGYRASAKKAQICQKQVKYLGYLLKEGQRWLTEARKETVMGQPTPKTPRQLREFLGTAGFCRLWIPGFAEMAAPLYPLTKPGTLFNWGPDQQKAYQEIKQALLTAPALGLPDLTKPFELFVDEKQGYAKGVLTQKLGPWRRPVAYLSKKLDPVAAGWPPCLRMVAAIAVLTKDAGKLTMGQPLVILAPHAVEALVKQPPDRWLSNARMTHYQALLLDTDRVQFGPVVALNPATLLPLPEEGLQHNCLDILAEAHGTRPDLTDQPLPDADHTWYTDGSSLLQEGQRKAGAAVTTETEVIWAKALPAGTSAQRAELIALTQALKMAEGKKLNVYTDSRYAFATAHIHGEIYRRRGWLTSEGKEIKNKDEILALLKALFLPKRLSIIHCPGHQKGHSAEARGNRMADQAARKAAITETPDTSTLLAGKRTADGSEFEKRTADGSEFESPKKKAKVE

SEQ ID NO: 2772 - protein, 2100 aa, synthetic construct
MPAAKRVKLDGGDKKYSIGLDIGTNSVGWAVITDEYKVPSKKFKVLGNTDRHSIKKNLIGALLFDSGETAEATRLKRTARRRYTRRKNRICYLQEIFSNEMAKVDDSFFHRLEESFLVEEDKKHERHPIFGNIVDEVAYHEKYPTIYHLRKKLVDSTDKADLRLIYLALAHMIKFRGHFLIEGDLNPDNSDVDKLFIQLVQTYNQLFEENPINASGVDAKAILSARLSKSRRLENLIAQLPGEKKNGLFGNLIALSLGLTPNFKSNFDLAEDAKLQLSKDTYDDDLDNLLAQIGDQYADLFLAAKNLSDAILLSDILRVNTEITKAPLSASMIKRYDEHHQDLTLLKALVRQQLPEKYKEIFFDQSKNGYAGYIDGGASQEEFYKFIKPILEKMDGTEELLVKLNREDLLRKQRTFDNGSIPHQIHLGELHAILRRQEDFYPFLKDNREKIEKILTFRIPYYVGPLARGNSRFAWMTRKSEETITPWNFEEVVDKGASAQSFIERMTNFDKNLPNEKVLPKHSLLYEYFTVYNELTKVKYVTEGMRKPAFLSGEQKKAIVDLLFKTNRKVTVKQLKEDYFKKIECFDSVEISGVEDRFNASLGTYHDLLKIIKDKDFLDNEENEDILEDIVLTLTLFEDREMIEERLKTYAHLFDDKVMKQLKRRRYTGWGRLSRKLINGIRDKQSGKTILDFLKSDGFANRNFMQLIHDDSLTFKEDIQKAQVSGQGDSLHEHIANLAGSPAIKKGILQTVKVVDELVKVMGRHKPENIVIEMARENQTTQKGQKNSRERMKRIEEGIKELGSQILKEHPVENTQLQNEKLYLYYLQNGRDMYVDQELDINRLSDYDVDHIVPQSFLKDDSIDNKVLTRSDKARGKSDNVPSEEVVKKMKNYWRQLLNAKLITQRKFDNLTKAERGGLSELDKAGFIKRQLVETRQITKHVAQILDSRMNTKYDENDKLIREVKVITLKSKLVSDFRKDFQFYKVREINNYHHAHDAYLNAVVGTALIKKYPKLESEFVYGDYKVYDVRKMIAKSEQEIGKATAKYFFYSNIMNFFKTEITLANGEIRKRPLIETNGETGEIVWDKGRDFATVRKVLSMPQVNIVKKTEVQTGGFSKESILPKRNSDKLIARKKDWDPKKYGGFDSPTVAYSVLVVAKVEKGKSKKLKSVKELLGITIMERSSFEKNPIDFLEAKGYKEVKKDLIIKLPKYSLFELENGRKRMLASAGELQKGNELALPSKYVNFLYLASHYEKLKGSPEDNEQKQLFVEQHKHYLDEIIEQISEFSKRVILADANLDKVLSAYNKHRDKPIREQAENIIHLFTLTNLGAPAAFKYFDTTIDRKRYTSTKEVLDATLIHQSITGLYETRIDLSQLGGDGGEAAAKEAAAKEAAAKGGTLNIEDEHRLHETSKEPDVSLGSTWLSDFPQAWAETGGMGLAVRQAPLIIPLKATSTPVSIKQYPMSQEARLGIKPHIQRLLDQGILVPCQSPWNTPLLPVKKPGTNDYRPVQDLREVNKRVEDIHPTVPNPYNLLSGLPPSHQWYTVLDLKDAFFCLRLHPTSQPLFAFEWRDPEMGISGQLTWTRLPQGFKNSPTLFNEALHRDLADFRIQHPDLILLQYVDDLLLAATSELDCQQGTRALLQTLGNLGYRASAKKAQICQKQVKYLGYLLKEGQRWLTEARKETVMGQPTPKTPRQLREFLGTAGFCRLWIPGFAEMAAPLYPLTKPGTLFNWGPDQQKAYQEIKQALLTAPALGLPDLTKPFELFVDEKQGYAKGVLTQKLGPWRRPVAYLSKKLDPVAAGWPPCLRMVAAIAVLTKDAGKLTMGQPLVILAPHAVEALVKQPPDRWLSNARMTHYQALLLDTDRVQFGPVVALNPATLLPLPEEGLQHNCLDILAEAHGTRPDLTDQPLPDADHTWYTDGSSLLQEGQRKAGAAVTTETEVIWAKALPAGTSAQRAELIALTQALKMAEGKKLNVYTDSRYAFATAHIHGEIYRRRGWLTSEGKEIKNKDEILALLKALFLPKRLSIIHCPGHQKGHSAEARGNRMADQAARKAAITETPDTSTLLAGKRTADGSEFEKRTADGSEFESPKKKAKVE

SEQ ID NO: 2773 - protein, 2094 aa, synthetic construct
MPAAKRVKLDGGDKKYSIGLDIGTNSVGWAVITDEYKVPSKKFKVLGNTDRHSIKKNLIGALLFDSGETAEATRLKRTARRRYTRRKNRICYLQEIFSNEMAKVDDSFFHRLEESFLVEEDKKHERHPIFGNIVDEVAYHEKYPTIYHLRKKLVDSTDKADLRLIYLALAHMIKFRGHFLIEGDLNPDNSDVDKLFIQLVQTYNQLFEENPINASGVDAKAILSARLSKSRRLENLIAQLPGEKKNGLFGNLIALSLGLTPNFKSNFDLAEDAKLQLSKDTYDDDLDNLLAQIGDQYADLFLAAKNLSDAILLSDILRVNTEITKAPLSASMIKRYDEHHQDLTLLKALVRQQLPEKYKEIFFDQSKNGYAGYIDGGASQEEFYKFIKPILEKMDGTEELLVKLNREDLLRKQRTFDNGSIPHQIHLGELHAILRRQEDFYPFLKDNREKIEKILTFRIPYYVGPLARGNSRFAWMTRKSEETITPWNFEEVVDKGASAQSFIERMTNFDKNLPNEKVLPKHSLLYEYFTVYNELTKVKYVTEGMRKPAFLSGEQKKAIVDLLFKTNRKVTVKQLKEDYFKKIECFDSVEISGVEDRFNASLGTYHDLLKIIKDKDFLDNEENEDILEDIVLTLTLFEDREMIEERLKTYAHLFDDKVMKQLKRRRYTGWGRLSRKLINGIRDKQSGKTILDFLKSDGFANRNFMQLIHDDSLTFKEDIQKAQVSGQGDSLHEHIANLAGSPAIKKGILQTVKVVDELVKVMGRHKPENIVIEMARENQTTQKGQKNSRERMKRIEEGIKELGSQILKEHPVENTQLQNEKLYLYYLQNGRDMYVDQELDINRLSDYDVDHIVPQSFLKDDSIDNKVLTRSDKARGKSDNVPSEEVVKKMKNYWRQLLNAKLITQRKFDNLTKAERGGLSELDKAGFIKRQLVETRQITKHVAQILDSRMNTKYDENDKLIREVKVITLKSKLVSDFRKDFQFYKVREINNYHHAHDAYLNAVVGTALIKKYPKLESEFVYGDYKVYDVRKMIAKSEQEIGKATAKYFFYSNIMNFFKTEITLANGEIRKRPLIETNGETGEIVWDKGRDFATVRKVLSMPQVNIVKKTEVQTGGFSKESILPKRNSDKLIARKKDWDPKKYGGFDSPTVAYSVLVVAKVEKGKSKKLKSVKELLGITIMERSSFEKNPIDFLEAKGYKEVKKDLIIKLPKYSLFELENGRKRMLASAGELQKGNELALPSKYVNFLYLASHYEKLKGSPEDNEQKQLFVEQHKHYLDEIIEQISEFSKRVILADANLDKVLSAYNKHRDKPIREQAENIIHLFTLTNLGAPAAFKYFDTTIDRKRYTSTKEVLDATLIHQSITGLYETRIDLSQLGGDGGGGGPAPGSSGGTLNIEDEHRLHETSKEPDVSLGSTWLSDFPQAWAETGGMGLAVRQAPLIIPLKATSTPVSIKQYPMSQEARLGIKPHIQRLLDQGILVPCQSPWNTPLLPVKKPGTNDYRPVQDLREVNKRVEDIHPTVPNPYNLLSGLPPSHQWYTVLDLKDAFFCLRLHPTSQPLFAFEWRDPEMGISGQLTWTRLPQGFKNSPTLFNEALHRDLADFRIQHPDLILLQYVDDLLLAATSELDCQQGTRALLQTLGNLGYRASAKKAQICQKQVKYLGYLLKEGQRWLTEARKETVMGQPTPKTPRQLREFLGTAGFCRLWIPGFAEMAAPLYPLTKPGTLFNWGPDQQKAYQEIKQALLTAPALGLPDLTKPFELFVDEKQGYAKGVLTQKLGPWRRPVAYLSKKLDPVAAGWPPCLRMVAAIAVLTKDAGKLTMGQPLVILAPHAVEALVKQPPDRWLSNARMTHYQALLLDTDRVQFGPVVALNPATLLPLPEEGLQHNCLDILAEAHGTRPDLTDQPLPDADHTWYTDGSSLLQEGQRKAGAAVTTETEVIWAKALPAGTSAQRAELIALTQALKMAEGKKLNVYTDSRYAFATAHIHGEIYRRRGWLTSEGKEIKNKDEILALLKALFLPKRLSIIHCPGHQKGHSAEARGNRMADQAARKAAITETPDTSTLLAGKRTADGSEFEKRTADGSEFESPKKKAKVE

SEQ ID NO: 2774 - protein, 2093 aa, synthetic construct
MPAAKRVKLDGGDKKYSIGLDIGTNSVGWAVITDEYKVPSKKFKVLGNTDRHSIKKNLIGALLFDSGETAEATRLKRTARRRYTRRKNRICYLQEIFSNEMAKVDDSFFHRLEESFLVEEDKKHERHPIFGNIVDEVAYHEKYPTIYHLRKKLVDSTDKADLRLIYLALAHMIKFRGHFLIEGDLNPDNSDVDKLFIQLVQTYNQLFEENPINASGVDAKAILSARLSKSRRLENLIAQLPGEKKNGLFGNLIALSLGLTPNFKSNFDLAEDAKLQLSKDTYDDDLDNLLAQIGDQYADLFLAAKNLSDAILLSDILRVNTEITKAPLSASMIKRYDEHHQDLTLLKALVRQQLPEKYKEIFFDQSKNGYAGYIDGGASQEEFYKFIKPILEKMDGTEELLVKLNREDLLRKQRTFDNGSIPHQIHLGELHAILRRQEDFYPFLKDNREKIEKILTFRIPYYVGPLARGNSRFAWMTRKSEETITPWNFEEVVDKGASAQSFIERMTNFDKNLPNEKVLPKHSLLYEYFTVYNELTKVKYVTEGMRKPAFLSGEQKKAIVDLLFKTNRKVTVKQLKEDYFKKIECFDSVEISGVEDRFNASLGTYHDLLKIIKDKDFLDNEENEDILEDIVLTLTLFEDREMIEERLKTYAHLFDDKVMKQLKRRRYTGWGRLSRKLINGIRDKQSGKTILDFLKSDGFANRNFMQLIHDDSLTFKEDIQKAQVSGQGDSLHEHIANLAGSPAIKKGILQTVKVVDELVKVMGRHKPENIVIEMARENQTTQKGQKNSRERMKRIEEGIKELGSQILKEHPVENTQLQNEKLYLYYLQNGRDMYVDQELDINRLSDYDVDHIVPQSFLKDDSIDNKVLTRSDKARGKSDNVPSEEVVKKMKNYWRQLLNAKLITQRKFDNLTKAERGGLSELDKAGFIKRQLVETRQITKHVAQILDSRMNTKYDENDKLIREVKVITLKSKLVSDFRKDFQFYKVREINNYHHAHDAYLNAVVGTALIKKYPKLESEFVYGDYKVYDVRKMIAKSEQEIGKATAKYFFYSNIMNFFKTEITLANGEIRKRPLIETNGETGEIVWDKGRDFATVRKVLSMPQVNIVKKTEVQTGGFSKESILPKRNSDKLIARKKDWDPKKYGGFDSPTVAYSVLVVAKVEKGKSKKLKSVKELLGITIMERSSFEKNPIDFLEAKGYKEVKKDLIIKLPKYSLFELENGRKRMLASAGELQKGNELALPSKYVNFLYLASHYEKLKGSPEDNEQKQLFVEQHKHYLDEIIEQISEFSKRVILADANLDKVLSAYNKHRDKPIREQAENIIHLFTLTNLGAPAAFKYFDTTIDRKRYTSTKEVLDATLIHQSITGLYETRIDLSQLGGDGGGGSEAAAKGGTLNIEDEHRLHETSKEPDVSLGSTWLSDFPQAWAETGGMGLAVRQAPLIIPLKATSTPVSIKQYPMSQEARLGIKPHIQRLLDQGILVPCQSPWNTPLLPVKKPGTNDYRPVQDLREVNKRVEDIHPTVPNPYNLLSGLPPSHQWYTVLDLKDAFFCLRLHPTSQPLFAFEWRDPEMGISGQLTWTRLPQGFKNSPTLFNEALHRDLADFRIQHPDLILLQYVDDLLLAATSELDCQQGTRALLQTLGNLGYRASAKKAQICQKQVKYLGYLLKEGQRWLTEARKETVMGQPTPKTPRQLREFLGTAGFCRLWIPGFAEMAAPLYPLTKPGTLFNWGPDQQKAYQEIKQALLTAPALGLPDLTKPFELFVDEKQGYAKGVLTQKLGPWRRPVAYLSKKLDPVAAGWPPCLRMVAAIAVLTKDAGKLTMGQPLVILAPHAVEALVKQPPDRWLSNARMTHYQALLLDTDRVQFGPVVALNPATLLPLPEEGLQHNCLDILAEAHGTRPDLTDQPLPDADHTWYTDGSSLLQEGQRKAGAAVTTETEVIWAKALPAGTSAQRAELIALTQALKMAEGKKLNVYTDSRYAFATAHIHGEIYRRRGWLTSEGKEIKNKDEILALLKALFLPKRLSIIHCPGHQKGHSAEARGNRMADQAARKAAITETPDTSTLLAGKRTADGSEFEKRTADGSEFESPKKKAKVE

SEQ ID NO: 2775 - protein, 2096 aa, synthetic construct
MPAAKRVKLDGGDKKYSIGLDIGTNSVGWAVITDEYKVPSKKFKVLGNTDRHSIKKNLIGALLFDSGETAEATRLKRTARRRYTRRKNRICYLQEIFSNEMAKVDDSFFHRLEESFLVEEDKKHERHPIFGNIVDEVAYHEKYPTIYHLRKKLVDSTDKADLRLIYLALAHMIKFRGHFLIEGDLNPDNSDVDKLFIQLVQTYNQLFEENPINASGVDAKAILSARLSKSRRLENLIAQLPGEKKNGLFGNLIALSLGLTPNFKSNFDLAEDAKLQLSKDTYDDDLDNLLAQIGDQYADLFLAAKNLSDAILLSDILRVNTEITKAPLSASMIKRYDEHHQDLTLLKALVRQQLPEKYKEIFFDQSKNGYAGYIDGGASQEEFYKFIKPILEKMDGTEELLVKLNREDLLRKQRTFDNGSIPHQIHLGELHAILRRQEDFYPFLKDNREKIEKILTFRIPYYVGPLARGNSRFAWMTRKSEETITPWNFEEVVDKGASAQSFIERMTNFDKNLPNEKVLPKHSLLYEYFTVYNELTKVKYVTEGMRKPAFLSGEQKKAIVDLLFKTNRKVTVKQLKEDYFKKIECFDSVEISGVEDRFNASLGTYHDLLKIIKDKDFLDNEENEDILEDIVLTLTLFEDREMIEERLKTYAHLFDDKVMKQLKRRRYTGWGRLSRKLINGIRDKQSGKTILDFLKSDGFANRNFMQLIHDDSLTFKEDIQKAQVSGQGDSLHEHIANLAGSPAIKKGILQTVKVVDELVKVMGRHKPENIVIEMARENQTTQKGQKNSRERMKRIEEGIKELGSQILKEHPVENTQLQNEKLYLYYLQNGRDMYVDQELDINRLSDYDVDHIVPQSFLKDDSIDNKVLTRSDKARGKSDNVPSEEVVKKMKNYWRQLLNAKLITQRKFDNLTKAERGGLSELDKAGFIKRQLVETRQITKHVAQILDSRMNTKYDENDKLIREVKVITLKSKLVSDFRKDFQFYKVREINNYHHAHDAYLNAVVGTALIKKYPKLESEFVYGDYKVYDVRKMIAKSEQEIGKATAKYFFYSNIMNFFKTEITLANGEIRKRPLIETNGETGEIVWDKGRDFATVRKVLSMPQVNIVKKTEVQTGGFSKESILPKRNSDKLIARKKDWDPKKYGGFDSPTVAYSVLVVAKVEKGKSKKLKSVKELLGITIMERSSFEKNPIDFLEAKGYKEVKKDLIIKLPKYSLFELENGRKRMLASAGELQKGNELALPSKYVNFLYLASHYEKLKGSPEDNEQKQLFVEQHKHYLDEIIEQISEFSKRVILADANLDKVLSAYNKHRDKPIREQAENIIHLFTLTNLGAPAAFKYFDTTIDRKRYTSTKEVLDATLIHQSITGLYETRIDLSQLGGDGGGSSEAAAKPAPGGTLNIEDEHRLHETSKEPDVSLGSTWLSDFPQAWAETGGMGLAVRQAPLIIPLKATSTPVSIKQYPMSQEARLGIKPHIQRLLDQGILVPCQSPWNTPLLPVKKPGTNDYRPVQDLREVNKRVEDIHPTVPNPYNLLSGLPPSHQWYTVLDLKDAFFCLRLHPTSQPLFAFEWRDPEMGISGQLTWTRLPQGFKNSPTLFNEALHRDLADFRIQHPDLILLQYVDDLLLAATSELDCQQGTRALLQTLGNLGYRASAKKAQICQKQVKYLGYLLKEGQRWLTEARKETVMGQPTPKTPRQLREFLGTAGFCRLWIPGFAEMAAPLYPLTKPGTLFNWGPDQQKAYQEIKQALLTAPALGLPDLTKPFELFVDEKQGYAKGVLTQKLGPWRRPVAYLSKKLDPVAAGWPPCLRMVAAIAVLTKDAGKLTMGQPLVILAPHAVEALVKQPPDRWLSNARMTHYQALLLDTDRVQFGPVVALNPATLLPLPEEGLQHNCLDILAEAHGTRPDLTDQPLPDADHTWYTDGSSLLQEGQRKAGAAVTTETEVIWAKALPAGTSAQRAELIALTQALKMAEGKKLNVYTDSRYAFATAHIHGEIYRRRGWLTSEGKEIKNKDEILALLKALFLPKRLSIIHCPGHQKGHSAEARGNRMADQAARKAAITETPDTSTLLAGKRTADGSEFEKRTADGSEFESPKKKAKVE

SEQ ID NO: 2776 - protein, 2096 aa, synthetic construct
MPAAKRVKLDGGDKKYSIGLDIGTNSVGWAVITDEYKVPSKKFKVLGNTDRHSIKKNLIGALLFDSGETAEATRLKRTARRRYTRRKNRICYLQEIFSNEMAKVDDSFFHRLEESFLVEEDKKHERHPIFGNIVDEVAYHEKYPTIYHLRKKLVDSTDKADLRLIYLALAHMIKFRGHFLIEGDLNPDNSDVDKLFIQLVQTYNQLFEENPINASGVDAKAILSARLSKSRRLENLIAQLPGEKKNGLFGNLIALSLGLTPNFKSNFDLAEDAKLQLSKDTYDDDLDNLLAQIGDQYADLFLAAKNLSDAILLSDILRVNTEITKAPLSASMIKRYDEHHQDLTLLKALVRQQLPEKYKEIFFDQSKNGYAGYIDGGASQEEFYKFIKPILEKMDGTEELLVKLNREDLLRKQRTFDNGSIPHQIHLGELHAILRRQEDFYPFLKDNREKIEKILTFRIPYYVGPLARGNSRFAWMTRKSEETITPWNFEEVVDKGASAQSFIERMTNFDKNLPNEKVLPKHSLLYEYFTVYNELTKVKYVTEGMRKPAFLSGEQKKAIVDLLFKTNRKVTVKQLKEDYFKKIECFDSVEISGVEDRFNASLGTYHDLLKIIKDKDFLDNEENEDILEDIVLTLTLFEDREMIEERLKTYAHLFDDKVMKQLKRRRYTGWGRLSRKLINGIRDKQSGKTILDFLKSDGFANRNFMQLIHDDSLTFKEDIQKAQVSGQGDSLHEHIANLAGSPAIKKGILQTVKVVDELVKVMGRHKPENIVIEMARENQTTQKGQKNSRERMKRIEEGIKELGSQILKEHPVENTQLQNEKLYLYYLQNGRDMYVDQELDINRLSDYDVDHIVPQSFLKDDSIDNKVLTRSDKARGKSDNVPSEEVVKKMKNYWRQLLNAKLITQRKFDNLTKAERGGLSELDKAGFIKRQLVETRQITKHVAQILDSRMNTKYDENDKLIREVKVITLKSKLVSDFRKDFQFYKVREINNYHHAHDAYLNAVVGTALIKKYPKLESEFVYGDYKVYDVRKMIAKSEQEIGKATAKYFFYSNIMNFFKTEITLANGEIRKRPLIETNGETGEIVWDKGRDFATVRKVLSMPQVNIVKKTEVQTGGFSKESILPKRNSDKLIARKKDWDPKKYGGFDSPTVAYSVLVVAKVEKGKSKKLKSVKELLGITIMERSSFEKNPIDFLEAKGYKEVKKDLIIKLPKYSLFELENGRKRMLASAGELQKGNELALPSKYVNFLYLASHYEKLKGSPEDNEQKQLFVEQHKHYLDEIIEQISEFSKRVILADANLDKVLSAYNKHRDKPIREQAENIIHLFTLTNLGAPAAFKYFDTTIDRKRYTSTKEVLDATLIHQSITGLYETRIDLSQLGGDGGGGSPAPEAAAKGGTLNIEDEHRLHETSKEPDVSLGSTWLSDFPQAWAETGGMGLAVRQAPLIIPLKATSTPVSIKQYPMSQEARLGIKPHIQRLLDQGILVPCQSPWNTPLLPVKKPGTNDYRPVQDLREVNKRVEDIHPTVPNPYNLLSGLPPSHQWYTVLDLKDAFFCLRLHPTSQPLFAFEWRDPEMGISGQLTWTRLPQGFKNSPTLFNEALHRDLADFRIQHPDLILLQYVDDLLLAATSELDCQQGTRALLQTLGNLGYRASAKKAQICQKQVKYLGYLLKEGQRWLTEARKETVMGQPTPKTPRQLREFLGTAGFCRLWIPGFAEMAAPLYPLTKPGTLFNWGPDQQKAYQEIKQALLTAPALGLPDLTKPFELFVDEKQGYAKGVLTQKLGPWRRPVAYLSKKLDPVAAGWPPCLRMVAAIAVLTKDAGKLTMGQPLVILAPHAVEALVKQPPDRWLSNARMTHYQALLLDTDRVQFGPVVALNPATLLPLPEEGLQHNCLDILAEAHGTRPDLTDQPLPDADHTWYTDGSSLLQEGQRKAGAAVTTETEVIWAKALPAGTSAQRAELIALTQALKMAEGKKLNVYTDSRYAFATAHIHGEIYRRRGWLTSEGKEIKNKDEILALLKALFLPKRLSIIHCPGHQKGHSAEARGNRMADQAARKAAITETPDTSTLLAGKRTADGSEFEKRTADGSEFESPKKKAKVE

SEQ ID NO: 2777 - protein, 2096 aa, synthetic construct
MPAAKRVKLDGGDKKYSIGLDIGTNSVGWAVITDEYKVPSKKFKVLGNTDRHSIKKNLIGALLFDSGETAEATRLKRTARRRYTRRKNRICYLQEIFSNEMAKVDDSFFHRLEESFLVEEDKKHERHPIFGNIVDEVAYHEKYPTIYHLRKKLVDSTDKADLRLIYLALAHMIKFRGHFLIEGDLNPDNSDVDKLFIQLVQTYNQLFEENPINASGVDAKAILSARLSKSRRLENLIAQLPGEKKNGLFGNLIALSLGLTPNFKSNFDLAEDAKLQLSKDTYDDDLDNLLAQIGDQYADLFLAAKNLSDAILLSDILRVNTEITKAPLSASMIKRYDEHHQDLTLLKALVRQQLPEKYKEIFFDQSKNGYAGYIDGGASQEEFYKFIKPILEKMDGTEELLVKLNREDLLRKQRTFDNGSIPHQIHLGELHAILRRQEDFYPFLKDNREKIEKILTFRIPYYVGPLARGNSRFAWMTRKSEETITPWNFEEVVDKGASAQSFIERMTNFDKNLPNEKVLPKHSLLYEYFTVYNELTKVKYVTEGMRKPAFLSGEQKKAIVDLLFKTNRKVTVKQLKEDYFKKIECFDSVEISGVEDRFNASLGTYHDLLKIIKDKDFLDNEENEDILEDIVLTLTLFEDREMIEERLKTYAHLFDDKVMKQLKRRRYTGWGRLSRKLINGIRDKQSGKTILDFLKSDGFANRNFMQLIHDDSLTFKEDIQKAQVSGQGDSLHEHIANLAGSPAIKKGILQTVKVVDELVKVMGRHKPENIVIEMARENQTTQKGQKNSRERMKRIEEGIKELGSQILKEHPVENTQLQNEKLYLYYLQNGRDMYVDQELDINRLSDYDVDHIVPQSFLKDDSIDNKVLTRSDKARGKSDNVPSEEVVKKMKNYWRQLLNAKLITQRKFDNLTKAERGGLSELDKAGFIKRQLVETRQITKHVAQILDSRMNTKYDENDKLIREVKVITLKSKLVSDFRKDFQFYKVREINNYHHAHDAYLNAVVGTALIKKYPKLESEFVYGDYKVYDVRKMIAKSEQEIGKATAKYFFYSNIMNFFKTEITLANGEIRKRPLIETNGETGEIVWDKGRDFATVRKVLSMPQVNIVKKTEVQTGGFSKESILPKRNSDKLIARKKDWDPKKYGGFDSPTVAYSVLVVAKVEKGKSKKLKSVKELLGITIMERSSFEKNPIDFLEAKGYKEVKKDLIIKLPKYSLFELENGRKRMLASAGELQKGNELALPSKYVNFLYLASHYEKLKGSPEDNEQKQLFVEQHKHYLDEIIEQISEFSKRVILADANLDKVLSAYNKHRDKPIREQAENIIHLFTLTNLGAPAAFKYFDTTIDRKRYTSTKEVLDATLIHQSITGLYETRIDLSQLGGDGGGSSGGGEAAAKGGTLNIEDEHRLHETSKEPDVSLGSTWLSDFPQAWAETGGMGLAVRQAPLIIPLKATSTPVSIKQYPMSQEARLGIKPHIQRLLDQGILVPCQSPWNTPLLPVKKPGTNDYRPVQDLREVNKRVEDIHPTVPNPYNLLSGLPPSHQWYTVLDLKDAFFCLRLHPTSQPLFAFEWRDPEMGISGQLTWTRLPQGFKNSPTLFNEALHRDLADFRIQHPDLILLQYVDDLLLAATSELDCQQGTRALLQTLGNLGYRASAKKAQICQKQVKYLGYLLKEGQRWLTEARKETVMGQPTPKTPRQLREFLGTAGFCRLWIPGFAEMAAPLYPLTKPGTLFNWGPDQQKAYQEIKQALLTAPALGLPDLTKPFELFVDEKQGYAKGVLTQKLGPWRRPVAYLSKKLDPVAAGWPPCLRMVAAIAVLTKDAGKLTMGQPLVILAPHAVEALVKQPPDRWLSNARMTHYQALLLDTDRVQFGPVVALNPATLLPLPEEGLQHNCLDILAEAHGTRPDLTDQPLPDADHTWYTDGSSLLQEGQRKAGAAVTTETEVIWAKALPAGTSAQRAELIALTQALKMAEGKKLNVYTDSRYAFATAHIHGEIYRRRGWLTSEGKEIKNKDEILALLKALFLPKRLSIIHCPGHQKGHSAEARGNRMADQAARKAAITETPDTSTLLAGKRTADGSEFEKRTADGSEFESPKKKAKVE

SEQ ID NO: 2778 - protein, 2091 aa, synthetic construct
MPAAKRVKLDGGDKKYSIGLDIGTNSVGWAVITDEYKVPSKKFKVLGNTDRHSIKKNLIGALLFDSGETAEATRLKRTARRRYTRRKNRICYLQEIFSNEMAKVDDSFFHRLEESFLVEEDKKHERHPIFGNIVDEVAYHEKYPTIYHLRKKLVDSTDKADLRLIYLALAHMIKFRGHFLIEGDLNPDNSDVDKLFIQLVQTYNQLFEENPINASGVDAKAILSARLSKSRRLENLIAQLPGEKKNGLFGNLIALSLGLTPNFKSNFDLAEDAKLQLSKDTYDDDLDNLLAQIGDQYADLFLAAKNLSDAILLSDILRVNTEITKAPLSASMIKRYDEHHQDLTLLKALVRQQLPEKYKEIFFDQSKNGYAGYIDGGASQEEFYKFIKPILEKMDGTEELLVKLNREDLLRKQRTFDNGSIPHQIHLGELHAILRRQEDFYPFLKDNREKIEKILTFRIPYYVGPLARGNSRFAWMTRKSEETITPWNFEEVVDKGASAQSFIERMTNFDKNLPNEKVLPKHSLLYEYFTVYNELTKVKYVTEGMRKPAFLSGEQKKAIVDLLFKTNRKVTVKQLKEDYFKKIECFDSVEISGVEDRFNASLGTYHDLLKIIKDKDFLDNEENEDILEDIVLTLTLFEDREMIEERLKTYAHLFDDKVMKQLKRRRYTGWGRLSRKLINGIRDKQSGKTILDFLKSDGFANRNFMQLIHDDSLTFKEDIQKAQVSGQGDSLHEHIANLAGSPAIKKGILQTVKVVDELVKVMGRHKPENIVIEMARENQTTQKGQKNSRERMKRIEEGIKELGSQILKEHPVENTQLQNEKLYLYYLQNGRDMYVDQELDINRLSDYDVDHIVPQSFLKDDSIDNKVLTRSDKARGKSDNVPSEEVVKKMKNYWRQLLNAKLITQRKFDNLTKAERGGLSELDKAGFIKRQLVETRQITKHVAQILDSRMNTKYDENDKLIREVKVITLKSKLVSDFRKDFQFYKVREINNYHHAHDAYLNAVVGTALIKKYPKLESEFVYGDYKVYDVRKMIAKSEQEIGKATAKYFFYSNIMNFFKTEITLANGEIRKRPLIETNGETGEIVWDKGRDFATVRKVLSMPQVNIVKKTEVQTGGFSKESILPKRNSDKLIARKKDWDPKKYGGFDSPTVAYSVLVVAKVEKGKSKKLKSVKELLGITIMERSSFEKNPIDFLEAKGYKEVKKDLIIKLPKYSLFELENGRKRMLASAGELQKGNELALPSKYVNFLYLASHYEKLKGSPEDNEQKQLFVEQHKHYLDEIIEQISEFSKRVILADANLDKVLSAYNKHRDKPIREQAENIIHLFTLTNLGAPAAFKYFDTTIDRKRYTSTKEVLDATLIHQSITGLYETRIDLSQLGGDGGGSSGGSGGTLNIEDEHRLHETSKEPDVSLGSTWLSDFPQAWAETGGMGLAVRQAPLIIPLKATSTPVSIKQYPMSQEARLGIKPHIQRLLDQGILVPCQSPWNTPLLPVKKPGTNDYRPVQDLREVNKRVEDIHPTVPNPYNLLSGLPPSHQWYTVLDLKDAFFCLRLHPTSQPLFAFEWRDPEMGISGQLTWTRLPQGFKNSPTLFNEALHRDLADFRIQHPDLILLQYVDDLLLAATSELDCQQGTRALLQTLGNLGYRASAKKAQICQKQVKYLGYLLKEGQRWLTEARKETVMGQPTPKTPRQLREFLGTAGFCRLWIPGFAEMAAPLYPLTKPGTLFNWGPDQQKAYQEIKQALLTAPALGLPDLTKPFELFVDEKQGYAKGVLTQKLGPWRRPVAYLSKKLDPVAAGWPPCLRMVAAIAVLTKDAGKLTMGQPLVILAPHAVEALVKQPPDRWLSNARMTHYQALLLDTDRVQFGPVVALNPATLLPLPEEGLQHNCLDILAEAHGTRPDLTDQPLPDADHTWYTDGSSLLQEGQRKAGAAVTTETEVIWAKALPAGTSAQRAELIALTQALKMAEGKKLNVYTDSRYAFATAHIHGEIYRRRGWLTSEGKEIKNKDEILALLKALFLPKRLSIIHCPGHQKGHSAEARGNRMADQAARKAAITETPDTSTLLAGKRTADGSEFEKRTADGSEFESPKKKAKVE

SEQ ID NO: 2779 - protein, 2091 aa, synthetic construct
MPAAKRVKLDGGDKKYSIGLDIGTNSVGWAVITDEYKVPSKKFKVLGNTDRHSIKKNLIGALLFDSGETAEATRLKRTARRRYTRRKNRICYLQEIFSNEMAKVDDSFFHRLEESFLVEEDKKHERHPIFGNIVDEVAYHEKYPTIYHLRKKLVDSTDKADLRLIYLALAHMIKFRGHFLIEGDLNPDNSDVDKLFIQLVQTYNQLFEENPINASGVDAKAILSARLSKSRRLENLIAQLPGEKKNGLFGNLIALSLGLTPNFKSNFDLAEDAKLQLSKDTYDDDLDNLLAQIGDQYADLFLAAKNLSDAILLSDILRVNTEITKAPLSASMIKRYDEHHQDLTLLKALVRQQLPEKYKEIFFDQSKNGYAGYIDGGASQEEFYKFIKPILEKMDGTEELLVKLNREDLLRKQRTFDNGSIPHQIHLGELHAILRRQEDFYPFLKDNREKIEKILTFRIPYYVGPLARGNSRFAWMTRKSEETITPWNFEEVVDKGASAQSFIERMTNFDKNLPNEKVLPKHSLLYEYFTVYNELTKVKYVTEGMRKPAFLSGEQKKAIVDLLFKTNRKVTVKQLKEDYFKKIECFDSVEISGVEDRFNASLGTYHDLLKIIKDKDFLDNEENEDILEDIVLTLTLFEDREMIEERLKTYAHLFDDKVMKQLKRRRYTGWGRLSRKLINGIRDKQSGKTILDFLKSDGFANRNFMQLIHDDSLTFKEDIQKAQVSGQGDSLHEHIANLAGSPAIKKGILQTVKVVDELVKVMGRHKPENIVIEMARENQTTQKGQKNSRERMKRIEEGIKELGSQILKEHPVENTQLQNEKLYLYYLQNGRDMYVDQELDINRLSDYDVDHIVPQSFLKDDSIDNKVLTRSDKARGKSDNVPSEEVVKKMKNYWRQLLNAKLITQRKFDNLTKAERGGLSELDKAGFIKRQLVETRQITKHVAQILDSRMNTKYDENDKLIREVKVITLKSKLVSDFRKDFQFYKVREINNYHHAHDAYLNAVVGTALIKKYPKLESEFVYGDYKVYDVRKMIAKSEQEIGKATAKYFFYSNIMNFFKTEITLANGEIRKRPLIETNGETGEIVWDKGRDFATVRKVLSMPQVNIVKKTEVQTGGFSKESILPKRNSDKLIARKKDWDPKKYGGFDSPTVAYSVLVVAKVEKGKSKKLKSVKELLGITIMERSSFEKNPIDFLEAKGYKEVKKDLIIKLPKYSLFELENGRKRMLASAGELQKGNELALPSKYVNFLYLASHYEKLKGSPEDNEQKQLFVEQHKHYLDEIIEQISEFSKRVILADANLDKVLSAYNKHRDKPIREQAENIIHLFTLTNLGAPAAFKYFDTTIDRKRYTSTKEVLDATLIHQSITGLYETRIDLSQLGGDGGGSSGSSGGTLNIEDEHRLHETSKEPDVSLGSTWLSDFPQAWAETGGMGLAVRQAPLIIPLKATSTPVSIKQYPMSQEARLGIKPHIQRLLDQGILVPCQSPWNTPLLPVKKPGTNDYRPVQDLREVNKRVEDIHPTVPNPYNLLSGLPPSHQWYTVLDLKDAFFCLRLHPTSQPLFAFEWRDPEMGISGQLTWTRLPQGFKNSPTLFNEALHRDLADFRIQHPDLILLQYVDDLLLAATSELDCQQGTRALLQTLGNLGYRASAKKAQICQKQVKYLGYLLKEGQRWLTEARKETVMGQPTPKTPRQLREFLGTAGFCRLWIPGFAEMAAPLYPLTKPGTLFNWGPDQQKAYQEIKQALLTAPALGLPDLTKPFELFVDEKQGYAKGVLTQKLGPWRRPVAYLSKKLDPVAAGWPPCLRMVAAIAVLTKDAGKLTMGQPLVILAPHAVEALVKQPPDRWLSNARMTHYQALLLDTDRVQFGPVVALNPATLLPLPEEGLQHNCLDILAEAHGTRPDLTDQPLPDADHTWYTDGSSLLQEGQRKAGAAVTTETEVIWAKALPAGTSAQRAELIALTQALKMAEGKKLNVYTDSRYAFATAHIHGEIYRRRGWLTSEGKEIKNKDEILALLKALFLPKRLSIIHCPGHQKGHSAEARGNRMADQAARKAAITETPDTSTLLAGKRTADGSEFEKRTADGSEFESPKKKAKVE

SEQ ID NO: 2780 - protein, 2091 aa, synthetic construct
MPAAKRVKLDGGDKKYSIGLDIGTNSVGWAVITDEYKVPSKKFKVLGNTDRHSIKKNLIGALLFDSGETAEATRLKRTARRRYTRRKNRICYLQEIFSNEMAKVDDSFFHRLEESFLVEEDKKHERHPIFGNIVDEVAYHEKYPTIYHLRKKLVDSTDKADLRLIYLALAHMIKFRGHFLIEGDLNPDNSDVDKLFIQLVQTYNQLFEENPINASGVDAKAILSARLSKSRRLENLIAQLPGEKKNGLFGNLIALSLGLTPNFKSNFDLAEDAKLQLSKDTYDDDLDNLLAQIGDQYADLFLAAKNLSDAILLSDILRVNTEITKAPLSASMIKRYDEHHQDLTLLKALVRQQLPEKYKEIFFDQSKNGYAGYIDGGASQEEFYKFIKPILEKMDGTEELLVKLNREDLLRKQRTFDNGSIPHQIHLGELHAILRRQEDFYPFLKDNREKIEKILTFRIPYYVGPLARGNSRFAWMTRKSEETITPWNFEEVVDKGASAQSFIERMTNFDKNLPNEKVLPKHSLLYEYFTVYNELTKVKYVTEGMRKPAFLSGEQKKAIVDLLFKTNRKVTVKQLKEDYFKKIECFDSVEISGVEDRFNASLGTYHDLLKIIKDKDFLDNEENEDILEDIVLTLTLFEDREMIEERLKTYAHLFDDKVMKQLKRRRYTGWGRLSRKLINGIRDKQSGKTILDFLKSDGFANRNFMQLIHDDSLTFKEDIQKAQVSGQGDSLHEHIANLAGSPAIKKGILQTVKVVDELVKVMGRHKPENIVIEMARENQTTQKGQKNSRERMKRIEEGIKELGSQILKEHPVENTQLQNEKLYLYYLQNGRDMYVDQELDINRLSDYDVDHIVPQSFLKDDSIDNKVLTRSDKARGKSDNVPSEEVVKKMKNYWRQLLNAKLITQRKFDNLTKAERGGLSELDKAGFIKRQLVETRQITKHVAQILDSRMNTKYDENDKLIREVKVITLKSKLVSDFRKDFQFYKVREINNYHHAHDAYLNAVVGTALIKKYPKLESEFVYGDYKVYDVRKMIAKSEQEIGKATAKYFFYSNIMNFFKTEITLANGEIRKRPLIETNGETGEIVWDKGRDFATVRKVLSMPQVNIVKKTEVQTGGFSKESILPKRNSDKLIARKKDWDPKKYGGFDSPTVAYSVLVVAKVEKGKSKKLKSVKELLGITIMERSSFEKNPIDFLEAKGYKEVKKDLIIKLPKYSLFELENGRKRMLASAGELQKGNELALPSKYVNFLYLASHYEKLKGSPEDNEQKQLFVEQHKHYLDEIIEQISEFSKRVILADANLDKVLSAYNKHRDKPIREQAENIIHLFTLTNLGAPAAFKYFDTTIDRKRYTSTKEVLDATLIHQSITGLYETRIDLSQLGGDGGGGGGGSGGTLNIEDEHRLHETSKEPDVSLGSTWLSDFPQAWAETGGMGLAVRQAPLIIPLKATSTPVSIKQYPMSQEARLGIKPHIQRLLDQGILVPCQSPWNTPLLPVKKPGTNDYRPVQDLREVNKRVEDIHPTVPNPYNLLSGLPPSHQWYTVLDLKDAFFCLRLHPTSQPLFAFEWRDPEMGISGQLTWTRLPQGFKNSPTLFNEALHRDLADFRIQHPDLILLQYVDDLLLAATSELDCQQGTRALLQTLGNLGYRASAKKAQICQKQVKYLGYLLKEGQRWLTEARKETVMGQPTPKTPRQLREFLGKAGFCRLFIPGFAEMAAPLYPLTKPGTLFNWGPDQQKAYQEIKQALLTAPALGLPDLTKPFELFVDEKQGYAKGVLTQKLGPWRRPVAYLSKKLDPVAAGWPPCLRMVAAIAVLTKDAGKLTMGQPLVILAPHAVEALVKQPPDRWLSNARMTHYQALLLDTDRVQFGPVVALNPATLLPLPEEGLQHNCLDILAEAHGTRPDLTDQPLPDADHTWYTDGSSLLQEGQRKAGAAVTTETEVIWAKALPAGTSAQRAELIALTQALKMAEGKKLNVYTDSRYAFATAHIHGEIYRRRGWLTSEGKEIKNKDEILALLKALFLPKRLSIIHCPGHQKGHSAEARGNRMADQAARKAAITETPDTSTLLAGKRTADGSEFEKRTADGSEFESPKKKAKVE

SEQ ID NO: 2781 - protein, 2096 aa, synthetic construct
MPAAKRVKLDGGDKKYSIGLDIGTNSVGWAVITDEYKVPSKKFKVLGNTDRHSIKKNLIGALLFDSGETAEATRLKRTARRRYTRRKNRICYLQEIFSNEMAKVDDSFFHRLEESFLVEEDKKHERHPIFGNIVDEVAYHEKYPTIYHLRKKLVDSTDKADLRLIYLALAHMIKFRGHFLIEGDLNPDNSDVDKLFIQLVQTYNQLFEENPINASGVDAKAILSARLSKSRRLENLIAQLPGEKKNGLFGNLIALSLGLTPNFKSNFDLAEDAKLQLSKDTYDDDLDNLLAQIGDQYADLFLAAKNLSDAILLSDILRVNTEITKAPLSASMIKRYDEHHQDLTLLKALVRQQLPEKYKEIFFDQSKNGYAGYIDGGASQEEFYKFIKPILEKMDGTEELLVKLNREDLLRKQRTFDNGSIPHQIHLGELHAILRRQEDFYPFLKDNREKIEKILTFRIPYYVGPLARGNSRFAWMTRKSEETITPWNFEEVVDKGASAQSFIERMTNFDKNLPNEKVLPKHSLLYEYFTVYNELTKVKYVTEGMRKPAFLSGEQKKAIVDLLFKTNRKVTVKQLKEDYFKKIECFDSVEISGVEDRFNASLGTYHDLLKIIKDKDFLDNEENEDILEDIVLTLTLFEDREMIEERLKTYAHLFDDKVMKQLKRRRYTGWGRLSRKLINGIRDKQSGKTILDFLKSDGFANRNFMQLIHDDSLTFKEDIQKAQVSGQGDSLHEHIANLAGSPAIKKGILQTVKVVDELVKVMGRHKPENIVIEMARENQTTQKGQKNSRERMKRIEEGIKELGSQILKEHPVENTQLQNEKLYLYYLQNGRDMYVDQELDINRLSDYDVDHIVPQSFLKDDSIDNKVLTRSDKARGKSDNVPSEEVVKKMKNYWRQLLNAKLITQRKFDNLTKAERGGLSELDKAGFIKRQLVETRQITKHVAQILDSRMNTKYDENDKLIREVKVITLKSKLVSDFRKDFQFYKVREINNYHHAHDAYLNAVVGTALIKKYPKLESEFVYGDYKVYDVRKMIAKSEQEIGKATAKYFFYSNIMNFFKTEITLANGEIRKRPLIETNGETGEIVWDKGRDFATVRKVLSMPQVNIVKKTEVQTGGFSKESILPKRNSDKLIARKKDWDPKKYGGFDSPTVAYSVLVVAKVEKGKSKKLKSVKELLGITIMERSSFEKNPIDFLEAKGYKEVKKDLIIKLPKYSLFELENGRKRMLASAGELQKGNELALPSKYVNFLYLASHYEKLKGSPEDNEQKQLFVEQHKHYLDEIIEQISEFSKRVILADANLDKVLSAYNKHRDKPIREQAENIIHLFTLTNLGAPAAFKYFDTTIDRKRYTSTKEVLDATLIHQSITGLYETRIDLSQLGGDGGEAAAKPAPGSSGGTLNIEDEHRLHETSKEPDVSLGSTWLSDFPQAWAETGGMGLAVRQAPLIIPLKATSTPVSIKQYPMSQEARLGIKPHIQRLLDQGILVPCQSPWNTPLLPVKKPGTNDYRPVQDLREVNKRVEDIHPTVPNPYNLLSGLPPSHQWYTVLDLKDAFFCLRLHPTSQPLFAFEWRDPEMGISGQLTWTRLPQGFKNSPTLFNEALHRDLADFRIQHPDLILLQYVDDLLLAATSELDCQQGTRALLQTLGNLGYRASAKKAQICQKQVKYLGYLLKEGQRWLTEARKETVMGQPTPKTPRQLREFLGKAGFCRLFIPGFAEMAAPLYPLTKPGTLFNWGPDQQKAYQEIKQALLTAPALGLPDLTKPFELFVDEKQGYAKGVLTQKLGPWRRPVAYLSKKLDPVAAGWPPCLRMVAAIAVLTKDAGKLTMGQPLVILAPHAVEALVKQPPDRWLSNARMTHYQALLLDTDRVQFGPVVALNPATLLPLPEEGLQHNCLDILAEAHGTRPDLTDQPLPDADHTWYTDGSSLLQEGQRKAGAAVTTETEVIWAKALPAGTSAQRAELIALTQALKMAEGKKLNVYTDSRYAFATAHIHGEIYRRRGWLTSEGKEIKNKDEILALLKALFLPKRLSIIHCPGHQKGHSAEARGNRMADQAARKAAITETPDTSTLLAGKRTADGSEFEKRTADGSEFESPKKKAKVE

SEQ ID NO: 2782 - protein, 2096 aa, synthetic construct
MPAAKRVKLDGGDKKYSIGLDIGTNSVGWAVITDEYKVPSKKFKVLGNTDRHSIKKNLIGALLFDSGETAEATRLKRTARRRYTRRKNRICYLQEIFSNEMAKVDDSFFHRLEESFLVEEDKKHERHPIFGNIVDEVAYHEKYPTIYHLRKKLVDSTDKADLRLIYLALAHMIKFRGHFLIEGDLNPDNSDVDKLFIQLVQTYNQLFEENPINASGVDAKAILSARLSKSRRLENLIAQLPGEKKNGLFGNLIALSLGLTPNFKSNFDLAEDAKLQLSKDTYDDDLDNLLAQIGDQYADLFLAAKNLSDAILLSDILRVNTEITKAPLSASMIKRYDEHHQDLTLLKALVRQQLPEKYKEIFFDQSKNGYAGYIDGGASQEEFYKFIKPILEKMDGTEELLVKLNREDLLRKQRTFDNGSIPHQIHLGELHAILRRQEDFYPFLKDNREKIEKILTFRIPYYVGPLARGNSRFAWMTRKSEETITPWNFEEVVDKGASAQSFIERMTNFDKNLPNEKVLPKHSLLYEYFTVYNELTKVKYVTEGMRKPAFLSGEQKKAIVDLLFKTNRKVTVKQLKEDYFKKIECFDSVEISGVEDRFNASLGTYHDLLKIIKDKDFLDNEENEDILEDIVLTLTLFEDREMIEERLKTYAHLFDDKVMKQLKRRRYTGWGRLSRKLINGIRDKQSGKTILDFLKSDGFANRNFMQLIHDDSLTFKEDIQKAQVSGQGDSLHEHIANLAGSPAIKKGILQTVKVVDELVKVMGRHKPENIVIEMARENQTTQKGQKNSRERMKRIEEGIKELGSQILKEHPVENTQLQNEKLYLYYLQNGRDMYVDQELDINRLSDYDVDHIVPQSFLKDDSIDNKVLTRSDKARGKSDNVPSEEVVKKMKNYWRQLLNAKLITQRKFDNLTKAERGGLSELDKAGFIKRQLVETRQITKHVAQILDSRMNTKYDENDKLIREVKVITLKSKLVSDFRKDFQFYKVREINNYHHAHDAYLNAVVGTALIKKYPKLESEFVYGDYKVYDVRKMIAKSEQEIGKATAKYFFYSNIMNFFKTEITLANGEIRKRPLIETNGETGEIVWDKGRDFATVRKVLSMPQVNIVKKTEVQTGGFSKESILPKRNSDKLIARKKDWDPKKYGGFDSPTVAYSVLVVAKVEKGKSKKLKSVKELLGITIMERSSFEKNPIDFLEAKGYKEVKKDLIIKLPKYSLFELENGRKRMLASAGELQKGNELALPSKYVNFLYLASHYEKLKGSPEDNEQKQLFVEQHKHYLDEIIEQISEFSKRVILADANLDKVLSAYNKHRDKPIREQAENIIHLFTLTNLGAPAAFKYFDTTIDRKRYTSTKEVLDATLIHQSITGLYETRIDLSQLGGDGGEAAAKGGSPAPGGTLNIEDEHRLHETSKEPDVSLGSTWLSDFPQAWAETGGMGLAVRQAPLIIPLKATSTPVSIKQYPMSQEARLGIKPHIQRLLDQGILVPCQSPWNTPLLPVKKPGTNDYRPVQDLREVNKRVEDIHPTVPNPYNLLSGLPPSHQWYTVLDLKDAFFCLRLHPTSQPLFAFEWRDPEMGISGQLTWTRLPQGFKNSPTLFNEALHRDLADFRIQHPDLILLQYVDDLLLAATSELDCQQGTRALLQTLGNLGYRASAKKAQICQKQVKYLGYLLKEGQRWLTEARKETVMGQPTPKTPRQLREFLGKAGFCRLFIPGFAEMAAPLYPLTKPGTLFNWGPDQQKAYQEIKQALLTAPALGLPDLTKPFELFVDEKQGYAKGVLTQKLGPWRRPVAYLSKKLDPVAAGWPPCLRMVAAIAVLTKDAGKLTMGQPLVILAPHAVEALVKQPPDRWLSNARMTHYQALLLDTDRVQFGPVVALNPATLLPLPEEGLQHNCLDILAEAHGTRPDLTDQPLPDADHTWYTDGSSLLQEGQRKAGAAVTTETEVIWAKALPAGTSAQRAELIALTQALKMAEGKKLNVYTDSRYAFATAHIHGEIYRRRGWLTSEGKEIKNKDEILALLKALFLPKRLSIIHCPGHQKGHSAEARGNRMADQAARKAAITETPDTSTLLAGKRTADGSEFEKRTADGSEFESPKKKAKVE

SEQ ID NO: 2783 - protein, 2093 aa, synthetic construct
MPAAKRVKLDGGDKKYSIGLDIGTNSVGWAVITDEYKVPSKKFKVLGNTDRHSIKKNLIGALLFDSGETAEATRLKRTARRRYTRRKNRICYLQEIFSNEMAKVDDSFFHRLEESFLVEEDKKHERHPIFGNIVDEVAYHEKYPTIYHLRKKLVDSTDKADLRLIYLALAHMIKFRGHFLIEGDLNPDNSDVDKLFIQLVQTYNQLFEENPINASGVDAKAILSARLSKSRRLENLIAQLPGEKKNGLFGNLIALSLGLTPNFKSNFDLAEDAKLQLSKDTYDDDLDNLLAQIGDQYADLFLAAKNLSDAILLSDILRVNTEITKAPLSASMIKRYDEHHQDLTLLKALVRQQLPEKYKEIFFDQSKNGYAGYIDGGASQEEFYKFIKPILEKMDGTEELLVKLNREDLLRKQRTFDNGSIPHQIHLGELHAILRRQEDFYPFLKDNREKIEKILTFRIPYYVGPLARGNSRFAWMTRKSEETITPWNFEEVVDKGASAQSFIERMTNFDKNLPNEKVLPKHSLLYEYFTVYNELTKVKYVTEGMRKPAFLSGEQKKAIVDLLFKTNRKVTVKQLKEDYFKKIECFDSVEISGVEDRFNASLGTYHDLLKIIKDKDFLDNEENEDILEDIVLTLTLFEDREMIEERLKTYAHLFDDKVMKQLKRRRYTGWGRLSRKLINGIRDKQSGKTILDFLKSDGFANRNFMQLIHDDSLTFKEDIQKAQVSGQGDSLHEHIANLAGSPAIKKGILQTVKVVDELVKVMGRHKPENIVIEMARENQTTQKGQKNSRERMKRIEEGIKELGSQILKEHPVENTQLQNEKLYLYYLQNGRDMYVDQELDINRLSDYDVDHIVPQSFLKDDSIDNKVLTRSDKARGKSDNVPSEEVVKKMKNYWRQLLNAKLITQRKFDNLTKAERGGLSELDKAGFIKRQLVETRQITKHVAQILDSRMNTKYDENDKLIREVKVITLKSKLVSDFRKDFQFYKVREINNYHHAHDAYLNAVVGTALIKKYPKLESEFVYGDYKVYDVRKMIAKSEQEIGKATAKYFFYSNIMNFFKTEITLANGEIRKRPLIETNGETGEIVWDKGRDFATVRKVLSMPQVNIVKKTEVQTGGFSKESILPKRNSDKLIARKKDWDPKKYGGFDSPTVAYSVLVVAKVEKGKSKKLKSVKELLGITIMERSSFEKNPIDFLEAKGYKEVKKDLIIKLPKYSLFELENGRKRMLASAGELQKGNELALPSKYVNFLYLASHYEKLKGSPEDNEQKQLFVEQHKHYLDEIIEQISEFSKRVILADANLDKVLSAYNKHRDKPIREQAENIIHLFTLTNLGAPAAFKYFDTTIDRKRYTSTKEVLDATLIHQSITGLYETRIDLSQLGGDGGEAAAKGGSGGTLNIEDEHRLHETSKEPDVSLGSTWLSDFPQAWAETGGMGLAVRQAPLIIPLKATSTPVSIKQYPMSQEARLGIKPHIQRLLDQGILVPCQSPWNTPLLPVKKPGTNDYRPVQDLREVNKRVEDIHPTVPNPYNLLSGLPPSHQWYTVLDLKDAFFCLRLHPTSQPLFAFEWRDPEMGISGQLTWTRLPQGFKNSPTLFNEALHRDLADFRIQHPDLILLQYVDDLLLAATSELDCQQGTRALLQTLGNLGYRASAKKAQICQKQVKYLGYLLKEGQRWLTEARKETVMGQPTPKTPRQLREFLGKAGFCRLFIPGFAEMAAPLYPLTKPGTLFNWGPDQQKAYQEIKQALLTAPALGLPDLTKPFELFVDEKQGYAKGVLTQKLGPWRRPVAYLSKKLDPVAAGWPPCLRMVAAIAVLTKDAGKLTMGQPLVILAPHAVEALVKQPPDRWLSNARMTHYQALLLDTDRVQFGPVVALNPATLLPLPEEGLQHNCLDILAEAHGTRPDLTDQPLPDADHTWYTDGSSLLQEGQRKAGAAVTTETEVIWAKALPAGTSAQRAELIALTQALKMAEGKKLNVYTDSRYAFATAHIHGEIYRRRGWLTSEGKEIKNKDEILALLKALFLPKRLSIIHCPGHQKGHSAEARGNRMADQAARKAAITETPDTSTLLAGKRTADGSEFEKRTADGSEFESPKKKAKVE

SEQ ID NO: 2784 - protein, 2131 aa, synthetic construct
MPAAKRVKLDGGDKKYSIGLDIGTNSVGWAVITDEYKVPSKKFKVLGNTDRHSIKKNLIGALLFDSGETAEATRLKRTARRRYTRRKNRICYLQEIFSNEMAKVDDSFFHRLEESFLVEEDKKHERHPIFGNIVDEVAYHEKYPTIYHLRKKLVDSTDKADLRLIYLALAHMIKFRGHFLIEGDLNPDNSDVDKLFIQLVQTYNQLFEENPINASGVDAKAILSARLSKSRRLENLIAQLPGEKKNGLFGNLIALSLGLTPNFKSNFDLAEDAKLQLSKDTYDDDLDNLLAQIGDQYADLFLAAKNLSDAILLSDILRVNTEITKAPLSASMIKRYDEHHQDLTLLKALVRQQLPEKYKEIFFDQSKNGYAGYIDGGASQEEFYKFIKPILEKMDGTEELLVKLNREDLLRKQRTFDNGSIPHQIHLGELHAILRRQEDFYPFLKDNREKIEKILTFRIPYYVGPLARGNSRFAWMTRKSEETITPWNFEEVVDKGASAQSFIERMTNFDKNLPNEKVLPKHSLLYEYFTVYNELTKVKYVTEGMRKPAFLSGEQKKAIVDLLFKTNRKVTVKQLKEDYFKKIECFDSVEISGVEDRFNASLGTYHDLLKIIKDKDFLDNEENEDILEDIVLTLTLFEDREMIEERLKTYAHLFDDKVMKQLKRRRYTGWGRLSRKLINGIRDKQSGKTILDFLKSDGFANRNFMQLIHDDSLTFKEDIQKAQVSGQGDSLHEHIANLAGSPAIKKGILQTVKVVDELVKVMGRHKPENIVIEMARENQTTQKGQKNSRERMKRIEEGIKELGSQILKEHPVENTQLQNEKLYLYYLQNGRDMYVDQELDINRLSDYDVDHIVPQSFLKDDSIDNKVLTRSDKARGKSDNVPSEEVVKKMKNYWRQLLNAKLITQRKFDNLTKAERGGLSELDKAGFIKRQLVETRQITKHVAQILDSRMNTKYDENDKLIREVKVITLKSKLVSDFRKDFQFYKVREINNYHHAHDAYLNAVVGTALIKKYPKLESEFVYGDYKVYDVRKMIAKSEQEIGKATAKYFFYSNIMNFFKTEITLANGEIRKRPLIETNGETGEIVWDKGRDFATVRKVLSMPQVNIVKKTEVQTGGFSKESILPKRNSDKLIARKKDWDPKKYGGFDSPTVAYSVLVVAKVEKGKSKKLKSVKELLGITIMERSSFEKNPIDFLEAKGYKEVKKDLIIKLPKYSLFELENGRKRMLASAGELQKGNELALPSKYVNFLYLASHYEKLKGSPEDNEQKQLFVEQHKHYLDEIIEQISEFSKRVILADANLDKVLSAYNKHRDKPIREQAENIIHLFTLTNLGAPAAFKYFDTTIDRKRYTSTKEVLDATLIHQSITGLYETRIDLSQLGGDGGAEAAAKEAAAKEAAAKEAAAKALEAEAAAKEAAAKEAAAKEAAAKAGGTLNIEDEHRLHETSKEPDVSLGSTWLSDFPQAWAETGGMGLAVRQAPLIIPLKATSTPVSIKQYPMSQEARLGIKPHIQRLLDQGILVPCQSPWNTPLLPVKKPGTNDYRPVQDLREVNKRVEDIHPTVPNPYNLLSGLPPSHQWYTVLDLKDAFFCLRLHPTSQPLFAFEWRDPEMGISGQLTWTRLPQGFKNSPTLFNEALHRDLADFRIQHPDLILLQYVDDLLLAATSELDCQQGTRALLQTLGNLGYRASAKKAQICQKQVKYLGYLLKEGQRWLTEARKETVMGQPTPKTPRQLREFLGKAGFCRLFIPGFAEMAAPLYPLTKPGTLFNWGPDQQKAYQEIKQALLTAPALGLPDLTKPFELFVDEKQGYAKGVLTQKLGPWRRPVAYLSKKLDPVAAGWPPCLRMVAAIAVLTKDAGKLTMGQPLVILAPHAVEALVKQPPDRWLSNARMTHYQALLLDTDRVQFGPVVALNPATLLPLPEEGLQHNCLDILAEAHGTRPDLTDQPLPDADHTWYTDGSSLLQEGQRKAGAAVTTETEVIWAKALPAGTSAQRAELIALTQALKMAEGKKLNVYTDSRYAFATAHIHGEIYRRRGWLTSEGKEIKNKDEILALLKALFLPKRLSIIHCPGHQKGHSAEARGNRMADQAARKAAITETPDTSTLLAGKRTADGSEFEKRTADGSEFESPKKKAKVE

SEQ ID NO: 2785 - protein, 2096 aa, synthetic construct
MPAAKRVKLDGGDKKYSIGLDIGTNSVGWAVITDEYKVPSKKFKVLGNTDRHSIKKNLIGALLFDSGETAEATRLKRTARRRYTRRKNRICYLQEIFSNEMAKVDDSFFHRLEESFLVEEDKKHERHPIFGNIVDEVAYHEKYPTIYHLRKKLVDSTDKADLRLIYLALAHMIKFRGHFLIEGDLNPDNSDVDKLFIQLVQTYNQLFEENPINASGVDAKAILSARLSKSRRLENLIAQLPGEKKNGLFGNLIALSLGLTPNFKSNFDLAEDAKLQLSKDTYDDDLDNLLAQIGDQYADLFLAAKNLSDAILLSDILRVNTEITKAPLSASMIKRYDEHHQDLTLLKALVRQQLPEKYKEIFFDQSKNGYAGYIDGGASQEEFYKFIKPILEKMDGTEELLVKLNREDLLRKQRTFDNGSIPHQIHLGELHAILRRQEDFYPFLKDNREKIEKILTFRIPYYVGPLARGNSRFAWMTRKSEETITPWNFEEVVDKGASAQSFIERMTNFDKNLPNEKVLPKHSLLYEYFTVYNELTKVKYVTEGMRKPAFLSGEQKKAIVDLLFKTNRKVTVKQLKEDYFKKIECFDSVEISGVEDRFNASLGTYHDLLKIIKDKDFLDNEENEDILEDIVLTLTLFEDREMIEERLKTYAHLFDDKVMKQLKRRRYTGWGRLSRKLINGIRDKQSGKTILDFLKSDGFANRNFMQLIHDDSLTFKEDIQKAQVSGQGDSLHEHIANLAGSPAIKKGILQTVKVVDELVKVMGRHKPENIVIEMARENQTTQKGQKNSRERMKRIEEGIKELGSQILKEHPVENTQLQNEKLYLYYLQNGRDMYVDQELDINRLSDYDVDHIVPQSFLKDDSIDNKVLTRSDKARGKSDNVPSEEVVKKMKNYWRQLLNAKLITQRKFDNLTKAERGGLSELDKAGFIKRQLVETRQITKHVAQILDSRMNTKYDENDKLIREVKVITLKSKLVSDFRKDFQFYKVREINNYHHAHDAYLNAVVGTALIKKYPKLESEFVYGDYKVYDVRKMIAKSEQEIGKATAKYFFYSNIMNFFKTEITLANGEIRKRPLIETNGETGEIVWDKGRDFATVRKVLSMPQVNIVKKTEVQTGGFSKESILPKRNSDKLIARKKDWDPKKYGGFDSPTVAYSVLVVAKVEKGKSKKLKSVKELLGITIMERSSFEKNPIDFLEAKGYKEVKKDLIIKLPKYSLFELENGRKRMLASAGELQKGNELALPSKYVNFLYLASHYEKLKGSPEDNEQKQLFVEQHKHYLDEIIEQISEFSKRVILADANLDKVLSAYNKHRDKPIREQAENIIHLFTLTNLGAPAAFKYFDTTIDRKRYTSTKEVLDATLIHQSITGLYETRIDLSQLGGDGGEAAAKGSSGGGGGTLNIEDEHRLHETSKEPDVSLGSTWLSDFPQAWAETGGMGLAVRQAPLIIPLKATSTPVSIKQYPMSQEARLGIKPHIQRLLDQGILVPCQSPWNTPLLPVKKPGTNDYRPVQDLREVNKRVEDIHPTVPNPYNLLSGLPPSHQWYTVLDLKDAFFCLRLHPTSQPLFAFEWRDPEMGISGQLTWTRLPQGFKNSPTLFNEALHRDLADFRIQHPDLILLQYVDDLLLAATSELDCQQGTRALLQTLGNLGYRASAKKAQICQKQVKYLGYLLKEGQRWLTEARKETVMGQPTPKTPRQLREFLGKAGFCRLFIPGFAEMAAPLYPLTKPGTLFNWGPDQQKAYQEIKQALLTAPALGLPDLTKPFELFVDEKQGYAKGVLTQKLGPWRRPVAYLSKKLDPVAAGWPPCLRMVAAIAVLTKDAGKLTMGQPLVILAPHAVEALVKQPPDRWLSNARMTHYQALLLDTDRVQFGPVVALNPATLLPLPEEGLQHNCLDILAEAHGTRPDLTDQPLPDADHTWYTDGSSLLQEGQRKAGAAVTTETEVIWAKALPAGTSAQRAELIALTQALKMAEGKKLNVYTDSRYAFATAHIHGEIYRRRGWLTSEGKEIKNKDEILALLKALFLPKRLSIIHCPGHQKGHSAEARGNRMADQAARKAAITETPDTSTLLAGKRTADGSEFEKRTADGSEFESPKKKAKVE

SEQ ID NO: 2786 - protein, 2096 aa, synthetic construct
MPAAKRVKLDGGDKKYSIGLDIGTNSVGWAVITDEYKVPSKKFKVLGNTDRHSIKKNLIGALLFDSGETAEATRLKRTARRRYTRRKNRICYLQEIFSNEMAKVDDSFFHRLEESFLVEEDKKHERHPIFGNIVDEVAYHEKYPTIYHLRKKLVDSTDKADLRLIYLALAHMIKFRGHFLIEGDLNPDNSDVDKLFIQLVQTYNQLFEENPINASGVDAKAILSARLSKSRRLENLIAQLPGEKKNGLFGNLIALSLGLTPNFKSNFDLAEDAKLQLSKDTYDDDLDNLLAQIGDQYADLFLAAKNLSDAILLSDILRVNTEITKAPLSASMIKRYDEHHQDLTLLKALVRQQLPEKYKEIFFDQSKNGYAGYIDGGASQEEFYKFIKPILEKMDGTEELLVKLNREDLLRKQRTFDNGSIPHQIHLGELHAILRRQEDFYPFLKDNREKIEKILTFRIPYYVGPLARGNSRFAWMTRKSEETITPWNFEEVVDKGASAQSFIERMTNFDKNLPNEKVLPKHSLLYEYFTVYNELTKVKYVTEGMRKPAFLSGEQKKAIVDLLFKTNRKVTVKQLKEDYFKKIECFDSVEISGVEDRFNASLGTYHDLLKIIKDKDFLDNEENEDILEDIVLTLTLFEDREMIEERLKTYAHLFDDKVMKQLKRRRYTGWGRLSRKLINGIRDKQSGKTILDFLKSDGFANRNFMQLIHDDSLTFKEDIQKAQVSGQGDSLHEHIANLAGSPAIKKGILQTVKVVDELVKVMGRHKPENIVIEMARENQTTQKGQKNSRERMKRIEEGIKELGSQILKEHPVENTQLQNEKLYLYYLQNGRDMYVDQELDINRLSDYDVDHIVPQSFLKDDSIDNKVLTRSDKARGKSDNVPSEEVVKKMKNYWRQLLNAKLITQRKFDNLTKAERGGLSELDKAGFIKRQLVETRQITKHVAQILDSRMNTKYDENDKLIREVKVITLKSKLVSDFRKDFQFYKVREINNYHHAHDAYLNAVVGTALIKKYPKLESEFVYGDYKVYDVRKMIAKSEQEIGKATAKYFFYSNIMNFFKTEITLANGEIRKRPLIETNGETGEIVWDKGRDFATVRKVLSMPQVNIVKKTEVQTGGFSKESILPKRNSDKLIARKKDWDPKKYGGFDSPTVAYSVLVVAKVEKGKSKKLKSVKELLGITIMERSSFEKNPIDFLEAKGYKEVKKDLIIKLPKYSLFELENGRKRMLASAGELQKGNELALPSKYVNFLYLASHYEKLKGSPEDNEQKQLFVEQHKHYLDEIIEQISEFSKRVILADANLDKVLSAYNKHRDKPIREQAENIIHLFTLTNLGAPAAFKYFDTTIDRKRYTSTKEVLDATLIHQSITGLYETRIDLSQLGGDGGPAPGGSEAAAKGGTLNIEDEHRLHETSKEPDVSLGSTWLSDFPQAWAETGGMGLAVRQAPLIIPLKATSTPVSIKQYPMSQEARLGIKPHIQRLLDQGILVPCQSPWNTPLLPVKKPGTNDYRPVQDLREVNKRVEDIHPTVPNPYNLLSGLPPSHQWYTVLDLKDAFFCLRLHPTSQPLFAFEWRDPEMGISGQLTWTRLPQGFKNSPTLFNEALHRDLADFRIQHPDLILLQYVDDLLLAATSELDCQQGTRALLQTLGNLGYRASAKKAQICQKQVKYLGYLLKEGQRWLTEARKETVMGQPTPKTPRQLREFLGKAGFCRLFIPGFAEMAAPLYPLTKPGTLFNWGPDQQKAYQEIKQALLTAPALGLPDLTKPFELFVDEKQGYAKGVLTQKLGPWRRPVAYLSKKLDPVAAGWPPCLRMVAAIAVLTKDAGKLTMGQPLVILAPHAVEALVKQPPDRWLSNARMTHYQALLLDTDRVQFGPVVALNPATLLPLPEEGLQHNCLDILAEAHGTRPDLTDQPLPDADHTWYTDGSSLLQEGQRKAGAAVTTETEVIWAKALPAGTSAQRAELIALTQALKMAEGKKLNVYTDSRYAFATAHIHGEIYRRRGWLTSEGKEIKNKDEILALLKALFLPKRLSIIHCPGHQKGHSAEARGNRMADQAARKAAITETPDTSTLLAGKRTADGSEFEKRTADGSEFESPKKKAKVE

SEQ ID NO: 2787 - protein, 2096 aa, synthetic construct
MPAAKRVKLDGGDKKYSIGLDIGTNSVGWAVITDEYKVPSKKFKVLGNTDRHSIKKNLIGALLFDSGETAEATRLKRTARRRYTRRKNRICYLQEIFSNEMAKVDDSFFHRLEESFLVEEDKKHERHPIFGNIVDEVAYHEKYPTIYHLRKKLVDSTDKADLRLIYLALAHMIKFRGHFLIEGDLNPDNSDVDKLFIQLVQTYNQLFEENPINASGVDAKAILSARLSKSRRLENLIAQLPGEKKNGLFGNLIALSLGLTPNFKSNFDLAEDAKLQLSKDTYDDDLDNLLAQIGDQYADLFLAAKNLSDAILLSDILRVNTEITKAPLSASMIKRYDEHHQDLTLLKALVRQQLPEKYKEIFFDQSKNGYAGYIDGGASQEEFYKFIKPILEKMDGTEELLVKLNREDLLRKQRTFDNGSIPHQIHLGELHAILRRQEDFYPFLKDNREKIEKILTFRIPYYVGPLARGNSRFAWMTRKSEETITPWNFEEVVDKGASAQSFIERMTNFDKNLPNEKVLPKHSLLYEYFTVYNELTKVKYVTEGMRKPAFLSGEQKKAIVDLLFKTNRKVTVKQLKEDYFKKIECFDSVEISGVEDRFNASLGTYHDLLKIIKDKDFLDNEENEDILEDIVLTLTLFEDREMIEERLKTYAHLFDDKVMKQLKRRRYTGWGRLSRKLINGIRDKQSGKTILDFLKSDGFANRNFMQLIHDDSLTFKEDIQKAQVSGQGDSLHEHIANLAGSPAIKKGILQTVKVVDELVKVMGRHKPENIVIEMARENQTTQKGQKNSRERMKRIEEGIKELGSQILKEHPVENTQLQNEKLYLYYLQNGRDMYVDQELDINRLSDYDVDHIVPQSFLKDDSIDNKVLTRSDKARGKSDNVPSEEVVKKMKNYWRQLLNAKLITQRKFDNLTKAERGGLSELDKAGFIKRQLVETRQITKHVAQILDSRMNTKYDENDKLIREVKVITLKSKLVSDFRKDFQFYKVREINNYHHAHDAYLNAVVGTALIKKYPKLESEFVYGDYKVYDVRKMIAKSEQEIGKATAKYFFYSNIMNFFKTEITLANGEIRKRPLIETNGETGEIVWDKGRDFATVRKVLSMPQVNIVKKTEVQTGGFSKESILPKRNSDKLIARKKDWDPKKYGGFDSPTVAYSVLVVAKVEKGKSKKLKSVKELLGITIMERSSFEKNPIDFLEAKGYKEVKKDLIIKLPKYSLFELENGRKRMLASAGELQKGNELALPSKYVNFLYLASHYEKLKGSPEDNEQKQLFVEQHKHYLDEIIEQISEFSKRVILADANLDKVLSAYNKHRDKPIREQAENIIHLFTLTNLGAPAAFKYFDTTIDRKRYTSTKEVLDATLIHQSITGLYETRIDLSQLGGDGGGGSEAAAKGGGGGTLNIEDEHRLHETSKEPDVSLGSTWLSDFPQAWAETGGMGLAVRQAPLIIPLKATSTPVSIKQYPMSQEARLGIKPHIQRLLDQGILVPCQSPWNTPLLPVKKPGTNDYRPVQDLREVNKRVEDIHPTVPNPYNLLSGLPPSHQWYTVLDLKDAFFCLRLHPTSQPLFAFEWRDPEMGISGQLTWTRLPQGFKNSPTLFNEALHRDLADFRIQHPDLILLQYVDDLLLAATSELDCQQGTRALLQTLGNLGYRASAKKAQICQKQVKYLGYLLKEGQRWLTEARKETVMGQPTPKTPRQLREFLGKAGFCRLFIPGFAEMAAPLYPLTKPGTLFNWGPDQQKAYQEIKQALLTAPALGLPDLTKPFELFVDEKQGYAKGVLTQKLGPWRRPVAYLSKKLDPVAAGWPPCLRMVAAIAVLTKDAGKLTMGQPLVILAPHAVEALVKQPPDRWLSNARMTHYQALLLDTDRVQFGPVVALNPATLLPLPEEGLQHNCLDILAEAHGTRPDLTDQPLPDADHTWYTDGSSLLQEGQRKAGAAVTTETEVIWAKALPAGTSAQRAELIALTQALKMAEGKKLNVYTDSRYAFATAHIHGEIYRRRGWLTSEGKEIKNKDEILALLKALFLPKRLSIIHCPGHQKGHSAEARGNRMADQAARKAAITETPDTSTLLAGKRTADGSEFEKRTADGSEFESPKKKAKVE

SEQ ID NO: 2788 - protein, 2100 aa, synthetic construct
MPAAKRVKLDGGDKKYSIGLDIGTNSVGWAVITDEYKVPSKKFKVLGNTDRHSIKKNLIGALLFDSGETAEATRLKRTARRRYTRRKNRICYLQEIFSNEMAKVDDSFFHRLEESFLVEEDKKHERHPIFGNIVDEVAYHEKYPTIYHLRKKLVDSTDKADLRLIYLALAHMIKFRGHFLIEGDLNPDNSDVDKLFIQLVQTYNQLFEENPINASGVDAKAILSARLSKSRRLENLIAQLPGEKKNGLFGNLIALSLGLTPNFKSNFDLAEDAKLQLSKDTYDDDLDNLLAQIGDQYADLFLAAKNLSDAILLSDILRVNTEITKAPLSASMIKRYDEHHQDLTLLKALVRQQLPEKYKEIFFDQSKNGYAGYIDGGASQEEFYKFIKPILEKMDGTEELLVKLNREDLLRKQRTFDNGSIPHQIHLGELHAILRRQEDFYPFLKDNREKIEKILTFRIPYYVGPLARGNSRFAWMTRKSEETITPWNFEEVVDKGASAQSFIERMTNFDKNLPNEKVLPKHSLLYEYFTVYNELTKVKYVTEGMRKPAFLSGEQKKAIVDLLFKTNRKVTVKQLKEDYFKKIECFDSVEISGVEDRFNASLGTYHDLLKIIKDKDFLDNEENEDILEDIVLTLTLFEDREMIEERLKTYAHLFDDKVMKQLKRRRYTGWGRLSRKLINGIRDKQSGKTILDFLKSDGFANRNFMQLIHDDSLTFKEDIQKAQVSGQGDSLHEHIANLAGSPAIKKGILQTVKVVDELVKVMGRHKPENIVIEMARENQTTQKGQKNSRERMKRIEEGIKELGSQILKEHPVENTQLQNEKLYLYYLQNGRDMYVDQELDINRLSDYDVDHIVPQSFLKDDSIDNKVLTRSDKARGKSDNVPSEEVVKKMKNYWRQLLNAKLITQRKFDNLTKAERGGLSELDKAGFIKRQLVETRQITKHVAQILDSRMNTKYDENDKLIREVKVITLKSKLVSDFRKDFQFYKVREINNYHHAHDAYLNAVVGTALIKKYPKLESEFVYGDYKVYDVRKMIAKSEQEIGKATAKYFFYSNIMNFFKTEITLANGEIRKRPLIETNGETGEIVWDKGRDFATVRKVLSMPQVNIVKKTEVQTGGFSKESILPKRNSDKLIARKKDWDPKKYGGFDSPTVAYSVLVVAKVEKGKSKKLKSVKELLGITIMERSSFEKNPIDFLEAKGYKEVKKDLIIKLPKYSLFELENGRKRMLASAGELQKGNELALPSKYVNFLYLASHYEKLKGSPEDNEQKQLFVEQHKHYLDEIIEQISEFSKRVILADANLDKVLSAYNKHRDKPIREQAENIIHLFTLTNLGAPAAFKYFDTTIDRKRYTSTKEVLDATLIHQSITGLYETRIDLSQLGGDGGEAAAKGGGGSEAAAKGGTLNIEDEHRLHETSKEPDVSLGSTWLSDFPQAWAETGGMGLAVRQAPLIIPLKATSTPVSIKQYPMSQEARLGIKPHIQRLLDQGILVPCQSPWNTPLLPVKKPGTNDYRPVQDLREVNKRVEDIHPTVPNPYNLLSGLPPSHQWYTVLDLKDAFFCLRLHPTSQPLFAFEWRDPEMGISGQLTWTRLPQGFKNSPTLFNEALHRDLADFRIQHPDLILLQYVDDLLLAATSELDCQQGTRALLQTLGNLGYRASAKKAQICQKQVKYLGYLLKEGQRWLTEARKETVMGQPTPKTPRQLREFLGKAGFCRLFIPGFAEMAAPLYPLTKPGTLFNWGPDQQKAYQEIKQALLTAPALGLPDLTKPFELFVDEKQGYAKGVLTQKLGPWRRPVAYLSKKLDPVAAGWPPCLRMVAAIAVLTKDAGKLTMGQPLVILAPHAVEALVKQPPDRWLSNARMTHYQALLLDTDRVQFGPVVALNPATLLPLPEEGLQHNCLDILAEAHGTRPDLTDQPLPDADHTWYTDGSSLLQEGQRKAGAAVTTETEVIWAKALPAGTSAQRAELIALTQALKMAEGKKLNVYTDSRYAFATAHIHGEIYRRRGWLTSEGKEIKNKDEILALLKALFLPKRLSIIHCPGHQKGHSAEARGNRMADQAARKAAITETPDTSTLLAGKRTADGSEFEKRTADGSEFESPKKKAKVE

SEQ ID NO: 2789 - protein, 2096 aa, synthetic construct
MPAAKRVKLDGGDKKYSIGLDIGTNSVGWAVITDEYKVPSKKFKVLGNTDRHSIKKNLIGALLFDSGETAEATRLKRTARRRYTRRKNRICYLQEIFSNEMAKVDDSFFHRLEESFLVEEDKKHERHPIFGNIVDEVAYHEKYPTIYHLRKKLVDSTDKADLRLIYLALAHMIKFRGHFLIEGDLNPDNSDVDKLFIQLVQTYNQLFEENPINASGVDAKAILSARLSKSRRLENLIAQLPGEKKNGLFGNLIALSLGLTPNFKSNFDLAEDAKLQLSKDTYDDDLDNLLAQIGDQYADLFLAAKNLSDAILLSDILRVNTEITKAPLSASMIKRYDEHHQDLTLLKALVRQQLPEKYKEIFFDQSKNGYAGYIDGGASQEEFYKFIKPILEKMDGTEELLVKLNREDLLRKQRTFDNGSIPHQIHLGELHAILRRQEDFYPFLKDNREKIEKILTFRIPYYVGPLARGNSRFAWMTRKSEETITPWNFEEVVDKGASAQSFIERMTNFDKNLPNEKVLPKHSLLYEYFTVYNELTKVKYVTEGMRKPAFLSGEQKKAIVDLLFKTNRKVTVKQLKEDYFKKIECFDSVEISGVEDRFNASLGTYHDLLKIIKDKDFLDNEENEDILEDIVLTLTLFEDREMIEERLKTYAHLFDDKVMKQLKRRRYTGWGRLSRKLINGIRDKQSGKTILDFLKSDGFANRNFMQLIHDDSLTFKEDIQKAQVSGQGDSLHEHIANLAGSPAIKKGILQTVKVVDELVKVMGRHKPENIVIEMARENQTTQKGQKNSRERMKRIEEGIKELGSQILKEHPVENTQLQNEKLYLYYLQNGRDMYVDQELDINRLSDYDVDHIVPQSFLKDDSIDNKVLTRSDKARGKSDNVPSEEVVKKMKNYWRQLLNAKLITQRKFDNLTKAERGGLSELDKAGFIKRQLVETRQITKHVAQILDSRMNTKYDENDKLIREVKVITLKSKLVSDFRKDFQFYKVREINNYHHAHDAYLNAVVGTALIKKYPKLESEFVYGDYKVYDVRKMIAKSEQEIGKATAKYFFYSNIMNFFKTEITLANGEIRKRPLIETNGETGEIVWDKGRDFATVRKVLSMPQVNIVKKTEVQTGGFSKESILPKRNSDKLIARKKDWDPKKYGGFDSPTVAYSVLVVAKVEKGKSKKLKSVKELLGITIMERSSFEKNPIDFLEAKGYKEVKKDLIIKLPKYSLFELENGRKRMLASAGELQKGNELALPSKYVNFLYLASHYEKLKGSPEDNEQKQLFVEQHKHYLDEIIEQISEFSKRVILADANLDKVLSAYNKHRDKPIREQAENIIHLFTLTNLGAPAAFKYFDTTIDRKRYTSTKEVLDATLIHQSITGLYETRIDLSQLGGDGGEAAAKGGGGSSGGTLNIEDEHRLHETSKEPDVSLGSTWLSDFPQAWAETGGMGLAVRQAPLIIPLKATSTPVSIKQYPMSQEARLGIKPHIQRLLDQGILVPCQSPWNTPLLPVKKPGTNDYRPVQDLREVNKRVEDIHPTVPNPYNLLSGLPPSHQWYTVLDLKDAFFCLRLHPTSQPLFAFEWRDPEMGISGQLTWTRLPQGFKNSPTLFNEALHRDLADFRIQHPDLILLQYVDDLLLAATSELDCQQGTRALLQTLGNLGYRASAKKAQICQKQVKYLGYLLKEGQRWLTEARKETVMGQPTPKTPRQLREFLGKAGFCRLFIPGFAEMAAPLYPLTKPGTLFNWGPDQQKAYQEIKQALLTAPALGLPDLTKPFELFVDEKQGYAKGVLTQKLGPWRRPVAYLSKKLDPVAAGWPPCLRMVAAIAVLTKDAGKLTMGQPLVILAPHAVEALVKQPPDRWLSNARMTHYQALLLDTDRVQFGPVVALNPATLLPLPEEGLQHNCLDILAEAHGTRPDLTDQPLPDADHTWYTDGSSLLQEGQRKAGAAVTTETEVIWAKALPAGTSAQRAELIALTQALKMAEGKKLNVYTDSRYAFATAHIHGEIYRRRGWLTSEGKEIKNKDEILALLKALFLPKRLSIIHCPGHQKGHSAEARGNRMADQAARKAAITETPDTSTLLAGKRTADGSEFEKRTADGSEFESPKKKAKVE

SEQ ID NO: 2790 - protein, 2092 aa, synthetic construct
MPAAKRVKLDGGDKKYSIGLDIGTNSVGWAVITDEYKVPSKKFKVLGNTDRHSIKKNLIGALLFDSGETAEATRLKRTARRRYTRRKNRICYLQEIFSNEMAKVDDSFFHRLEESFLVEEDKKHERHPIFGNIVDEVAYHEKYPTIYHLRKKLVDSTDKADLRLIYLALAHMIKFRGHFLIEGDLNPDNSDVDKLFIQLVQTYNQLFEENPINASGVDAKAILSARLSKSRRLENLIAQLPGEKKNGLFGNLIALSLGLTPNFKSNFDLAEDAKLQLSKDTYDDDLDNLLAQIGDQYADLFLAAKNLSDAILLSDILRVNTEITKAPLSASMIKRYDEHHQDLTLLKALVRQQLPEKYKEIFFDQSKNGYAGYIDGGASQEEFYKFIKPILEKMDGTEELLVKLNREDLLRKQRTFDNGSIPHQIHLGELHAILRRQEDFYPFLKDNREKIEKILTFRIPYYVGPLARGNSRFAWMTRKSEETITPWNFEEVVDKGASAQSFIERMTNFDKNLPNEKVLPKHSLLYEYFTVYNELTKVKYVTEGMRKPAFLSGEQKKAIVDLLFKTNRKVTVKQLKEDYFKKIECFDSVEISGVEDRFNASLGTYHDLLKIIKDKDFLDNEENEDILEDIVLTLTLFEDREMIEERLKTYAHLFDDKVMKQLKRRRYTGWGRLSRKLINGIRDKQSGKTILDFLKSDGFANRNFMQLIHDDSLTFKEDIQKAQVSGQGDSLHEHIANLAGSPAIKKGILQTVKVVDELVKVMGRHKPENIVIEMARENQTTQKGQKNSRERMKRIEEGIKELGSQILKEHPVENTQLQNEKLYLYYLQNGRDMYVDQELDINRLSDYDVDHIVPQSFLKDDSIDNKVLTRSDKARGKSDNVPSEEVVKKMKNYWRQLLNAKLITQRKFDNLTKAERGGLSELDKAGFIKRQLVETRQITKHVAQILDSRMNTKYDENDKLIREVKVITLKSKLVSDFRKDFQFYKVREINNYHHAHDAYLNAVVGTALIKKYPKLESEFVYGDYKVYDVRKMIAKSEQEIGKATAKYFFYSNIMNFFKTEITLANGEIRKRPLIETNGETGEIVWDKGRDFATVRKVLSMPQVNIVKKTEVQTGGFSKESILPKRNSDKLIARKKDWDPKKYGGFDSPTVAYSVLVVAKVEKGKSKKLKSVKELLGITIMERSSFEKNPIDFLEAKGYKEVKKDLIIKLPKYSLFELENGRKRMLASAGELQKGNELALPSKYVNFLYLASHYEKLKGSPEDNEQKQLFVEQHKHYLDEIIEQISEFSKRVILADANLDKVLSAYNKHRDKPIREQAENIIHLFTLTNLGAPAAFKYFDTTIDRKRYTSTKEVLDATLIHQSITGLYETRIDLSQLGGDGGGGGGGGGGGTLNIEDEHRLHETSKEPDVSLGSTWLSDFPQAWAETGGMGLAVRQAPLIIPLKATSTPVSIKQYPMSQEARLGIKPHIQRLLDQGILVPCQSPWNTPLLPVKKPGTNDYRPVQDLREVNKRVEDIHPTVPNPYNLLSGLPPSHQWYTVLDLKDAFFCLRLHPTSQPLFAFEWRDPEMGISGQLTWTRLPQGFKNSPTLFNEALHRDLADFRIQHPDLILLQYVDDLLLAATSELDCQQGTRALLQTLGNLGYRASAKKAQICQKQVKYLGYLLKEGQRWLTEARKETVMGQPTPKTPRQLREFLGKAGFCRLFIPGFAEMAAPLYPLTKPGTLFNWGPDQQKAYQEIKQALLTAPALGLPDLTKPFELFVDEKQGYAKGVLTQKLGPWRRPVAYLSKKLDPVAAGWPPCLRMVAAIAVLTKDAGKLTMGQPLVILAPHAVEALVKQPPDRWLSNARMTHYQALLLDTDRVQFGPVVALNPATLLPLPEEGLQHNCLDILAEAHGTRPDLTDQPLPDADHTWYTDGSSLLQEGQRKAGAAVTTETEVIWAKALPAGTSAQRAELIALTQALKMAEGKKLNVYTDSRYAFATAHIHGEIYRRRGWLTSEGKEIKNKDEILALLKALFLPKRLSIIHCPGHQKGHSAEARGNRMADQAARKAAITETPDTSTLLAGKRTADGSEFEKRTADGSEFESPKKKAKVE

SEQ ID NO: 2791 - protein, 2100 aa, synthetic construct
MPAAKRVKLDGGDKKYSIGLDIGTNSVGWAVITDEYKVPSKKFKVLGNTDRHSIKKNLIGALLFDSGETAEATRLKRTARRRYTRRKNRICYLQEIFSNEMAKVDDSFFHRLEESFLVEEDKKHERHPIFGNIVDEVAYHEKYPTIYHLRKKLVDSTDKADLRLIYLALAHMIKFRGHFLIEGDLNPDNSDVDKLFIQLVQTYNQLFEENPINASGVDAKAILSARLSKSRRLENLIAQLPGEKKNGLFGNLIALSLGLTPNFKSNFDLAEDAKLQLSKDTYDDDLDNLLAQIGDQYADLFLAAKNLSDAILLSDILRVNTEITKAPLSASMIKRYDEHHQDLTLLKALVRQQLPEKYKEIFFDQSKNGYAGYIDGGASQEEFYKFIKPILEKMDGTEELLVKLNREDLLRKQRTFDNGSIPHQIHLGELHAILRRQEDFYPFLKDNREKIEKILTFRIPYYVGPLARGNSRFAWMTRKSEETITPWNFEEVVDKGASAQSFIERMTNFDKNLPNEKVLPKHSLLYEYFTVYNELTKVKYVTEGMRKPAFLSGEQKKAIVDLLFKTNRKVTVKQLKEDYFKKIECFDSVEISGVEDRFNASLGTYHDLLKIIKDKDFLDNEENEDILEDIVLTLTLFEDREMIEERLKTYAHLFDDKVMKQLKRRRYTGWGRLSRKLINGIRDKQSGKTILDFLKSDGFANRNFMQLIHDDSLTFKEDIQKAQVSGQGDSLHEHIANLAGSPAIKKGILQTVKVVDELVKVMGRHKPENIVIEMARENQTTQKGQKNSRERMKRIEEGIKELGSQILKEHPVENTQLQNEKLYLYYLQNGRDMYVDQELDINRLSDYDVDHIVPQSFLKDDSIDNKVLTRSDKARGKSDNVPSEEVVKKMKNYWRQLLNAKLITQRKFDNLTKAERGGLSELDKAGFIKRQLVETRQITKHVAQILDSRMNTKYDENDKLIREVKVITLKSKLVSDFRKDFQFYKVREINNYHHAHDAYLNAVVGTALIKKYPKLESEFVYGDYKVYDVRKMIAKSEQEIGKATAKYFFYSNIMNFFKTEITLANGEIRKRPLIETNGETGEIVWDKGRDFATVRKVLSMPQVNIVKKTEVQTGGFSKESILPKRNSDKLIARKKDWDPKKYGGFDSPTVAYSVLVVAKVEKGKSKKLKSVKELLGITIMERSSFEKNPIDFLEAKGYKEVKKDLIIKLPKYSLFELENGRKRMLASAGELQKGNELALPSKYVNFLYLASHYEKLKGSPEDNEQKQLFVEQHKHYLDEIIEQISEFSKRVILADANLDKVLSAYNKHRDKPIREQAENIIHLFTLTNLGAPAAFKYFDTTIDRKRYTSTKEVLDATLIHQSITGLYETRIDLSQLGGDGGEAAAKEAAAKEAAAKGGTLNIEDEHRLHETSKEPDVSLGSTWLSDFPQAWAETGGMGLAVRQAPLIIPLKATSTPVSIKQYPMSQEARLGIKPHIQRLLDQGILVPCQSPWNTPLLPVKKPGTNDYRPVQDLREVNKRVEDIHPTVPNPYNLLSGLPPSHQWYTVLDLKDAFFCLRLHPTSQPLFAFEWRDPEMGISGQLTWTRLPQGFKNSPTLFNEALHRDLADFRIQHPDLILLQYVDDLLLAATSELDCQQGTRALLQTLGNLGYRASAKKAQICQKQVKYLGYLLKEGQRWLTEARKETVMGQPTPKTPRQLREFLGKAGFCRLFIPGFAEMAAPLYPLTKPGTLFNWGPDQQKAYQEIKQALLTAPALGLPDLTKPFELFVDEKQGYAKGVLTQKLGPWRRPVAYLSKKLDPVAAGWPPCLRMVAAIAVLTKDAGKLTMGQPLVILAPHAVEALVKQPPDRWLSNARMTHYQALLLDTDRVQFGPVVALNPATLLPLPEEGLQHNCLDILAEAHGTRPDLTDQPLPDADHTWYTDGSSLLQEGQRKAGAAVTTETEVIWAKALPAGTSAQRAELIALTQALKMAEGKKLNVYTDSRYAFATAHIHGEIYRRRGWLTSEGKEIKNKDEILALLKALFLPKRLSIIHCPGHQKGHSAEARGNRMADQAARKAAITETPDTSTLLAGKRTADGSEFEKRTADGSEFESPKKKAKVE

SEQ ID NO: 2792 - protein, 2096 aa, synthetic construct
MPAAKRVKLDGGDKKYSIGLDIGTNSVGWAVITDEYKVPSKKFKVLGNTDRHSIKKNLIGALLFDSGETAEATRLKRTARRRYTRRKNRICYLQEIFSNEMAKVDDSFFHRLEESFLVEEDKKHERHPIFGNIVDEVAYHEKYPTIYHLRKKLVDSTDKADLRLIYLALAHMIKFRGHFLIEGDLNPDNSDVDKLFIQLVQTYNQLFEENPINASGVDAKAILSARLSKSRRLENLIAQLPGEKKNGLFGNLIALSLGLTPNFKSNFDLAEDAKLQLSKDTYDDDLDNLLAQIGDQYADLFLAAKNLSDAILLSDILRVNTEITKAPLSASMIKRYDEHHQDLTLLKALVRQQLPEKYKEIFFDQSKNGYAGYIDGGASQEEFYKFIKPILEKMDGTEELLVKLNREDLLRKQRTFDNGSIPHQIHLGELHAILRRQEDFYPFLKDNREKIEKILTFRIPYYVGPLARGNSRFAWMTRKSEETITPWNFEEVVDKGASAQSFIERMTNFDKNLPNEKVLPKHSLLYEYFTVYNELTKVKYVTEGMRKPAFLSGEQKKAIVDLLFKTNRKVTVKQLKEDYFKKIECFDSVEISGVEDRFNASLGTYHDLLKIIKDKDFLDNEENEDILEDIVLTLTLFEDREMIEERLKTYAHLFDDKVMKQLKRRRYTGWGRLSRKLINGIRDKQSGKTILDFLKSDGFANRNFMQLIHDDSLTFKEDIQKAQVSGQGDSLHEHIANLAGSPAIKKGILQTVKVVDELVKVMGRHKPENIVIEMARENQTTQKGQKNSRERMKRIEEGIKELGSQILKEHPVENTQLQNEKLYLYYLQNGRDMYVDQELDINRLSDYDVDHIVPQSFLKDDSIDNKVLTRSDKARGKSDNVPSEEVVKKMKNYWRQLLNAKLITQRKFDNLTKAERGGLSELDKAGFIKRQLVETRQITKHVAQILDSRMNTKYDENDKLIREVKVITLKSKLVSDFRKDFQFYKVREINNYHHAHDAYLNAVVGTALIKKYPKLESEFVYGDYKVYDVRKMIAKSEQEIGKATAKYFFYSNIMNFFKTEITLANGEIRKRPLIETNGETGEIVWDKGRDFATVRKVLSMPQVNIVKKTEVQTGGFSKESILPKRNSDKLIARKKDWDPKKYGGFDSPTVAYSVLVVAKVEKGKSKKLKSVKELLGITIMERSSFEKNPIDFLEAKGYKEVKKDLIIKLPKYSLFELENGRKRMLASAGELQKGNELALPSKYVNFLYLASHYEKLKGSPEDNEQKQLFVEQHKHYLDEIIEQISEFSKRVILADANLDKVLSAYNKHRDKPIREQAENIIHLFTLTNLGAPAAFKYFDTTIDRKRYTSTKEVLDATLIHQSITGLYETRIDLSQLGGDGGEAAAKGSSPAPGGTLNIEDEHRLHETSKEPDVSLGSTWLSDFPQAWAETGGMGLAVRQAPLIIPLKATSTPVSIKQYPMSQEARLGIKPHIQRLLDQGILVPCQSPWNTPLLPVKKPGTNDYRPVQDLREVNKRVEDIHPTVPNPYNLLSGLPPSHQWYTVLDLKDAFFCLRLHPTSQPLFAFEWRDPEMGISGQLTWTRLPQGFKNSPTLFNEALHRDLADFRIQHPDLILLQYVDDLLLAATSELDCQQGTRALLQTLGNLGYRASAKKAQICQKQVKYLGYLLKEGQRWLTEARKETVMGQPTPKTPRQLREFLGKAGFCRLFIPGFAEMAAPLYPLTKPGTLFNWGPDQQKAYQEIKQALLTAPALGLPDLTKPFELFVDEKQGYAKGVLTQKLGPWRRPVAYLSKKLDPVAAGWPPCLRMVAAIAVLTKDAGKLTMGQPLVILAPHAVEALVKQPPDRWLSNARMTHYQALLLDTDRVQFGPVVALNPATLLPLPEEGLQHNCLDILAEAHGTRPDLTDQPLPDADHTWYTDGSSLLQEGQRKAGAAVTTETEVIWAKALPAGTSAQRAELIALTQALKMAEGKKLNVYTDSRYAFATAHIHGEIYRRRGWLTSEGKEIKNKDEILALLKALFLPKRLSIIHCPGHQKGHSAEARGNRMADQAARKAAITETPDTSTLLAGKRTADGSEFEKRTADGSEFESPKKKAKVE

SEQ ID NO: 2793 - protein, 2094 aa, synthetic construct
MPAAKRVKLDGGDKKYSIGLDIGTNSVGWAVITDEYKVPSKKFKVLGNTDRHSIKKNLIGALLFDSGETAEATRLKRTARRRYTRRKNRICYLQEIFSNEMAKVDDSFFHRLEESFLVEEDKKHERHPIFGNIVDEVAYHEKYPTIYHLRKKLVDSTDKADLRLIYLALAHMIKFRGHFLIEGDLNPDNSDVDKLFIQLVQTYNQLFEENPINASGVDAKAILSARLSKSRRLENLIAQLPGEKKNGLFGNLIALSLGLTPNFKSNFDLAEDAKLQLSKDTYDDDLDNLLAQIGDQYADLFLAAKNLSDAILLSDILRVNTEITKAPLSASMIKRYDEHHQDLTLLKALVRQQLPEKYKEIFFDQSKNGYAGYIDGGASQEEFYKFIKPILEKMDGTEELLVKLNREDLLRKQRTFDNGSIPHQIHLGELHAILRRQEDFYPFLKDNREKIEKILTFRIPYYVGPLARGNSRFAWMTRKSEETITPWNFEEVVDKGASAQSFIERMTNFDKNLPNEKVLPKHSLLYEYFTVYNELTKVKYVTEGMRKPAFLSGEQKKAIVDLLFKTNRKVTVKQLKEDYFKKIECFDSVEISGVEDRFNASLGTYHDLLKIIKDKDFLDNEENEDILEDIVLTLTLFEDREMIEERLKTYAHLFDDKVMKQLKRRRYTGWGRLSRKLINGIRDKQSGKTILDFLKSDGFANRNFMQLIHDDSLTFKEDIQKAQVSGQGDSLHEHIANLAGSPAIKKGILQTVKVVDELVKVMGRHKPENIVIEMARENQTTQKGQKNSRERMKRIEEGIKELGSQILKEHPVENTQLQNEKLYLYYLQNGRDMYVDQELDINRLSDYDVDHIVPQSFLKDDSIDNKVLTRSDKARGKSDNVPSEEVVKKMKNYWRQLLNAKLITQRKFDNLTKAERGGLSELDKAGFIKRQLVETRQITKHVAQILDSRMNTKYDENDKLIREVKVITLKSKLVSDFRKDFQFYKVREINNYHHAHDAYLNAVVGTALIKKYPKLESEFVYGDYKVYDVRKMIAKSEQEIGKATAKYFFYSNIMNFFKTEITLANGEIRKRPLIETNGETGEIVWDKGRDFATVRKVLSMPQVNIVKKTEVQTGGFSKESILPKRNSDKLIARKKDWDPKKYGGFDSPTVAYSVLVVAKVEKGKSKKLKSVKELLGITIMERSSFEKNPIDFLEAKGYKEVKKDLIIKLPKYSLFELENGRKRMLASAGELQKGNELALPSKYVNFLYLASHYEKLKGSPEDNEQKQLFVEQHKHYLDEIIEQISEFSKRVILADANLDKVLSAYNKHRDKPIREQAENIIHLFTLTNLGAPAAFKYFDTTIDRKRYTSTKEVLDATLIHQSITGLYETRIDLSQLGGDGGPAPGGGGSSGGTLNIEDEHRLHETSKEPDVSLGSTWLSDFPQAWAETGGMGLAVRQAPLIIPLKATSTPVSIKQYPMSQEARLGIKPHIQRLLDQGILVPCQSPWNTPLLPVKKPGTNDYRPVQDLREVNKRVEDIHPTVPNPYNLLSGLPPSHQWYTVLDLKDAFFCLRLHPTSQPLFAFEWRDPEMGISGQLTWTRLPQGFKNSPTLFNEALHRDLADFRIQHPDLILLQYVDDLLLAATSELDCQQGTRALLQTLGNLGYRASAKKAQICQKQVKYLGYLLKEGQRWLTEARKETVMGQPTPKTPRQLREFLGKAGFCRLFIPGFAEMAAPLYPLTKPGTLFNWGPDQQKAYQEIKQALLTAPALGLPDLTKPFELFVDEKQGYAKGVLTQKLGPWRRPVAYLSKKLDPVAAGWPPCLRMVAAIAVLTKDAGKLTMGQPLVILAPHAVEALVKQPPDRWLSNARMTHYQALLLDTDRVQFGPVVALNPATLLPLPEEGLQHNCLDILAEAHGTRPDLTDQPLPDADHTWYTDGSSLLQEGQRKAGAAVTTETEVIWAKALPAGTSAQRAELIALTQALKMAEGKKLNVYTDSRYAFATAHIHGEIYRRRGWLTSEGKEIKNKDEILALLKALFLPKRLSIIHCPGHQKGHSAEARGNRMADQAARKAAITETPDTSTLLAGKRTADGSEFEKRTADGSEFESPKKKAKVE

SEQ ID NO: 2794 - protein, 2096 aa, synthetic construct
MPAAKRVKLDGGDKKYSIGLDIGTNSVGWAVITDEYKVPSKKFKVLGNTDRHSIKKNLIGALLFDSGETAEATRLKRTARRRYTRRKNRICYLQEIFSNEMAKVDDSFFHRLEESFLVEEDKKHERHPIFGNIVDEVAYHEKYPTIYHLRKKLVDSTDKADLRLIYLALAHMIKFRGHFLIEGDLNPDNSDVDKLFIQLVQTYNQLFEENPINASGVDAKAILSARLSKSRRLENLIAQLPGEKKNGLFGNLIALSLGLTPNFKSNFDLAEDAKLQLSKDTYDDDLDNLLAQIGDQYADLFLAAKNLSDAILLSDILRVNTEITKAPLSASMIKRYDEHHQDLTLLKALVRQQLPEKYKEIFFDQSKNGYAGYIDGGASQEEFYKFIKPILEKMDGTEELLVKLNREDLLRKQRTFDNGSIPHQIHLGELHAILRRQEDFYPFLKDNREKIEKILTFRIPYYVGPLARGNSRFAWMTRKSEETITPWNFEEVVDKGASAQSFIERMTNFDKNLPNEKVLPKHSLLYEYFTVYNELTKVKYVTEGMRKPAFLSGEQKKAIVDLLFKTNRKVTVKQLKEDYFKKIECFDSVEISGVEDRFNASLGTYHDLLKIIKDKDFLDNEENEDILEDIVLTLTLFEDREMIEERLKTYAHLFDDKVMKQLKRRRYTGWGRLSRKLINGIRDKQSGKTILDFLKSDGFANRNFMQLIHDDSLTFKEDIQKAQVSGQGDSLHEHIANLAGSPAIKKGILQTVKVVDELVKVMGRHKPENIVIEMARENQTTQKGQKNSRERMKRIEEGIKELGSQILKEHPVENTQLQNEKLYLYYLQNGRDMYVDQELDINRLSDYDVDHIVPQSFLKDDSIDNKVLTRSDKARGKSDNVPSEEVVKKMKNYWRQLLNAKLITQRKFDNLTKAERGGLSELDKAGFIKRQLVETRQITKHVAQILDSRMNTKYDENDKLIREVKVITLKSKLVSDFRKDFQFYKVREINNYHHAHDAYLNAVVGTALIKKYPKLESEFVYGDYKVYDVRKMIAKSEQEIGKATAKYFFYSNIMNFFKTEITLANGEIRKRPLIETNGETGEIVWDKGRDFATVRKVLSMPQVNIVKKTEVQTGGFSKESILPKRNSDKLIARKKDWDPKKYGGFDSPTVAYSVLVVAKVEKGKSKKLKSVKELLGITIMERSSFEKNPIDFLEAKGYKEVKKDLIIKLPKYSLFELENGRKRMLASAGELQKGNELALPSKYVNFLYLASHYEKLKGSPEDNEQKQLFVEQHKHYLDEIIEQISEFSKRVILADANLDKVLSAYNKHRDKPIREQAENIIHLFTLTNLGAPAAFKYFDTTIDRKRYTSTKEVLDATLIHQSITGLYETRIDLSQLGGDGGEAAAKGGSGGGGGTLNIEDEHRLHETSKEPDVSLGSTWLSDFPQAWAETGGMGLAVRQAPLIIPLKATSTPVSIKQYPMSQEARLGIKPHIQRLLDQGILVPCQSPWNTPLLPVKKPGTNDYRPVQDLREVNKRVEDIHPTVPNPYNLLSGLPPSHQWYTVLDLKDAFFCLRLHPTSQPLFAFEWRDPEMGISGQLTWTRLPQGFKNSPTLFNEALHRDLADFRIQHPDLILLQYVDDLLLAATSELDCQQGTRALLQTLGNLGYRASAKKAQICQKQVKYLGYLLKEGQRWLTEARKETVMGQPTPKTPRQLREFLGKAGFCRLFIPGFAEMAAPLYPLTKPGTLFNWGPDQQKAYQEIKQALLTAPALGLPDLTKPFELFVDEKQGYAKGVLTQKLGPWRRPVAYLSKKLDPVAAGWPPCLRMVAAIAVLTKDAGKLTMGQPLVILAPHAVEALVKQPPDRWLSNARMTHYQALLLDTDRVQFGPVVALNPATLLPLPEEGLQHNCLDILAEAHGTRPDLTDQPLPDADHTWYTDGSSLLQEGQRKAGAAVTTETEVIWAKALPAGTSAQRAELIALTQALKMAEGKKLNVYTDSRYAFATAHIHGEIYRRRGWLTSEGKEIKNKDEILALLKALFLPKRLSIIHCPGHQKGHSAEARGNRMADQAARKAAITETPDTSTLLAGKRTADGSEFEKRTADGSEFESPKKKAKVE

SEQ ID NO: 2795 - protein, 2097 aa, synthetic construct
MPAAKRVKLDGGDKKYSIGLDIGTNSVGWAVITDEYKVPSKKFKVLGNTDRHSIKKNLIGALLFDSGETAEATRLKRTARRRYTRRKNRICYLQEIFSNEMAKVDDSFFHRLEESFLVEEDKKHERHPIFGNIVDEVAYHEKYPTIYHLRKKLVDSTDKADLRLIYLALAHMIKFRGHFLIEGDLNPDNSDVDKLFIQLVQTYNQLFEENPINASGVDAKAILSARLSKSRRLENLIAQLPGEKKNGLFGNLIALSLGLTPNFKSNFDLAEDAKLQLSKDTYDDDLDNLLAQIGDQYADLFLAAKNLSDAILLSDILRVNTEITKAPLSASMIKRYDEHHQDLTLLKALVRQQLPEKYKEIFFDQSKNGYAGYIDGGASQEEFYKFIKPILEKMDGTEELLVKLNREDLLRKQRTFDNGSIPHQIHLGELHAILRRQEDFYPFLKDNREKIEKILTFRIPYYVGPLARGNSRFAWMTRKSEETITPWNFEEVVDKGASAQSFIERMTNFDKNLPNEKVLPKHSLLYEYFTVYNELTKVKYVTEGMRKPAFLSGEQKKAIVDLLFKTNRKVTVKQLKEDYFKKIECFDSVEISGVEDRFNASLGTYHDLLKIIKDKDFLDNEENEDILEDIVLTLTLFEDREMIEERLKTYAHLFDDKVMKQLKRRRYTGWGRLSRKLINGIRDKQSGKTILDFLKSDGFANRNFMQLIHDDSLTFKEDIQKAQVSGQGDSLHEHIANLAGSPAIKKGILQTVKVVDELVKVMGRHKPENIVIEMARENQTTQKGQKNSRERMKRIEEGIKELGSQILKEHPVENTQLQNEKLYLYYLQNGRDMYVDQELDINRLSDYDVDHIVPQSFLKDDSIDNKVLTRSDKARGKSDNVPSEEVVKKMKNYWRQLLNAKLITQRKFDNLTKAERGGLSELDKAGFIKRQLVETRQITKHVAQILDSRMNTKYDENDKLIREVKVITLKSKLVSDFRKDFQFYKVREINNYHHAHDAYLNAVVGTALIKKYPKLESEFVYGDYKVYDVRKMIAKSEQEIGKATAKYFFYSNIMNFFKTEITLANGEIRKRPLIETNGETGEIVWDKGRDFATVRKVLSMPQVNIVKKTEVQTGGFSKESILPKRNSDKLIARKKDWDPKKYGGFDSPTVAYSVLVVAKVEKGKSKKLKSVKELLGITIMERSSFEKNPIDFLEAKGYKEVKKDLIIKLPKYSLFELENGRKRMLASAGELQKGNELALPSKYVNFLYLASHYEKLKGSPEDNEQKQLFVEQHKHYLDEIIEQISEFSKRVILADANLDKVLSAYNKHRDKPIREQAENIIHLFTLTNLGAPAAFKYFDTTIDRKRYTSTKEVLDATLIHQSITGLYETRIDLSQLGGDGGGGSGGSGGSGGSGGTLNIEDEHRLHETSKEPDVSLGSTWLSDFPQAWAETGGMGLAVRQAPLIIPLKATSTPVSIKQYPMSQEARLGIKPHIQRLLDQGILVPCQSPWNTPLLPVKKPGTNDYRPVQDLREVNKRVEDIHPTVPNPYNLLSGLPPSHQWYTVLDLKDAFFCLRLHPTSQPLFAFEWRDPEMGISGQLTWTRLPQGFKNSPTLFNEALHRDLADFRIQHPDLILLQYVDDLLLAATSELDCQQGTRALLQTLGNLGYRASAKKAQICQKQVKYLGYLLKEGQRWLTEARKETVMGQPTPKTPRQLREFLGKAGFCRLFIPGFAEMAAPLYPLTKPGTLFNWGPDQQKAYQEIKQALLTAPALGLPDLTKPFELFVDEKQGYAKGVLTQKLGPWRRPVAYLSKKLDPVAAGWPPCLRMVAAIAVLTKDAGKLTMGQPLVILAPHAVEALVKQPPDRWLSNARMTHYQALLLDTDRVQFGPVVALNPATLLPLPEEGLQHNCLDILAEAHGTRPDLTDQPLPDADHTWYTDGSSLLQEGQRKAGAAVTTETEVIWAKALPAGTSAQRAELIALTQALKMAEGKKLNVYTDSRYAFATAHIHGEIYRRRGWLTSEGKEIKNKDEILALLKALFLPKRLSIIHCPGHQKGHSAEARGNRMADQAARKAAITETPDTSTLLAGKRTADGSEFEKRTADGSEFESPKKKAKVE

SEQ ID NO: 2796 - protein, 2093 aa, synthetic construct
MPAAKRVKLDGGDKKYSIGLDIGTNSVGWAVITDEYKVPSKKFKVLGNTDRHSIKKNLIGALLFDSGETAEATRLKRTARRRYTRRKNRICYLQEIFSNEMAKVDDSFFHRLEESFLVEEDKKHERHPIFGNIVDEVAYHEKYPTIYHLRKKLVDSTDKADLRLIYLALAHMIKFRGHFLIEGDLNPDNSDVDKLFIQLVQTYNQLFEENPINASGVDAKAILSARLSKSRRLENLIAQLPGEKKNGLFGNLIALSLGLTPNFKSNFDLAEDAKLQLSKDTYDDDLDNLLAQIGDQYADLFLAAKNLSDAILLSDILRVNTEITKAPLSASMIKRYDEHHQDLTLLKALVRQQLPEKYKEIFFDQSKNGYAGYIDGGASQEEFYKFIKPILEKMDGTEELLVKLNREDLLRKQRTFDNGSIPHQIHLGELHAILRRQEDFYPFLKDNREKIEKILTFRIPYYVGPLARGNSRFAWMTRKSEETITPWNFEEVVDKGASAQSFIERMTNFDKNLPNEKVLPKHSLLYEYFTVYNELTKVKYVTEGMRKPAFLSGEQKKAIVDLLFKTNRKVTVKQLKEDYFKKIECFDSVEISGVEDRFNASLGTYHDLLKIIKDKDFLDNEENEDILEDIVLTLTLFEDREMIEERLKTYAHLFDDKVMKQLKRRRYTGWGRLSRKLINGIRDKQSGKTILDFLKSDGFANRNFMQLIHDDSLTFKEDIQKAQVSGQGDSLHEHIANLAGSPAIKKGILQTVKVVDELVKVMGRHKPENIVIEMARENQTTQKGQKNSRERMKRIEEGIKELGSQILKEHPVENTQLQNEKLYLYYLQNGRDMYVDQELDINRLSDYDVDHIVPQSFLKDDSIDNKVLTRSDKARGKSDNVPSEEVVKKMKNYWRQLLNAKLITQRKFDNLTKAERGGLSELDKAGFIKRQLVETRQITKHVAQILDSRMNTKYDENDKLIREVKVITLKSKLVSDFRKDFQFYKVREINNYHHAHDAYLNAVVGTALIKKYPKLESEFVYGDYKVYDVRKMIAKSEQEIGKATAKYFFYSNIMNFFKTEITLANGEIRKRPLIETNGETGEIVWDKGRDFATVRKVLSMPQVNIVKKTEVQTGGFSKESILPKRNSDKLIARKKDWDPKKYGGFDSPTVAYSVLVVAKVEKGKSKKLKSVKELLGITIMERSSFEKNPIDFLEAKGYKEVKKDLIIKLPKYSLFELENGRKRMLASAGELQKGNELALPSKYVNFLYLASHYEKLKGSPEDNEQKQLFVEQHKHYLDEIIEQISEFSKRVILADANLDKVLSAYNKHRDKPIREQAENIIHLFTLTNLGAPAAFKYFDTTIDRKRYTSTKEVLDATLIHQSITGLYETRIDLSQLGGDGGEAAAKGGGGGTLNIEDEHRLHETSKEPDVSLGSTWLSDFPQAWAETGGMGLAVRQAPLIIPLKATSTPVSIKQYPMSQEARLGIKPHIQRLLDQGILVPCQSPWNTPLLPVKKPGTNDYRPVQDLREVNKRVEDIHPTVPNPYNLLSGLPPSHQWYTVLDLKDAFFCLRLHPTSQPLFAFEWRDPEMGISGQLTWTRLPQGFKNSPTLFNEALHRDLADFRIQHPDLILLQYVDDLLLAATSELDCQQGTRALLQTLGNLGYRASAKKAQICQKQVKYLGYLLKEGQRWLTEARKETVMGQPTPKTPRQLREFLGKAGFCRLFIPGFAEMAAPLYPLTKPGTLFNWGPDQQKAYQEIKQALLTAPALGLPDLTKPFELFVDEKQGYAKGVLTQKLGPWRRPVAYLSKKLDPVAAGWPPCLRMVAAIAVLTKDAGKLTMGQPLVILAPHAVEALVKQPPDRWLSNARMTHYQALLLDTDRVQFGPVVALNPATLLPLPEEGLQHNCLDILAEAHGTRPDLTDQPLPDADHTWYTDGSSLLQEGQRKAGAAVTTETEVIWAKALPAGTSAQRAELIALTQALKMAEGKKLNVYTDSRYAFATAHIHGEIYRRRGWLTSEGKEIKNKDEILALLKALFLPKRLSIIHCPGHQKGHSAEARGNRMADQAARKAAITETPDTSTLLAGKRTADGSEFEKRTADGSEFESPKKKAKVE

SEQ ID NO: 2797 - protein, 2098 aa, synthetic construct
MPAAKRVKLDGGDKKYSIGLDIGTNSVGWAVITDEYKVPSKKFKVLGNTDRHSIKKNLIGALLFDSGETAEATRLKRTARRRYTRRKNRICYLQEIFSNEMAKVDDSFFHRLEESFLVEEDKKHERHPIFGNIVDEVAYHEKYPTIYHLRKKLVDSTDKADLRLIYLALAHMIKFRGHFLIEGDLNPDNSDVDKLFIQLVQTYNQLFEENPINASGVDAKAILSARLSKSRRLENLIAQLPGEKKNGLFGNLIALSLGLTPNFKSNFDLAEDAKLQLSKDTYDDDLDNLLAQIGDQYADLFLAAKNLSDAILLSDILRVNTEITKAPLSASMIKRYDEHHQDLTLLKALVRQQLPEKYKEIFFDQSKNGYAGYIDGGASQEEFYKFIKPILEKMDGTEELLVKLNREDLLRKQRTFDNGSIPHQIHLGELHAILRRQEDFYPFLKDNREKIEKILTFRIPYYVGPLARGNSRFAWMTRKSEETITPWNFEEVVDKGASAQSFIERMTNFDKNLPNEKVLPKHSLLYEYFTVYNELTKVKYVTEGMRKPAFLSGEQKKAIVDLLFKTNRKVTVKQLKEDYFKKIECFDSVEISGVEDRFNASLGTYHDLLKIIKDKDFLDNEENEDILEDIVLTLTLFEDREMIEERLKTYAHLFDDKVMKQLKRRRYTGWGRLSRKLINGIRDKQSGKTILDFLKSDGFANRNFMQLIHDDSLTFKEDIQKAQVSGQGDSLHEHIANLAGSPAIKKGILQTVKVVDELVKVMGRHKPENIVIEMARENQTTQKGQKNSRERMKRIEEGIKELGSQILKEHPVENTQLQNEKLYLYYLQNGRDMYVDQELDINRLSDYDVDHIVPQSFLKDDSIDNKVLTRSDKARGKSDNVPSEEVVKKMKNYWRQLLNAKLITQRKFDNLTKAERGGLSELDKAGFIKRQLVETRQITKHVAQILDSRMNTKYDENDKLIREVKVITLKSKLVSDFRKDFQFYKVREINNYHHAHDAYLNAVVGTALIKKYPKLESEFVYGDYKVYDVRKMIAKSEQEIGKATAKYFFYSNIMNFFKTEITLANGEIRKRPLIETNGETGEIVWDKGRDFATVRKVLSMPQVNIVKKTEVQTGGFSKESILPKRNSDKLIARKKDWDPKKYGGFDSPTVAYSVLVVAKVEKGKSKKLKSVKELLGITIMERSSFEKNPIDFLEAKGYKEVKKDLIIKLPKYSLFELENGRKRMLASAGELQKGNELALPSKYVNFLYLASHYEKLKGSPEDNEQKQLFVEQHKHYLDEIIEQISEFSKRVILADANLDKVLSAYNKHRDKPIREQAENIIHLFTLTNLGAPAAFKYFDTTIDRKRYTSTKEVLDATLIHQSITGLYETRIDLSQLGGDGGPAPAPAPAPAPAPGGTLNIEDEHRLHETSKEPDVSLGSTWLSDFPQAWAETGGMGLAVRQAPLIIPLKATSTPVSIKQYPMSQEARLGIKPHIQRLLDQGILVPCQSPWNTPLLPVKKPGTNDYRPVQDLREVNKRVEDIHPTVPNPYNLLSGLPPSHQWYTVLDLKDAFFCLRLHPTSQPLFAFEWRDPEMGISGQLTWTRLPQGFKNSPTLFNEALHRDLADFRIQHPDLILLQYVDDLLLAATSELDCQQGTRALLQTLGNLGYRASAKKAQICQKQVKYLGYLLKEGQRWLTEARKETVMGQPTPKTPRQLREFLGKAGFCRLFIPGFAEMAAPLYPLTKPGTLFNWGPDQQKAYQEIKQALLTAPALGLPDLTKPFELFVDEKQGYAKGVLTQKLGPWRRPVAYLSKKLDPVAAGWPPCLRMVAAIAVLTKDAGKLTMGQPLVILAPHAVEALVKQPPDRWLSNARMTHYQALLLDTDRVQFGPVVALNPATLLPLPEEGLQHNCLDILAEAHGTRPDLTDQPLPDADHTWYTDGSSLLQEGQRKAGAAVTTETEVIWAKALPAGTSAQRAELIALTQALKMAEGKKLNVYTDSRYAFATAHIHGEIYRRRGWLTSEGKEIKNKDEILALLKALFLPKRLSIIHCPGHQKGHSAEARGNRMADQAARKAAITETPDTSTLLAGKRTADGSEFEKRTADGSEFESPKKKAKVE

SEQ ID NO: 2798 - protein, 2096 aa, synthetic construct
MPAAKRVKLDGGDKKYSIGLDIGTNSVGWAVITDEYKVPSKKFKVLGNTDRHSIKKNLIGALLFDSGETAEATRLKRTARRRYTRRKNRICYLQEIFSNEMAKVDDSFFHRLEESFLVEEDKKHERHPIFGNIVDEVAYHEKYPTIYHLRKKLVDSTDKADLRLIYLALAHMIKFRGHFLIEGDLNPDNSDVDKLFIQLVQTYNQLFEENPINASGVDAKAILSARLSKSRRLENLIAQLPGEKKNGLFGNLIALSLGLTPNFKSNFDLAEDAKLQLSKDTYDDDLDNLLAQIGDQYADLFLAAKNLSDAILLSDILRVNTEITKAPLSASMIKRYDEHHQDLTLLKALVRQQLPEKYKEIFFDQSKNGYAGYIDGGASQEEFYKFIKPILEKMDGTEELLVKLNREDLLRKQRTFDNGSIPHQIHLGELHAILRRQEDFYPFLKDNREKIEKILTFRIPYYVGPLARGNSRFAWMTRKSEETITPWNFEEVVDKGASAQSFIERMTNFDKNLPNEKVLPKHSLLYEYFTVYNELTKVKYVTEGMRKPAFLSGEQKKAIVDLLFKTNRKVTVKQLKEDYFKKIECFDSVEISGVEDRFNASLGTYHDLLKIIKDKDFLDNEENEDILEDIVLTLTLFEDREMIEERLKTYAHLFDDKVMKQLKRRRYTGWGRLSRKLINGIRDKQSGKTILDFLKSDGFANRNFMQLIHDDSLTFKEDIQKAQVSGQGDSLHEHIANLAGSPAIKKGILQTVKVVDELVKVMGRHKPENIVIEMARENQTTQKGQKNSRERMKRIEEGIKELGSQILKEHPVENTQLQNEKLYLYYLQNGRDMYVDQELDINRLSDYDVDHIVPQSFLKDDSIDNKVLTRSDKARGKSDNVPSEEVVKKMKNYWRQLLNAKLITQRKFDNLTKAERGGLSELDKAGFIKRQLVETRQITKHVAQILDSRMNTKYDENDKLIREVKVITLKSKLVSDFRKDFQFYKVREINNYHHAHDAYLNAVVGTALIKKYPKLESEFVYGDYKVYDVRKMIAKSEQEIGKATAKYFFYSNIMNFFKTEITLANGEIRKRPLIETNGETGEIVWDKGRDFATVRKVLSMPQVNIVKKTEVQTGGFSKESILPKRNSDKLIARKKDWDPKKYGGFDSPTVAYSVLVVAKVEKGKSKKLKSVKELLGITIMERSSFEKNPIDFLEAKGYKEVKKDLIIKLPKYSLFELENGRKRMLASAGELQKGNELALPSKYVNFLYLASHYEKLKGSPEDNEQKQLFVEQHKHYLDEIIEQISEFSKRVILADANLDKVLSAYNKHRDKPIREQAENIIHLFTLTNLGAPAAFKYFDTTIDRKRYTSTKEVLDATLIHQSITGLYETRIDLSQLGGDGGPAPGSSEAAAKGGTLNIEDEHRLHETSKEPDVSLGSTWLSDFPQAWAETGGMGLAVRQAPLIIPLKATSTPVSIKQYPMSQEARLGIKPHIQRLLDQGILVPCQSPWNTPLLPVKKPGTNDYRPVQDLREVNKRVEDIHPTVPNPYNLLSGLPPSHQWYTVLDLKDAFFCLRLHPTSQPLFAFEWRDPEMGISGQLTWTRLPQGFKNSPTLFNEALHRDLADFRIQHPDLILLQYVDDLLLAATSELDCQQGTRALLQTLGNLGYRASAKKAQICQKQVKYLGYLLKEGQRWLTEARKETVMGQPTPKTPRQLREFLGKAGFCRLFIPGFAEMAAPLYPLTKPGTLFNWGPDQQKAYQEIKQALLTAPALGLPDLTKPFELFVDEKQGYAKGVLTQKLGPWRRPVAYLSKKLDPVAAGWPPCLRMVAAIAVLTKDAGKLTMGQPLVILAPHAVEALVKQPPDRWLSNARMTHYQALLLDTDRVQFGPVVALNPATLLPLPEEGLQHNCLDILAEAHGTRPDLTDQPLPDADHTWYTDGSSLLQEGQRKAGAAVTTETEVIWAKALPAGTSAQRAELIALTQALKMAEGKKLNVYTDSRYAFATAHIHGEIYRRRGWLTSEGKEIKNKDEILALLKALFLPKRLSIIHCPGHQKGHSAEARGNRMADQAARKAAITETPDTSTLLAGKRTADGSEFEKRTADGSEFESPKKKAKVE

SEQ ID NO: 2799 - protein, 2096 aa, synthetic construct
MPAAKRVKLDGGDKKYSIGLDIGTNSVGWAVITDEYKVPSKKFKVLGNTDRHSIKKNLIGALLFDSGETAEATRLKRTARRRYTRRKNRICYLQEIFSNEMAKVDDSFFHRLEESFLVEEDKKHERHPIFGNIVDEVAYHEKYPTIYHLRKKLVDSTDKADLRLIYLALAHMIKFRGHFLIEGDLNPDNSDVDKLFIQLVQTYNQLFEENPINASGVDAKAILSARLSKSRRLENLIAQLPGEKKNGLFGNLIALSLGLTPNFKSNFDLAEDAKLQLSKDTYDDDLDNLLAQIGDQYADLFLAAKNLSDAILLSDILRVNTEITKAPLSASMIKRYDEHHQDLTLLKALVRQQLPEKYKEIFFDQSKNGYAGYIDGGASQEEFYKFIKPILEKMDGTEELLVKLNREDLLRKQRTFDNGSIPHQIHLGELHAILRRQEDFYPFLKDNREKIEKILTFRIPYYVGPLARGNSRFAWMTRKSEETITPWNFEEVVDKGASAQSFIERMTNFDKNLPNEKVLPKHSLLYEYFTVYNELTKVKYVTEGMRKPAFLSGEQKKAIVDLLFKTNRKVTVKQLKEDYFKKIECFDSVEISGVEDRFNASLGTYHDLLKIIKDKDFLDNEENEDILEDIVLTLTLFEDREMIEERLKTYAHLFDDKVMKQLKRRRYTGWGRLSRKLINGIRDKQSGKTILDFLKSDGFANRNFMQLIHDDSLTFKEDIQKAQVSGQGDSLHEHIANLAGSPAIKKGILQTVKVVDELVKVMGRHKPENIVIEMARENQTTQKGQKNSRERMKRIEEGIKELGSQILKEHPVENTQLQNEKLYLYYLQNGRDMYVDQELDINRLSDYDVDHIVPQSFLKDDSIDNKVLTRSDKARGKSDNVPSEEVVKKMKNYWRQLLNAKLITQRKFDNLTKAERGGLSELDKAGFIKRQLVETRQITKHVAQILDSRMNTKYDENDKLIREVKVITLKSKLVSDFRKDFQFYKVREINNYHHAHDAYLNAVVGTALIKKYPKLESEFVYGDYKVYDVRKMIAKSEQEIGKATAKYFFYSNIMNFFKTEITLANGEIRKRPLIETNGETGEIVWDKGRDFATVRKVLSMPQVNIVKKTEVQTGGFSKESILPKRNSDKLIARKKDWDPKKYGGFDSPTVAYSVLVVAKVEKGKSKKLKSVKELLGITIMERSSFEKNPIDFLEAKGYKEVKKDLIIKLPKYSLFELENGRKRMLASAGELQKGNELALPSKYVNFLYLASHYEKLKGSPEDNEQKQLFVEQHKHYLDEIIEQISEFSKRVILADANLDKVLSAYNKHRDKPIREQAENIIHLFTLTNLGAPAAFKYFDTTIDRKRYTSTKEVLDATLIHQSITGLYETRIDLSQLGGDGGEAAAKGSSGGSGGTLNIEDEHRLHETSKEPDVSLGSTWLSDFPQAWAETGGMGLAVRQAPLIIPLKATSTPVSIKQYPMSQEARLGIKPHIQRLLDQGILVPCQSPWNTPLLPVKKPGTNDYRPVQDLREVNKRVEDIHPTVPNPYNLLSGLPPSHQWYTVLDLKDAFFCLRLHPTSQPLFAFEWRDPEMGISGQLTWTRLPQGFKNSPTLFNEALHRDLADFRIQHPDLILLQYVDDLLLAATSELDCQQGTRALLQTLGNLGYRASAKKAQICQKQVKYLGYLLKEGQRWLTEARKETVMGQPTPKTPRQLREFLGKAGFCRLFIPGFAEMAAPLYPLTKPGTLFNWGPDQQKAYQEIKQALLTAPALGLPDLTKPFELFVDEKQGYAKGVLTQKLGPWRRPVAYLSKKLDPVAAGWPPCLRMVAAIAVLTKDAGKLTMGQPLVILAPHAVEALVKQPPDRWLSNARMTHYQALLLDTDRVQFGPVVALNPATLLPLPEEGLQHNCLDILAEAHGTRPDLTDQPLPDADHTWYTDGSSLLQEGQRKAGAAVTTETEVIWAKALPAGTSAQRAELIALTQALKMAEGKKLNVYTDSRYAFATAHIHGEIYRRRGWLTSEGKEIKNKDEILALLKALFLPKRLSIIHCPGHQKGHSAEARGNRMADQAARKAAITETPDTSTLLAGKRTADGSEFEKRTADGSEFESPKKKAKVE

SEQ ID NO: 2800 - protein, 2094 aa, synthetic construct
MPAAKRVKLDGGDKKYSIGLDIGTNSVGWAVITDEYKVPSKKFKVLGNTDRHSIKKNLIGALLFDSGETAEATRLKRTARRRYTRRKNRICYLQEIFSNEMAKVDDSFFHRLEESFLVEEDKKHERHPIFGNIVDEVAYHEKYPTIYHLRKKLVDSTDKADLRLIYLALAHMIKFRGHFLIEGDLNPDNSDVDKLFIQLVQTYNQLFEENPINASGVDAKAILSARLSKSRRLENLIAQLPGEKKNGLFGNLIALSLGLTPNFKSNFDLAEDAKLQLSKDTYDDDLDNLLAQIGDQYADLFLAAKNLSDAILLSDILRVNTEITKAPLSASMIKRYDEHHQDLTLLKALVRQQLPEKYKEIFFDQSKNGYAGYIDGGASQEEFYKFIKPILEKMDGTEELLVKLNREDLLRKQRTFDNGSIPHQIHLGELHAILRRQEDFYPFLKDNREKIEKILTFRIPYYVGPLARGNSRFAWMTRKSEETITPWNFEEVVDKGASAQSFIERMTNFDKNLPNEKVLPKHSLLYEYFTVYNELTKVKYVTEGMRKPAFLSGEQKKAIVDLLFKTNRKVTVKQLKEDYFKKIECFDSVEISGVEDRFNASLGTYHDLLKIIKDKDFLDNEENEDILEDIVLTLTLFEDREMIEERLKTYAHLFDDKVMKQLKRRRYTGWGRLSRKLINGIRDKQSGKTILDFLKSDGFANRNFMQLIHDDSLTFKEDIQKAQVSGQGDSLHEHIANLAGSPAIKKGILQTVKVVDELVKVMGRHKPENIVIEMARENQTTQKGQKNSRERMKRIEEGIKELGSQILKEHPVENTQLQNEKLYLYYLQNGRDMYVDQELDINRLSDYDVDHIVPQSFLKDDSIDNKVLTRSDKARGKSDNVPSEEVVKKMKNYWRQLLNAKLITQRKFDNLTKAERGGLSELDKAGFIKRQLVETRQITKHVAQILDSRMNTKYDENDKLIREVKVITLKSKLVSDFRKDFQFYKVREINNYHHAHDAYLNAVVGTALIKKYPKLESEFVYGDYKVYDVRKMIAKSEQEIGKATAKYFFYSNIMNFFKTEITLANGEIRKRPLIETNGETGEIVWDKGRDFATVRKVLSMPQVNIVKKTEVQTGGFSKESILPKRNSDKLIARKKDWDPKKYGGFDSPTVAYSVLVVAKVEKGKSKKLKSVKELLGITIMERSSFEKNPIDFLEAKGYKEVKKDLIIKLPKYSLFELENGRKRMLASAGELQKGNELALPSKYVNFLYLASHYEKLKGSPEDNEQKQLFVEQHKHYLDEIIEQISEFSKRVILADANLDKVLSAYNKHRDKPIREQAENIIHLFTLTNLGAPAAFKYFDTTIDRKRYTSTKEVLDATLIHQSITGLYETRIDLSQLGGDGGGGGPAPGGSGGTLNIEDEHRLHETSKEPDVSLGSTWLSDFPQAWAETGGMGLAVRQAPLIIPLKATSTPVSIKQYPMSQEARLGIKPHIQRLLDQGILVPCQSPWNTPLLPVKKPGTNDYRPVQDLREVNKRVEDIHPTVPNPYNLLSGLPPSHQWYTVLDLKDAFFCLRLHPTSQPLFAFEWRDPEMGISGQLTWTRLPQGFKNSPTLFNEALHRDLADFRIQHPDLILLQYVDDLLLAATSELDCQQGTRALLQTLGNLGYRASAKKAQICQKQVKYLGYLLKEGQRWLTEARKETVMGQPTPKTPRQLREFLGKAGFCRLFIPGFAEMAAPLYPLTKPGTLFNWGPDQQKAYQEIKQALLTAPALGLPDLTKPFELFVDEKQGYAKGVLTQKLGPWRRPVAYLSKKLDPVAAGWPPCLRMVAAIAVLTKDAGKLTMGQPLVILAPHAVEALVKQPPDRWLSNARMTHYQALLLDTDRVQFGPVVALNPATLLPLPEEGLQHNCLDILAEAHGTRPDLTDQPLPDADHTWYTDGSSLLQEGQRKAGAAVTTETEVIWAKALPAGTSAQRAELIALTQALKMAEGKKLNVYTDSRYAFATAHIHGEIYRRRGWLTSEGKEIKNKDEILALLKALFLPKRLSIIHCPGHQKGHSAEARGNRMADQAARKAAITETPDTSTLLAGKRTADGSEFEKRTADGSEFESPKKKAKVE

SEQ ID NO: 2801 - protein, 2094 aa, synthetic construct
MPAAKRVKLDGGDKKYSIGLDIGTNSVGWAVITDEYKVPSKKFKVLGNTDRHSIKKNLIGALLFDSGETAEATRLKRTARRRYTRRKNRICYLQEIFSNEMAKVDDSFFHRLEESFLVEEDKKHERHPIFGNIVDEVAYHEKYPTIYHLRKKLVDSTDKADLRLIYLALAHMIKFRGHFLIEGDLNPDNSDVDKLFIQLVQTYNQLFEENPINASGVDAKAILSARLSKSRRLENLIAQLPGEKKNGLFGNLIALSLGLTPNFKSNFDLAEDAKLQLSKDTYDDDLDNLLAQIGDQYADLFLAAKNLSDAILLSDILRVNTEITKAPLSASMIKRYDEHHQDLTLLKALVRQQLPEKYKEIFFDQSKNGYAGYIDGGASQEEFYKFIKPILEKMDGTEELLVKLNREDLLRKQRTFDNGSIPHQIHLGELHAILRRQEDFYPFLKDNREKIEKILTFRIPYYVGPLARGNSRFAWMTRKSEETITPWNFEEVVDKGASAQSFIERMTNFDKNLPNEKVLPKHSLLYEYFTVYNELTKVKYVTEGMRKPAFLSGEQKKAIVDLLFKTNRKVTVKQLKEDYFKKIECFDSVEISGVEDRFNASLGTYHDLLKIIKDKDFLDNEENEDILEDIVLTLTLFEDREMIEERLKTYAHLFDDKVMKQLKRRRYTGWGRLSRKLINGIRDKQSGKTILDFLKSDGFANRNFMQLIHDDSLTFKEDIQKAQVSGQGDSLHEHIANLAGSPAIKKGILQTVKVVDELVKVMGRHKPENIVIEMARENQTTQKGQKNSRERMKRIEEGIKELGSQILKEHPVENTQLQNEKLYLYYLQNGRDMYVDQELDINRLSDYDVDHIVPQSFLKDDSIDNKVLTRSDKARGKSDNVPSEEVVKKMKNYWRQLLNAKLITQRKFDNLTKAERGGLSELDKAGFIKRQLVETRQITKHVAQILDSRMNTKYDENDKLIREVKVITLKSKLVSDFRKDFQFYKVREINNYHHAHDAYLNAVVGTALIKKYPKLESEFVYGDYKVYDVRKMIAKSEQEIGKATAKYFFYSNIMNFFKTEITLANGEIRKRPLIETNGETGEIVWDKGRDFATVRKVLSMPQVNIVKKTEVQTGGFSKESILPKRNSDKLIARKKDWDPKKYGGFDSPTVAYSVLVVAKVEKGKSKKLKSVKELLGITIMERSSFEKNPIDFLEAKGYKEVKKDLIIKLPKYSLFELENGRKRMLASAGELQKGNELALPSKYVNFLYLASHYEKLKGSPEDNEQKQLFVEQHKHYLDEIIEQISEFSKRVILADANLDKVLSAYNKHRDKPIREQAENIIHLFTLTNLGAPAAFKYFDTTIDRKRYTSTKEVLDATLIHQSITGLYETRIDLSQLGGDGGGGSPAPGGGGGTLNIEDEHRLHETSKEPDVSLGSTWLSDFPQAWAETGGMGLAVRQAPLIIPLKATSTPVSIKQYPMSQEARLGIKPHIQRLLDQGILVPCQSPWNTPLLPVKKPGTNDYRPVQDLREVNKRVEDIHPTVPNPYNLLSGLPPSHQWYTVLDLKDAFFCLRLHPTSQPLFAFEWRDPEMGISGQLTWTRLPQGFKNSPTLFNEALHRDLADFRIQHPDLILLQYVDDLLLAATSELDCQQGTRALLQTLGNLGYRASAKKAQICQKQVKYLGYLLKEGQRWLTEARKETVMGQPTPKTPRQLREFLGKAGFCRLFIPGFAEMAAPLYPLTKPGTLFNWGPDQQKAYQEIKQALLTAPALGLPDLTKPFELFVDEKQGYAKGVLTQKLGPWRRPVAYLSKKLDPVAAGWPPCLRMVAAIAVLTKDAGKLTMGQPLVILAPHAVEALVKQPPDRWLSNARMTHYQALLLDTDRVQFGPVVALNPATLLPLPEEGLQHNCLDILAEAHGTRPDLTDQPLPDADHTWYTDGSSLLQEGQRKAGAAVTTETEVIWAKALPAGTSAQRAELIALTQALKMAEGKKLNVYTDSRYAFATAHIHGEIYRRRGWLTSEGKEIKNKDEILALLKALFLPKRLSIIHCPGHQKGHSAEARGNRMADQAARKAAITETPDTSTLLAGKRTADGSEFEKRTADGSEFESPKKKAKVE

SEQ ID NO: 2802 - protein, 2100 aa, synthetic construct
MPAAKRVKLDGGDKKYSIGLDIGTNSVGWAVITDEYKVPSKKFKVLGNTDRHSIKKNLIGALLFDSGETAEATRLKRTARRRYTRRKNRICYLQEIFSNEMAKVDDSFFHRLEESFLVEEDKKHERHPIFGNIVDEVAYHEKYPTIYHLRKKLVDSTDKADLRLIYLALAHMIKFRGHFLIEGDLNPDNSDVDKLFIQLVQTYNQLFEENPINASGVDAKAILSARLSKSRRLENLIAQLPGEKKNGLFGNLIALSLGLTPNFKSNFDLAEDAKLQLSKDTYDDDLDNLLAQIGDQYADLFLAAKNLSDAILLSDILRVNTEITKAPLSASMIKRYDEHHQDLTLLKALVRQQLPEKYKEIFFDQSKNGYAGYIDGGASQEEFYKFIKPILEKMDGTEELLVKLNREDLLRKQRTFDNGSIPHQIHLGELHAILRRQEDFYPFLKDNREKIEKILTFRIPYYVGPLARGNSRFAWMTRKSEETITPWNFEEVVDKGASAQSFIERMTNFDKNLPNEKVLPKHSLLYEYFTVYNELTKVKYVTEGMRKPAFLSGEQKKAIVDLLFKTNRKVTVKQLKEDYFKKIECFDSVEISGVEDRFNASLGTYHDLLKIIKDKDFLDNEENEDILEDIVLTLTLFEDREMIEERLKTYAHLFDDKVMKQLKRRRYTGWGRLSRKLINGIRDKQSGKTILDFLKSDGFANRNFMQLIHDDSLTFKEDIQKAQVSGQGDSLHEHIANLAGSPAIKKGILQTVKVVDELVKVMGRHKPENIVIEMARENQTTQKGQKNSRERMKRIEEGIKELGSQILKEHPVENTQLQNEKLYLYYLQNGRDMYVDQELDINRLSDYDVDHIVPQSFLKDDSIDNKVLTRSDKARGKSDNVPSEEVVKKMKNYWRQLLNAKLITQRKFDNLTKAERGGLSELDKAGFIKRQLVETRQITKHVAQILDSRMNTKYDENDKLIREVKVITLKSKLVSDFRKDFQFYKVREINNYHHAHDAYLNAVVGTALIKKYPKLESEFVYGDYKVYDVRKMIAKSEQEIGKATAKYFFYSNIMNFFKTEITLANGEIRKRPLIETNGETGEIVWDKGRDFATVRKVLSMPQVNIVKKTEVQTGGFSKESILPKRNSDKLIARKKDWDPKKYGGFDSPTVAYSVLVVAKVEKGKSKKLKSVKELLGITIMERSSFEKNPIDFLEAKGYKEVKKDLIIKLPKYSLFELENGRKRMLASAGELQKGNELALPSKYVNFLYLASHYEKLKGSPEDNEQKQLFVEQHKHYLDEIIEQISEFSKRVILADANLDKVLSAYNKHRDKPIREQAENIIHLFTLTNLGAPAAFKYFDTTIDRKRYTSTKEVLDATLIHQSITGLYETRIDLSQLGGDGGGSSGSSGSSGSSGSSGGTLNIEDEHRLHETSKEPDVSLGSTWLSDFPQAWAETGGMGLAVRQAPLIIPLKATSTPVSIKQYPMSQEARLGIKPHIQRLLDQGILVPCQSPWNTPLLPVKKPGTNDYRPVQDLREVNKRVEDIHPTVPNPYNLLSGLPPSHQWYTVLDLKDAFFCLRLHPTSQPLFAFEWRDPEMGISGQLTWTRLPQGFKNSPTLFNEALHRDLADFRIQHPDLILLQYVDDLLLAATSELDCQQGTRALLQTLGNLGYRASAKKAQICQKQVKYLGYLLKEGQRWLTEARKETVMGQPTPKTPRQLREFLGKAGFCRLFIPGFAEMAAPLYPLTKPGTLFNWGPDQQKAYQEIKQALLTAPALGLPDLTKPFELFVDEKQGYAKGVLTQKLGPWRRPVAYLSKKLDPVAAGWPPCLRMVAAIAVLTKDAGKLTMGQPLVILAPHAVEALVKQPPDRWLSNARMTHYQALLLDTDRVQFGPVVALNPATLLPLPEEGLQHNCLDILAEAHGTRPDLTDQPLPDADHTWYTDGSSLLQEGQRKAGAAVTTETEVIWAKALPAGTSAQRAELIALTQALKMAEGKKLNVYTDSRYAFATAHIHGEIYRRRGWLTSEGKEIKNKDEILALLKALFLPKRLSIIHCPGHQKGHSAEARGNRMADQAARKAAITETPDTSTLLAGKRTADGSEFEKRTADGSEFESPKKKAKVE

SEQ ID NO: 2803 - protein, 2110 aa, synthetic construct
MPAAKRVKLDGGDKKYSIGLDIGTNSVGWAVITDEYKVPSKKFKVLGNTDRHSIKKNLIGALLFDSGETAEATRLKRTARRRYTRRKNRICYLQEIFSNEMAKVDDSFFHRLEESFLVEEDKKHERHPIFGNIVDEVAYHEKYPTIYHLRKKLVDSTDKADLRLIYLALAHMIKFRGHFLIEGDLNPDNSDVDKLFIQLVQTYNQLFEENPINASGVDAKAILSARLSKSRRLENLIAQLPGEKKNGLFGNLIALSLGLTPNFKSNFDLAEDAKLQLSKDTYDDDLDNLLAQIGDQYADLFLAAKNLSDAILLSDILRVNTEITKAPLSASMIKRYDEHHQDLTLLKALVRQQLPEKYKEIFFDQSKNGYAGYIDGGASQEEFYKFIKPILEKMDGTEELLVKLNREDLLRKQRTFDNGSIPHQIHLGELHAILRRQEDFYPFLKDNREKIEKILTFRIPYYVGPLARGNSRFAWMTRKSEETITPWNFEEVVDKGASAQSFIERMTNFDKNLPNEKVLPKHSLLYEYFTVYNELTKVKYVTEGMRKPAFLSGEQKKAIVDLLFKTNRKVTVKQLKEDYFKKIECFDSVEISGVEDRFNASLGTYHDLLKIIKDKDFLDNEENEDILEDIVLTLTLFEDREMIEERLKTYAHLFDDKVMKQLKRRRYTGWGRLSRKLINGIRDKQSGKTILDFLKSDGFANRNFMQLIHDDSLTFKEDIQKAQVSGQGDSLHEHIANLAGSPAIKKGILQTVKVVDELVKVMGRHKPENIVIEMARENQTTQKGQKNSRERMKRIEEGIKELGSQILKEHPVENTQLQNEKLYLYYLQNGRDMYVDQELDINRLSDYDVDHIVPQSFLKDDSIDNKVLTRSDKARGKSDNVPSEEVVKKMKNYWRQLLNAKLITQRKFDNLTKAERGGLSELDKAGFIKRQLVETRQITKHVAQILDSRMNTKYDENDKLIREVKVITLKSKLVSDFRKDFQFYKVREINNYHHAHDAYLNAVVGTALIKKYPKLESEFVYGDYKVYDVRKMIAKSEQEIGKATAKYFFYSNIMNFFKTEITLANGEIRKRPLIETNGETGEIVWDKGRDFATVRKVLSMPQVNIVKKTEVQTGGFSKESILPKRNSDKLIARKKDWDPKKYGGFDSPTVAYSVLVVAKVEKGKSKKLKSVKELLGITIMERSSFEKNPIDFLEAKGYKEVKKDLIIKLPKYSLFELENGRKRMLASAGELQKGNELALPSKYVNFLYLASHYEKLKGSPEDNEQKQLFVEQHKHYLDEIIEQISEFSKRVILADANLDKVLSAYNKHRDKPIREQAENIIHLFTLTNLGAPAAFKYFDTTIDRKRYTSTKEVLDATLIHQSITGLYETRIDLSQLGGDGGEAAAKEAAAKEAAAKEAAAKEAAAKGGTLNIEDEHRLHETSKEPDVSLGSTWLSDFPQAWAETGGMGLAVRQAPLIIPLKATSTPVSIKQYPMSQEARLGIKPHIQRLLDQGILVPCQSPWNTPLLPVKKPGTNDYRPVQDLREVNKRVEDIHPTVPNPYNLLSGLPPSHQWYTVLDLKDAFFCLRLHPTSQPLFAFEWRDPEMGISGQLTWTRLPQGFKNSPTLFNEALHRDLADFRIQHPDLILLQYVDDLLLAATSELDCQQGTRALLQTLGNLGYRASAKKAQICQKQVKYLGYLLKEGQRWLTEARKETVMGQPTPKTPRQLREFLGKAGFCRLFIPGFAEMAAPLYPLTKPGTLFNWGPDQQKAYQEIKQALLTAPALGLPDLTKPFELFVDEKQGYAKGVLTQKLGPWRRPVAYLSKKLDPVAAGWPPCLRMVAAIAVLTKDAGKLTMGQPLVILAPHAVEALVKQPPDRWLSNARMTHYQALLLDTDRVQFGPVVALNPATLLPLPEEGLQHNCLDILAEAHGTRPDLTDQPLPDADHTWYTDGSSLLQEGQRKAGAAVTTETEVIWAKALPAGTSAQRAELIALTQALKMAEGKKLNVYTDSRYAFATAHIHGEIYRRRGWLTSEGKEIKNKDEILALLKALFLPKRLSIIHCPGHQKGHSAEARGNRMADQAARKAAITETPDTSTLLAGKRTADGSEFEKRTADGSEFESPKKKAKVE

SEQ ID NO: 2804 - protein, 2094 aa, synthetic construct
MPAAKRVKLDGGDKKYSIGLDIGTNSVGWAVITDEYKVPSKKFKVLGNTDRHSIKKNLIGALLFDSGETAEATRLKRTARRRYTRRKNRICYLQEIFSNEMAKVDDSFFHRLEESFLVEEDKKHERHPIFGNIVDEVAYHEKYPTIYHLRKKLVDSTDKADLRLIYLALAHMIKFRGHFLIEGDLNPDNSDVDKLFIQLVQTYNQLFEENPINASGVDAKAILSARLSKSRRLENLIAQLPGEKKNGLFGNLIALSLGLTPNFKSNFDLAEDAKLQLSKDTYDDDLDNLLAQIGDQYADLFLAAKNLSDAILLSDILRVNTEITKAPLSASMIKRYDEHHQDLTLLKALVRQQLPEKYKEIFFDQSKNGYAGYIDGGASQEEFYKFIKPILEKMDGTEELLVKLNREDLLRKQRTFDNGSIPHQIHLGELHAILRRQEDFYPFLKDNREKIEKILTFRIPYYVGPLARGNSRFAWMTRKSEETITPWNFEEVVDKGASAQSFIERMTNFDKNLPNEKVLPKHSLLYEYFTVYNELTKVKYVTEGMRKPAFLSGEQKKAIVDLLFKTNRKVTVKQLKEDYFKKIECFDSVEISGVEDRFNASLGTYHDLLKIIKDKDFLDNEENEDILEDIVLTLTLFEDREMIEERLKTYAHLFDDKVMKQLKRRRYTGWGRLSRKLINGIRDKQSGKTILDFLKSDGFANRNFMQLIHDDSLTFKEDIQKAQVSGQGDSLHEHIANLAGSPAIKKGILQTVKVVDELVKVMGRHKPENIVIEMARENQTTQKGQKNSRERMKRIEEGIKELGSQILKEHPVENTQLQNEKLYLYYLQNGRDMYVDQELDINRLSDYDVDHIVPQSFLKDDSIDNKVLTRSDKARGKSDNVPSEEVVKKMKNYWRQLLNAKLITQRKFDNLTKAERGGLSELDKAGFIKRQLVETRQITKHVAQILDSRMNTKYDENDKLIREVKVITLKSKLVSDFRKDFQFYKVREINNYHHAHDAYLNAVVGTALIKKYPKLESEFVYGDYKVYDVRKMIAKSEQEIGKATAKYFFYSNIMNFFKTEITLANGEIRKRPLIETNGETGEIVWDKGRDFATVRKVLSMPQVNIVKKTEVQTGGFSKESILPKRNSDKLIARKKDWDPKKYGGFDSPTVAYSVLVVAKVEKGKSKKLKSVKELLGITIMERSSFEKNPIDFLEAKGYKEVKKDLIIKLPKYSLFELENGRKRMLASAGELQKGNELALPSKYVNFLYLASHYEKLKGSPEDNEQKQLFVEQHKHYLDEIIEQISEFSKRVILADANLDKVLSAYNKHRDKPIREQAENIIHLFTLTNLGAPAAFKYFDTTIDRKRYTSTKEVLDATLIHQSITGLYETRIDLSQLGGDGGGGSGGGPAPGGTLNIEDEHRLHETSKEPDVSLGSTWLSDFPQAWAETGGMGLAVRQAPLIIPLKATSTPVSIKQYPMSQEARLGIKPHIQRLLDQGILVPCQSPWNTPLLPVKKPGTNDYRPVQDLREVNKRVEDIHPTVPNPYNLLSGLPPSHQWYTVLDLKDAFFCLRLHPTSQPLFAFEWRDPEMGISGQLTWTRLPQGFKNSPTLFNEALHRDLADFRIQHPDLILLQYVDDLLLAATSELDCQQGTRALLQTLGNLGYRASAKKAQICQKQVKYLGYLLKEGQRWLTEARKETVMGQPTPKTPRQLREFLGKAGFCRLFIPGFAEMAAPLYPLTKPGTLFNWGPDQQKAYQEIKQALLTAPALGLPDLTKPFELFVDEKQGYAKGVLTQKLGPWRRPVAYLSKKLDPVAAGWPPCLRMVAAIAVLTKDAGKLTMGQPLVILAPHAVEALVKQPPDRWLSNARMTHYQALLLDTDRVQFGPVVALNPATLLPLPEEGLQHNCLDILAEAHGTRPDLTDQPLPDADHTWYTDGSSLLQEGQRKAGAAVTTETEVIWAKALPAGTSAQRAELIALTQALKMAEGKKLNVYTDSRYAFATAHIHGEIYRRRGWLTSEGKEIKNKDEILALLKALFLPKRLSIIHCPGHQKGHSAEARGNRMADQAARKAAITETPDTSTLLAGKRTADGSEFEKRTADGSEFESPKKKAKVE

SEQ ID NO: 2805 - protein, 2096 aa, synthetic construct
MPAAKRVKLDGGDKKYSIGLDIGTNSVGWAVITDEYKVPSKKFKVLGNTDRHSIKKNLIGALLFDSGETAEATRLKRTARRRYTRRKNRICYLQEIFSNEMAKVDDSFFHRLEESFLVEEDKKHERHPIFGNIVDEVAYHEKYPTIYHLRKKLVDSTDKADLRLIYLALAHMIKFRGHFLIEGDLNPDNSDVDKLFIQLVQTYNQLFEENPINASGVDAKAILSARLSKSRRLENLIAQLPGEKKNGLFGNLIALSLGLTPNFKSNFDLAEDAKLQLSKDTYDDDLDNLLAQIGDQYADLFLAAKNLSDAILLSDILRVNTEITKAPLSASMIKRYDEHHQDLTLLKALVRQQLPEKYKEIFFDQSKNGYAGYIDGGASQEEFYKFIKPILEKMDGTEELLVKLNREDLLRKQRTFDNGSIPHQIHLGELHAILRRQEDFYPFLKDNREKIEKILTFRIPYYVGPLARGNSRFAWMTRKSEETITPWNFEEVVDKGASAQSFIERMTNFDKNLPNEKVLPKHSLLYEYFTVYNELTKVKYVTEGMRKPAFLSGEQKKAIVDLLFKTNRKVTVKQLKEDYFKKIECFDSVEISGVEDRFNASLGTYHDLLKIIKDKDFLDNEENEDILEDIVLTLTLFEDREMIEERLKTYAHLFDDKVMKQLKRRRYTGWGRLSRKLINGIRDKQSGKTILDFLKSDGFANRNFMQLIHDDSLTFKEDIQKAQVSGQGDSLHEHIANLAGSPAIKKGILQTVKVVDELVKVMGRHKPENIVIEMARENQTTQKGQKNSRERMKRIEEGIKELGSQILKEHPVENTQLQNEKLYLYYLQNGRDMYVDQELDINRLSDYDVDHIVPQSFLKDDSIDNKVLTRSDKARGKSDNVPSEEVVKKMKNYWRQLLNAKLITQRKFDNLTKAERGGLSELDKAGFIKRQLVETRQITKHVAQILDSRMNTKYDENDKLIREVKVITLKSKLVSDFRKDFQFYKVREINNYHHAHDAYLNAVVGTALIKKYPKLESEFVYGDYKVYDVRKMIAKSEQEIGKATAKYFFYSNIMNFFKTEITLANGEIRKRPLIETNGETGEIVWDKGRDFATVRKVLSMPQVNIVKKTEVQTGGFSKESILPKRNSDKLIARKKDWDPKKYGGFDSPTVAYSVLVVAKVEKGKSKKLKSVKELLGITIMERSSFEKNPIDFLEAKGYKEVKKDLIIKLPKYSLFELENGRKRMLASAGELQKGNELALPSKYVNFLYLASHYEKLKGSPEDNEQKQLFVEQHKHYLDEIIEQISEFSKRVILADANLDKVLSAYNKHRDKPIREQAENIIHLFTLTNLGAPAAFKYFDTTIDRKRYTSTKEVLDATLIHQSITGLYETRIDLSQLGGDGGGGSPAPEAAAKGGTLNIEDEHRLHETSKEPDVSLGSTWLSDFPQAWAETGGMGLAVRQAPLIIPLKATSTPVSIKQYPMSQEARLGIKPHIQRLLDQGILVPCQSPWNTPLLPVKKPGTNDYRPVQDLREVNKRVEDIHPTVPNPYNLLSGLPPSHQWYTVLDLKDAFFCLRLHPTSQPLFAFEWRDPEMGISGQLTWTRLPQGFKNSPTLFNEALHRDLADFRIQHPDLILLQYVDDLLLAATSELDCQQGTRALLQTLGNLGYRASAKKAQICQKQVKYLGYLLKEGQRWLTEARKETVMGQPTPKTPRQLREFLGKAGFCRLFIPGFAEMAAPLYPLTKPGTLFNWGPDQQKAYQEIKQALLTAPALGLPDLTKPFELFVDEKQGYAKGVLTQKLGPWRRPVAYLSKKLDPVAAGWPPCLRMVAAIAVLTKDAGKLTMGQPLVILAPHAVEALVKQPPDRWLSNARMTHYQALLLDTDRVQFGPVVALNPATLLPLPEEGLQHNCLDILAEAHGTRPDLTDQPLPDADHTWYTDGSSLLQEGQRKAGAAVTTETEVIWAKALPAGTSAQRAELIALTQALKMAEGKKLNVYTDSRYAFATAHIHGEIYRRRGWLTSEGKEIKNKDEILALLKALFLPKRLSIIHCPGHQKGHSAEARGNRMADQAARKAAITETPDTSTLLAGKRTADGSEFEKRTADGSEFESPKKKAKVE

SEQ ID NO: 2806 - protein, 2097 aa, synthetic construct
MPAAKRVKLDGGDKKYSIGLDIGTNSVGWAVITDEYKVPSKKFKVLGNTDRHSIKKNLIGALLFDSGETAEATRLKRTARRRYTRRKNRICYLQEIFSNEMAKVDDSFFHRLEESFLVEEDKKHERHPIFGNIVDEVAYHEKYPTIYHLRKKLVDSTDKADLRLIYLALAHMIKFRGHFLIEGDLNPDNSDVDKLFIQLVQTYNQLFEENPINASGVDAKAILSARLSKSRRLENLIAQLPGEKKNGLFGNLIALSLGLTPNFKSNFDLAEDAKLQLSKDTYDDDLDNLLAQIGDQYADLFLAAKNLSDAILLSDILRVNTEITKAPLSASMIKRYDEHHQDLTLLKALVRQQLPEKYKEIFFDQSKNGYAGYIDGGASQEEFYKFIKPILEKMDGTEELLVKLNREDLLRKQRTFDNGSIPHQIHLGELHAILRRQEDFYPFLKDNREKIEKILTFRIPYYVGPLARGNSRFAWMTRKSEETITPWNFEEVVDKGASAQSFIERMTNFDKNLPNEKVLPKHSLLYEYFTVYNELTKVKYVTEGMRKPAFLSGEQKKAIVDLLFKTNRKVTVKQLKEDYFKKIECFDSVEISGVEDRFNASLGTYHDLLKIIKDKDFLDNEENEDILEDIVLTLTLFEDREMIEERLKTYAHLFDDKVMKQLKRRRYTGWGRLSRKLINGIRDKQSGKTILDFLKSDGFANRNFMQLIHDDSLTFKEDIQKAQVSGQGDSLHEHIANLAGSPAIKKGILQTVKVVDELVKVMGRHKPENIVIEMARENQTTQKGQKNSRERMKRIEEGIKELGSQILKEHPVENTQLQNEKLYLYYLQNGRDMYVDQELDINRLSDYDVDHIVPQSFLKDDSIDNKVLTRSDKARGKSDNVPSEEVVKKMKNYWRQLLNAKLITQRKFDNLTKAERGGLSELDKAGFIKRQLVETRQITKHVAQILDSRMNTKYDENDKLIREVKVITLKSKLVSDFRKDFQFYKVREINNYHHAHDAYLNAVVGTALIKKYPKLESEFVYGDYKVYDVRKMIAKSEQEIGKATAKYFFYSNIMNFFKTEITLANGEIRKRPLIETNGETGEIVWDKGRDFATVRKVLSMPQVNIVKKTEVQTGGFSKESILPKRNSDKLIARKKDWDPKKYGGFDSPTVAYSVLVVAKVEKGKSKKLKSVKELLGITIMERSSFEKNPIDFLEAKGYKEVKKDLIIKLPKYSLFELENGRKRMLASAGELQKGNELALPSKYVNFLYLASHYEKLKGSPEDNEQKQLFVEQHKHYLDEIIEQISEFSKRVILADANLDKVLSAYNKHRDKPIREQAENIIHLFTLTNLGAPAAFKYFDTTIDRKRYTSTKEVLDATLIHQSITGLYETRIDLSQLGGDGGGSSGSSGSSGSSGGTLNIEDEHRLHETSKEPDVSLGSTWLSDFPQAWAETGGMGLAVRQAPLIIPLKATSTPVSIKQYPMSQEARLGIKPHIQRLLDQGILVPCQSPWNTPLLPVKKPGTNDYRPVQDLREVNKRVEDIHPTVPNPYNLLSGLPPSHQWYTVLDLKDAFFCLRLHPTSQPLFAFEWRDPEMGISGQLTWTRLPQGFKNSPTLFNEALHRDLADFRIQHPDLILLQYVDDLLLAATSELDCQQGTRALLQTLGNLGYRASAKKAQICQKQVKYLGYLLKEGQRWLTEARKETVMGQPTPKTPRQLREFLGKAGFCRLFIPGFAEMAAPLYPLTKPGTLFNWGPDQQKAYQEIKQALLTAPALGLPDLTKPFELFVDEKQGYAKGVLTQKLGPWRRPVAYLSKKLDPVAAGWPPCLRMVAAIAVLTKDAGKLTMGQPLVILAPHAVEALVKQPPDRWLSNARMTHYQALLLDTDRVQFGPVVALNPATLLPLPEEGLQHNCLDILAEAHGTRPDLTDQPLPDADHTWYTDGSSLLQEGQRKAGAAVTTETEVIWAKALPAGTSAQRAELIALTQALKMAEGKKLNVYTDSRYAFATAHIHGEIYRRRGWLTSEGKEIKNKDEILALLKALFLPKRLSIIHCPGHQKGHSAEARGNRMADQAARKAAITETPDTSTLLAGKRTADGSEFEKRTADGSEFESPKKKAKVE

SEQ ID NO: 2807 - protein, 2100 aa, synthetic construct
MPAAKRVKLDGGDKKYSIGLDIGTNSVGWAVITDEYKVPSKKFKVLGNTDRHSIKKNLIGALLFDSGETAEATRLKRTARRRYTRRKNRICYLQEIFSNEMAKVDDSFFHRLEESFLVEEDKKHERHPIFGNIVDEVAYHEKYPTIYHLRKKLVDSTDKADLRLIYLALAHMIKFRGHFLIEGDLNPDNSDVDKLFIQLVQTYNQLFEENPINASGVDAKAILSARLSKSRRLENLIAQLPGEKKNGLFGNLIALSLGLTPNFKSNFDLAEDAKLQLSKDTYDDDLDNLLAQIGDQYADLFLAAKNLSDAILLSDILRVNTEITKAPLSASMIKRYDEHHQDLTLLKALVRQQLPEKYKEIFFDQSKNGYAGYIDGGASQEEFYKFIKPILEKMDGTEELLVKLNREDLLRKQRTFDNGSIPHQIHLGELHAILRRQEDFYPFLKDNREKIEKILTFRIPYYVGPLARGNSRFAWMTRKSEETITPWNFEEVVDKGASAQSFIERMTNFDKNLPNEKVLPKHSLLYEYFTVYNELTKVKYVTEGMRKPAFLSGEQKKAIVDLLFKTNRKVTVKQLKEDYFKKIECFDSVEISGVEDRFNASLGTYHDLLKIIKDKDFLDNEENEDILEDIVLTLTLFEDREMIEERLKTYAHLFDDKVMKQLKRRRYTGWGRLSRKLINGIRDKQSGKTILDFLKSDGFANRNFMQLIHDDSLTFKEDIQKAQVSGQGDSLHEHIANLAGSPAIKKGILQTVKVVDELVKVMGRHKPENIVIEMARENQTTQKGQKNSRERMKRIEEGIKELGSQILKEHPVENTQLQNEKLYLYYLQNGRDMYVDQELDINRLSDYDVDHIVPQSFLKDDSIDNKVLTRSDKARGKSDNVPSEEVVKKMKNYWRQLLNAKLITQRKFDNLTKAERGGLSELDKAGFIKRQLVETRQITKHVAQILDSRMNTKYDENDKLIREVKVITLKSKLVSDFRKDFQFYKVREINNYHHAHDAYLNAVVGTALIKKYPKLESEFVYGDYKVYDVRKMIAKSEQEIGKATAKYFFYSNIMNFFKTEITLANGEIRKRPLIETNGETGEIVWDKGRDFATVRKVLSMPQVNIVKKTEVQTGGFSKESILPKRNSDKLIARKKDWDPKKYGGFDSPTVAYSVLVVAKVEKGKSKKLKSVKELLGITIMERSSFEKNPIDFLEAKGYKEVKKDLIIKLPKYSLFELENGRKRMLASAGELQKGNELALPSKYVNFLYLASHYEKLKGSPEDNEQKQLFVEQHKHYLDEIIEQISEFSKRVILADANLDKVLSAYNKHRDKPIREQAENIIHLFTLTNLGAPAAFKYFDTTIDRKRYTSTKEVLDATLIHQSITGLYETRIDLSQLGGDGGGGSGGSGGSGGSGGSGGTLNIEDEHRLHETSKEPDVSLGSTWLSDFPQAWAETGGMGLAVRQAPLIIPLKATSTPVSIKQYPMSQEARLGIKPHIQRLLDQGILVPCQSPWNTPLLPVKKPGTNDYRPVQDLREVNKRVEDIHPTVPNPYNLLSGLPPSHQWYTVLDLKDAFFCLRLHPTSQPLFAFEWRDPEMGISGQLTWTRLPQGFKNSPTLFNEALHRDLADFRIQHPDLILLQYVDDLLLAATSELDCQQGTRALLQTLGNLGYRASAKKAQICQKQVKYLGYLLKEGQRWLTEARKETVMGQPTPKTPRQLREFLGKAGFCRLFIPGFAEMAAPLYPLTKPGTLFNWGPDQQKAYQEIKQALLTAPALGLPDLTKPFELFVDEKQGYAKGVLTQKLGPWRRPVAYLSKKLDPVAAGWPPCLRMVAAIAVLTKDAGKLTMGQPLVILAPHAVEALVKQPPDRWLSNARMTHYQALLLDTDRVQFGPVVALNPATLLPLPEEGLQHNCLDILAEAHGTRPDLTDQPLPDADHTWYTDGSSLLQEGQRKAGAAVTTETEVIWAKALPAGTSAQRAELIALTQALKMAEGKKLNVYTDSRYAFATAHIHGEIYRRRGWLTSEGKEIKNKDEILALLKALFLPKRLSIIHCPGHQKGHSAEARGNRMADQAARKAAITETPDTSTLLAGKRTADGSEFEKRTADGSEFESPKKKAKVE

SEQ ID NO: 2808 - protein, 2091 aa, synthetic construct
MPAAKRVKLDGGDKKYSIGLDIGTNSVGWAVITDEYKVPSKKFKVLGNTDRHSIKKNLIGALLFDSGETAEATRLKRTARRRYTRRKNRICYLQEIFSNEMAKVDDSFFHRLEESFLVEEDKKHERHPIFGNIVDEVAYHEKYPTIYHLRKKLVDSTDKADLRLIYLALAHMIKFRGHFLIEGDLNPDNSDVDKLFIQLVQTYNQLFEENPINASGVDAKAILSARLSKSRRLENLIAQLPGEKKNGLFGNLIALSLGLTPNFKSNFDLAEDAKLQLSKDTYDDDLDNLLAQIGDQYADLFLAAKNLSDAILLSDILRVNTEITKAPLSASMIKRYDEHHQDLTLLKALVRQQLPEKYKEIFFDQSKNGYAGYIDGGASQEEFYKFIKPILEKMDGTEELLVKLNREDLLRKQRTFDNGSIPHQIHLGELHAILRRQEDFYPFLKDNREKIEKILTFRIPYYVGPLARGNSRFAWMTRKSEETITPWNFEEVVDKGASAQSFIERMTNFDKNLPNEKVLPKHSLLYEYFTVYNELTKVKYVTEGMRKPAFLSGEQKKAIVDLLFKTNRKVTVKQLKEDYFKKIECFDSVEISGVEDRFNASLGTYHDLLKIIKDKDFLDNEENEDILEDIVLTLTLFEDREMIEERLKTYAHLFDDKVMKQLKRRRYTGWGRLSRKLINGIRDKQSGKTILDFLKSDGFANRNFMQLIHDDSLTFKEDIQKAQVSGQGDSLHEHIANLAGSPAIKKGILQTVKVVDELVKVMGRHKPENIVIEMARENQTTQKGQKNSRERMKRIEEGIKELGSQILKEHPVENTQLQNEKLYLYYLQNGRDMYVDQELDINRLSDYDVDHIVPQSFLKDDSIDNKVLTRSDKARGKSDNVPSEEVVKKMKNYWRQLLNAKLITQRKFDNLTKAERGGLSELDKAGFIKRQLVETRQITKHVAQILDSRMNTKYDENDKLIREVKVITLKSKLVSDFRKDFQFYKVREINNYHHAHDAYLNAVVGTALIKKYPKLESEFVYGDYKVYDVRKMIAKSEQEIGKATAKYFFYSNIMNFFKTEITLANGEIRKRPLIETNGETGEIVWDKGRDFATVRKVLSMPQVNIVKKTEVQTGGFSKESILPKRNSDKLIARKKDWDPKKYGGFDSPTVAYSVLVVAKVEKGKSKKLKSVKELLGITIMERSSFEKNPIDFLEAKGYKEVKKDLIIKLPKYSLFELENGRKRMLASAGELQKGNELALPSKYVNFLYLASHYEKLKGSPEDNEQKQLFVEQHKHYLDEIIEQISEFSKRVILADANLDKVLSAYNKHRDKPIREQAENIIHLFTLTNLGAPAAFKYFDTTIDRKRYTSTKEVLDATLIHQSITGLYETRIDLSQLGGDGGGGSPAPGGTLNIEDEHRLHETSKEPDVSLGSTWLSDFPQAWAETGGMGLAVRQAPLIIPLKATSTPVSIKQYPMSQEARLGIKPHIQRLLDQGILVPCQSPWNTPLLPVKKPGTNDYRPVQDLREVNKRVEDIHPTVPNPYNLLSGLPPSHQWYTVLDLKDAFFCLRLHPTSQPLFAFEWRDPEMGISGQLTWTRLPQGFKNSPTLFNEALHRDLADFRIQHPDLILLQYVDDLLLAATSELDCQQGTRALLQTLGNLGYRASAKKAQICQKQVKYLGYLLKEGQRWLTEARKETVMGQPTPKTPRQLREFLGKAGFCRLFIPGFAEMAAPLYPLTKPGTLFNWGPDQQKAYQEIKQALLTAPALGLPDLTKPFELFVDEKQGYAKGVLTQKLGPWRRPVAYLSKKLDPVAAGWPPCLRMVAAIAVLTKDAGKLTMGQPLVILAPHAVEALVKQPPDRWLSNARMTHYQALLLDTDRVQFGPVVALNPATLLPLPEEGLQHNCLDILAEAHGTRPDLTDQPLPDADHTWYTDGSSLLQEGQRKAGAAVTTETEVIWAKALPAGTSAQRAELIALTQALKMAEGKKLNVYTDSRYAFATAHIHGEIYRRRGWLTSEGKEIKNKDEILALLKALFLPKRLSIIHCPGHQKGHSAEARGNRMADQAARKAAITETPDTSTLLAGKRTADGSEFEKRTADGSEFESPKKKAKVE

SEQ ID NO: 2809 - protein, 2094 aa, synthetic construct
MPAAKRVKLDGGDKKYSIGLDIGTNSVGWAVITDEYKVPSKKFKVLGNTDRHSIKKNLIGALLFDSGETAEATRLKRTARRRYTRRKNRICYLQEIFSNEMAKVDDSFFHRLEESFLVEEDKKHERHPIFGNIVDEVAYHEKYPTIYHLRKKLVDSTDKADLRLIYLALAHMIKFRGHFLIEGDLNPDNSDVDKLFIQLVQTYNQLFEENPINASGVDAKAILSARLSKSRRLENLIAQLPGEKKNGLFGNLIALSLGLTPNFKSNFDLAEDAKLQLSKDTYDDDLDNLLAQIGDQYADLFLAAKNLSDAILLSDILRVNTEITKAPLSASMIKRYDEHHQDLTLLKALVRQQLPEKYKEIFFDQSKNGYAGYIDGGASQEEFYKFIKPILEKMDGTEELLVKLNREDLLRKQRTFDNGSIPHQIHLGELHAILRRQEDFYPFLKDNREKIEKILTFRIPYYVGPLARGNSRFAWMTRKSEETITPWNFEEVVDKGASAQSFIERMTNFDKNLPNEKVLPKHSLLYEYFTVYNELTKVKYVTEGMRKPAFLSGEQKKAIVDLLFKTNRKVTVKQLKEDYFKKIECFDSVEISGVEDRFNASLGTYHDLLKIIKDKDFLDNEENEDILEDIVLTLTLFEDREMIEERLKTYAHLFDDKVMKQLKRRRYTGWGRLSRKLINGIRDKQSGKTILDFLKSDGFANRNFMQLIHDDSLTFKEDIQKAQVSGQGDSLHEHIANLAGSPAIKKGILQTVKVVDELVKVMGRHKPENIVIEMARENQTTQKGQKNSRERMKRIEEGIKELGSQILKEHPVENTQLQNEKLYLYYLQNGRDMYVDQELDINRLSDYDVDHIVPQSFLKDDSIDNKVLTRSDKARGKSDNVPSEEVVKKMKNYWRQLLNAKLITQRKFDNLTKAERGGLSELDKAGFIKRQLVETRQITKHVAQILDSRMNTKYDENDKLIREVKVITLKSKLVSDFRKDFQFYKVREINNYHHAHDAYLNAVVGTALIKKYPKLESEFVYGDYKVYDVRKMIAKSEQEIGKATAKYFFYSNIMNFFKTEITLANGEIRKRPLIETNGETGEIVWDKGRDFATVRKVLSMPQVNIVKKTEVQTGGFSKESILPKRNSDKLIARKKDWDPKKYGGFDSPTVAYSVLVVAKVEKGKSKKLKSVKELLGITIMERSSFEKNPIDFLEAKGYKEVKKDLIIKLPKYSLFELENGRKRMLASAGELQKGNELALPSKYVNFLYLASHYEKLKGSPEDNEQKQLFVEQHKHYLDEIIEQISEFSKRVILADANLDKVLSAYNKHRDKPIREQAENIIHLFTLTNLGAPAAFKYFDTTIDRKRYTSTKEVLDATLIHQSITGLYETRIDLSQLGGDGGGGSGGSGGSGGTLNIEDEHRLHETSKEPDVSLGSTWLSDFPQAWAETGGMGLAVRQAPLIIPLKATSTPVSIKQYPMSQEARLGIKPHIQRLLDQGILVPCQSPWNTPLLPVKKPGTNDYRPVQDLREVNKRVEDIHPTVPNPYNLLSGLPPSHQWYTVLDLKDAFFCLRLHPTSQPLFAFEWRDPEMGISGQLTWTRLPQGFKNSPTLFNEALHRDLADFRIQHPDLILLQYVDDLLLAATSELDCQQGTRALLQTLGNLGYRASAKKAQICQKQVKYLGYLLKEGQRWLTEARKETVMGQPTPKTPRQLREFLGKAGFCRLFIPGFAEMAAPLYPLTKPGTLFNWGPDQQKAYQEIKQALLTAPALGLPDLTKPFELFVDEKQGYAKGVLTQKLGPWRRPVAYLSKKLDPVAAGWPPCLRMVAAIAVLTKDAGKLTMGQPLVILAPHAVEALVKQPPDRWLSNARMTHYQALLLDTDRVQFGPVVALNPATLLPLPEEGLQHNCLDILAEAHGTRPDLTDQPLPDADHTWYTDGSSLLQEGQRKAGAAVTTETEVIWAKALPAGTSAQRAELIALTQALKMAEGKKLNVYTDSRYAFATAHIHGEIYRRRGWLTSEGKEIKNKDEILALLKALFLPKRLSIIHCPGHQKGHSAEARGNRMADQAARKAAITETPDTSTLLAGKRTADGSEFEKRTADGSEFESPKKKAKVE

SEQ ID NO: 2810 - protein, 2096 aa, synthetic construct
MPAAKRVKLDGGDKKYSIGLDIGTNSVGWAVITDEYKVPSKKFKVLGNTDRHSIKKNLIGALLFDSGETAEATRLKRTARRRYTRRKNRICYLQEIFSNEMAKVDDSFFHRLEESFLVEEDKKHERHPIFGNIVDEVAYHEKYPTIYHLRKKLVDSTDKADLRLIYLALAHMIKFRGHFLIEGDLNPDNSDVDKLFIQLVQTYNQLFEENPINASGVDAKAILSARLSKSRRLENLIAQLPGEKKNGLFGNLIALSLGLTPNFKSNFDLAEDAKLQLSKDTYDDDLDNLLAQIGDQYADLFLAAKNLSDAILLSDILRVNTEITKAPLSASMIKRYDEHHQDLTLLKALVRQQLPEKYKEIFFDQSKNGYAGYIDGGASQEEFYKFIKPILEKMDGTEELLVKLNREDLLRKQRTFDNGSIPHQIHLGELHAILRRQEDFYPFLKDNREKIEKILTFRIPYYVGPLARGNSRFAWMTRKSEETITPWNFEEVVDKGASAQSFIERMTNFDKNLPNEKVLPKHSLLYEYFTVYNELTKVKYVTEGMRKPAFLSGEQKKAIVDLLFKTNRKVTVKQLKEDYFKKIECFDSVEISGVEDRFNASLGTYHDLLKIIKDKDFLDNEENEDILEDIVLTLTLFEDREMIEERLKTYAHLFDDKVMKQLKRRRYTGWGRLSRKLINGIRDKQSGKTILDFLKSDGFANRNFMQLIHDDSLTFKEDIQKAQVSGQGDSLHEHIANLAGSPAIKKGILQTVKVVDELVKVMGRHKPENIVIEMARENQTTQKGQKNSRERMKRIEEGIKELGSQILKEHPVENTQLQNEKLYLYYLQNGRDMYVDQELDINRLSDYDVDHIVPQSFLKDDSIDNKVLTRSDKARGKSDNVPSEEVVKKMKNYWRQLLNAKLITQRKFDNLTKAERGGLSELDKAGFIKRQLVETRQITKHVAQILDSRMNTKYDENDKLIREVKVITLKSKLVSDFRKDFQFYKVREINNYHHAHDAYLNAVVGTALIKKYPKLESEFVYGDYKVYDVRKMIAKSEQEIGKATAKYFFYSNIMNFFKTEITLANGEIRKRPLIETNGETGEIVWDKGRDFATVRKVLSMPQVNIVKKTEVQTGGFSKESILPKRNSDKLIARKKDWDPKKYGGFDSPTVAYSVLVVAKVEKGKSKKLKSVKELLGITIMERSSFEKNPIDFLEAKGYKEVKKDLIIKLPKYSLFELENGRKRMLASAGELQKGNELALPSKYVNFLYLASHYEKLKGSPEDNEQKQLFVEQHKHYLDEIIEQISEFSKRVILADANLDKVLSAYNKHRDKPIREQAENIIHLFTLTNLGAPAAFKYFDTTIDRKRYTSTKEVLDATLIHQSITGLYETRIDLSQLGGDGGGSSGGGEAAAKGGTLNIEDEHRLHETSKEPDVSLGSTWLSDFPQAWAETGGMGLAVRQAPLIIPLKATSTPVSIKQYPMSQEARLGIKPHIQRLLDQGILVPCQSPWNTPLLPVKKPGTNDYRPVQDLREVNKRVEDIHPTVPNPYNLLSGLPPSHQWYTVLDLKDAFFCLRLHPTSQPLFAFEWRDPEMGISGQLTWTRLPQGFKNSPTLFNEALHRDLADFRIQHPDLILLQYVDDLLLAATSELDCQQGTRALLQTLGNLGYRASAKKAQICQKQVKYLGYLLKEGQRWLTEARKETVMGQPTPKTPRQLREFLGKAGFCRLFIPGFAEMAAPLYPLTKPGTLFNWGPDQQKAYQEIKQALLTAPALGLPDLTKPFELFVDEKQGYAKGVLTQKLGPWRRPVAYLSKKLDPVAAGWPPCLRMVAAIAVLTKDAGKLTMGQPLVILAPHAVEALVKQPPDRWLSNARMTHYQALLLDTDRVQFGPVVALNPATLLPLPEEGLQHNCLDILAEAHGTRPDLTDQPLPDADHTWYTDGSSLLQEGQRKAGAAVTTETEVIWAKALPAGTSAQRAELIALTQALKMAEGKKLNVYTDSRYAFATAHIHGEIYRRRGWLTSEGKEIKNKDEILALLKALFLPKRLSIIHCPGHQKGHSAEARGNRMADQAARKAAITETPDTSTLLAGKRTADGSEFEKRTADGSEFESPKKKAKVE

SEQ ID NO: 2811 - protein, 2094 aa, synthetic construct
MPAAKRVKLDGGDKKYSIGLDIGTNSVGWAVITDEYKVPSKKFKVLGNTDRHSIKKNLIGALLFDSGETAEATRLKRTARRRYTRRKNRICYLQEIFSNEMAKVDDSFFHRLEESFLVEEDKKHERHPIFGNIVDEVAYHEKYPTIYHLRKKLVDSTDKADLRLIYLALAHMIKFRGHFLIEGDLNPDNSDVDKLFIQLVQTYNQLFEENPINASGVDAKAILSARLSKSRRLENLIAQLPGEKKNGLFGNLIALSLGLTPNFKSNFDLAEDAKLQLSKDTYDDDLDNLLAQIGDQYADLFLAAKNLSDAILLSDILRVNTEITKAPLSASMIKRYDEHHQDLTLLKALVRQQLPEKYKEIFFDQSKNGYAGYIDGGASQEEFYKFIKPILEKMDGTEELLVKLNREDLLRKQRTFDNGSIPHQIHLGELHAILRRQEDFYPFLKDNREKIEKILTFRIPYYVGPLARGNSRFAWMTRKSEETITPWNFEEVVDKGASAQSFIERMTNFDKNLPNEKVLPKHSLLYEYFTVYNELTKVKYVTEGMRKPAFLSGEQKKAIVDLLFKTNRKVTVKQLKEDYFKKIECFDSVEISGVEDRFNASLGTYHDLLKIIKDKDFLDNEENEDILEDIVLTLTLFEDREMIEERLKTYAHLFDDKVMKQLKRRRYTGWGRLSRKLINGIRDKQSGKTILDFLKSDGFANRNFMQLIHDDSLTFKEDIQKAQVSGQGDSLHEHIANLAGSPAIKKGILQTVKVVDELVKVMGRHKPENIVIEMARENQTTQKGQKNSRERMKRIEEGIKELGSQILKEHPVENTQLQNEKLYLYYLQNGRDMYVDQELDINRLSDYDVDHIVPQSFLKDDSIDNKVLTRSDKARGKSDNVPSEEVVKKMKNYWRQLLNAKLITQRKFDNLTKAERGGLSELDKAGFIKRQLVETRQITKHVAQILDSRMNTKYDENDKLIREVKVITLKSKLVSDFRKDFQFYKVREINNYHHAHDAYLNAVVGTALIKKYPKLESEFVYGDYKVYDVRKMIAKSEQEIGKATAKYFFYSNIMNFFKTEITLANGEIRKRPLIETNGETGEIVWDKGRDFATVRKVLSMPQVNIVKKTEVQTGGFSKESILPKRNSDKLIARKKDWDPKKYGGFDSPTVAYSVLVVAKVEKGKSKKLKSVKELLGITIMERSSFEKNPIDFLEAKGYKEVKKDLIIKLPKYSLFELENGRKRMLASAGELQKGNELALPSKYVNFLYLASHYEKLKGSPEDNEQKQLFVEQHKHYLDEIIEQISEFSKRVILADANLDKVLSAYNKHRDKPIREQAENIIHLFTLTNLGAPAAFKYFDTTIDRKRYTSTKEVLDATLIHQSITGLYETRIDLSQLGGDGGGSSGSSGSSGGTLNIEDEHRLHETSKEPDVSLGSTWLSDFPQAWAETGGMGLAVRQAPLIIPLKATSTPVSIKQYPMSQEARLGIKPHIQRLLDQGILVPCQSPWNTPLLPVKKPGTNDYRPVQDLREVNKRVEDIHPTVPNPYNLLSGLPPSHQWYTVLDLKDAFFCLRLHPTSQPLFAFEWRDPEMGISGQLTWTRLPQGFKNSPTLFNEALHRDLADFRIQHPDLILLQYVDDLLLAATSELDCQQGTRALLQTLGNLGYRASAKKAQICQKQVKYLGYLLKEGQRWLTEARKETVMGQPTPKTPRQLREFLGKAGFCRLFIPGFAEMAAPLYPLTKPGTLFNWGPDQQKAYQEIKQALLTAPALGLPDLTKPFELFVDEKQGYAKGVLTQKLGPWRRPVAYLSKKLDPVAAGWPPCLRMVAAIAVLTKDAGKLTMGQPLVILAPHAVEALVKQPPDRWLSNARMTHYQALLLDTDRVQFGPVVALNPATLLPLPEEGLQHNCLDILAEAHGTRPDLTDQPLPDADHTWYTDGSSLLQEGQRKAGAAVTTETEVIWAKALPAGTSAQRAELIALTQALKMAEGKKLNVYTDSRYAFATAHIHGEIYRRRGWLTSEGKEIKNKDEILALLKALFLPKRLSIIHCPGHQKGHSAEARGNRMADQAARKAAITETPDTSTLLAGKRTADGSEFEKRTADGSEFESPKKKAKVE

SEQ ID NO: 2812 - protein, 2088 aa, synthetic construct
MPAAKRVKLDGGDKKYSIGLDIGTNSVGWAVITDEYKVPSKKFKVLGNTDRHSIKKNLIGALLFDSGETAEATRLKRTARRRYTRRKNRICYLQEIFSNEMAKVDDSFFHRLEESFLVEEDKKHERHPIFGNIVDEVAYHEKYPTIYHLRKKLVDSTDKADLRLIYLALAHMIKFRGHFLIEGDLNPDNSDVDKLFIQLVQTYNQLFEENPINASGVDAKAILSARLSKSRRLENLIAQLPGEKKNGLFGNLIALSLGLTPNFKSNFDLAEDAKLQLSKDTYDDDLDNLLAQIGDQYADLFLAAKNLSDAILLSDILRVNTEITKAPLSASMIKRYDEHHQDLTLLKALVRQQLPEKYKEIFFDQSKNGYAGYIDGGASQEEFYKFIKPILEKMDGTEELLVKLNREDLLRKQRTFDNGSIPHQIHLGELHAILRRQEDFYPFLKDNREKIEKILTFRIPYYVGPLARGNSRFAWMTRKSEETITPWNFEEVVDKGASAQSFIERMTNFDKNLPNEKVLPKHSLLYEYFTVYNELTKVKYVTEGMRKPAFLSGEQKKAIVDLLFKTNRKVTVKQLKEDYFKKIECFDSVEISGVEDRFNASLGTYHDLLKIIKDKDFLDNEENEDILEDIVLTLTLFEDREMIEERLKTYAHLFDDKVMKQLKRRRYTGWGRLSRKLINGIRDKQSGKTILDFLKSDGFANRNFMQLIHDDSLTFKEDIQKAQVSGQGDSLHEHIANLAGSPAIKKGILQTVKVVDELVKVMGRHKPENIVIEMARENQTTQKGQKNSRERMKRIEEGIKELGSQILKEHPVENTQLQNEKLYLYYLQNGRDMYVDQELDINRLSDYDVDHIVPQSFLKDDSIDNKVLTRSDKARGKSDNVPSEEVVKKMKNYWRQLLNAKLITQRKFDNLTKAERGGLSELDKAGFIKRQLVETRQITKHVAQILDSRMNTKYDENDKLIREVKVITLKSKLVSDFRKDFQFYKVREINNYHHAHDAYLNAVVGTALIKKYPKLESEFVYGDYKVYDVRKMIAKSEQEIGKATAKYFFYSNIMNFFKTEITLANGEIRKRPLIETNGETGEIVWDKGRDFATVRKVLSMPQVNIVKKTEVQTGGFSKESILPKRNSDKLIARKKDWDPKKYGGFDSPTVAYSVLVVAKVEKGKSKKLKSVKELLGITIMERSSFEKNPIDFLEAKGYKEVKKDLIIKLPKYSLFELENGRKRMLASAGELQKGNELALPSKYVNFLYLASHYEKLKGSPEDNEQKQLFVEQHKHYLDEIIEQISEFSKRVILADANLDKVLSAYNKHRDKPIREQAENIIHLFTLTNLGAPAAFKYFDTTIDRKRYTSTKEVLDATLIHQSITGLYETRIDLSQLGGDGGPAPGGTLNIEDEHRLHETSKEPDVSLGSTWLSDFPQAWAETGGMGLAVRQAPLIIPLKATSTPVSIKQYPMSQEARLGIKPHIQRLLDQGILVPCQSPWNTPLLPVKKPGTNDYRPVQDLREVNKRVEDIHPTVPNPYNLLSGLPPSHQWYTVLDLKDAFFCLRLHPTSQPLFAFEWRDPEMGISGQLTWTRLPQGFKNSPTLFNEALHRDLADFRIQHPDLILLQYVDDLLLAATSELDCQQGTRALLQTLGNLGYRASAKKAQICQKQVKYLGYLLKEGQRWLTEARKETVMGQPTPKTPRQLREFLGKAGFCRLFIPGFAEMAAPLYPLTKPGTLFNWGPDQQKAYQEIKQALLTAPALGLPDLTKPFELFVDEKQGYAKGVLTQKLGPWRRPVAYLSKKLDPVAAGWPPCLRMVAAIAVLTKDAGKLTMGQPLVILAPHAVEALVKQPPDRWLSNARMTHYQALLLDTDRVQFGPVVALNPATLLPLPEEGLQHNCLDILAEAHGTRPDLTDQPLPDADHTWYTDGSSLLQEGQRKAGAAVTTETEVIWAKALPAGTSAQRAELIALTQALKMAEGKKLNVYTDSRYAFATAHIHGEIYRRRGWLTSEGKEIKNKDEILALLKALFLPKRLSIIHCPGHQKGHSAEARGNRMADQAARKAAITETPDTSTLLAGKRTADGSEFEKRTADGSEFESPKKKAKVE

SEQ ID NO: 2813 - protein, 2115 aa, synthetic construct
MPAAKRVKLDGGDKKYSIGLDIGTNSVGWAVITDEYKVPSKKFKVLGNTDRHSIKKNLIGALLFDSGETAEATRLKRTARRRYTRRKNRICYLQEIFSNEMAKVDDSFFHRLEESFLVEEDKKHERHPIFGNIVDEVAYHEKYPTIYHLRKKLVDSTDKADLRLIYLALAHMIKFRGHFLIEGDLNPDNSDVDKLFIQLVQTYNQLFEENPINASGVDAKAILSARLSKSRRLENLIAQLPGEKKNGLFGNLIALSLGLTPNFKSNFDLAEDAKLQLSKDTYDDDLDNLLAQIGDQYADLFLAAKNLSDAILLSDILRVNTEITKAPLSASMIKRYDEHHQDLTLLKALVRQQLPEKYKEIFFDQSKNGYAGYIDGGASQEEFYKFIKPILEKMDGTEELLVKLNREDLLRKQRTFDNGSIPHQIHLGELHAILRRQEDFYPFLKDNREKIEKILTFRIPYYVGPLARGNSRFAWMTRKSEETITPWNFEEVVDKGASAQSFIERMTNFDKNLPNEKVLPKHSLLYEYFTVYNELTKVKYVTEGMRKPAFLSGEQKKAIVDLLFKTNRKVTVKQLKEDYFKKIECFDSVEISGVEDRFNASLGTYHDLLKIIKDKDFLDNEENEDILEDIVLTLTLFEDREMIEERLKTYAHLFDDKVMKQLKRRRYTGWGRLSRKLINGIRDKQSGKTILDFLKSDGFANRNFMQLIHDDSLTFKEDIQKAQVSGQGDSLHEHIANLAGSPAIKKGILQTVKVVDELVKVMGRHKPENIVIEMARENQTTQKGQKNSRERMKRIEEGIKELGSQILKEHPVENTQLQNEKLYLYYLQNGRDMYVDQELDINRLSDYDVDHIVPQSFLKDDSIDNKVLTRSDKARGKSDNVPSEEVVKKMKNYWRQLLNAKLITQRKFDNLTKAERGGLSELDKAGFIKRQLVETRQITKHVAQILDSRMNTKYDENDKLIREVKVITLKSKLVSDFRKDFQFYKVREINNYHHAHDAYLNAVVGTALIKKYPKLESEFVYGDYKVYDVRKMIAKSEQEIGKATAKYFFYSNIMNFFKTEITLANGEIRKRPLIETNGETGEIVWDKGRDFATVRKVLSMPQVNIVKKTEVQTGGFSKESILPKRNSDKLIARKKDWDPKKYGGFDSPTVAYSVLVVAKVEKGKSKKLKSVKELLGITIMERSSFEKNPIDFLEAKGYKEVKKDLIIKLPKYSLFELENGRKRMLASAGELQKGNELALPSKYVNFLYLASHYEKLKGSPEDNEQKQLFVEQHKHYLDEIIEQISEFSKRVILADANLDKVLSAYNKHRDKPIREQAENIIHLFTLTNLGAPAAFKYFDTTIDRKRYTSTKEVLDATLIHQSITGLYETRIDLSQLGGDGGEAAAKEAAAKEAAAKEAAAKEAAAKEAAAKGGTLNIEDEHRLHETSKEPDVSLGSTWLSDFPQAWAETGGMGLAVRQAPLIIPLKATSTPVSIKQYPMSQEARLGIKPHIQRLLDQGILVPCQSPWNTPLLPVKKPGTNDYRPVQDLREVNKRVEDIHPTVPNPYNLLSGLPPSHQWYTVLDLKDAFFCLRLHPTSQPLFAFEWRDPEMGISGQLTWTRLPQGFKNSPTLFNEALHRDLADFRIQHPDLILLQYVDDLLLAATSELDCQQGTRALLQTLGNLGYRASAKKAQICQKQVKYLGYLLKEGQRWLTEARKETVMGQPTPKTPRQLREFLGKAGFCRLFIPGFAEMAAPLYPLTKPGTLFNWGPDQQKAYQEIKQALLTAPALGLPDLTKPFELFVDEKQGYAKGVLTQKLGPWRRPVAYLSKKLDPVAAGWPPCLRMVAAIAVLTKDAGKLTMGQPLVILAPHAVEALVKQPPDRWLSNARMTHYQALLLDTDRVQFGPVVALNPATLLPLPEEGLQHNCLDILAEAHGTRPDLTDQPLPDADHTWYTDGSSLLQEGQRKAGAAVTTETEVIWAKALPAGTSAQRAELIALTQALKMAEGKKLNVYTDSRYAFATAHIHGEIYRRRGWLTSEGKEIKNKDEILALLKALFLPKRLSIIHCPGHQKGHSAEARGNRMADQAARKAAITETPDTSTLLAGKRTADGSEFEKRTADGSEFESPKKKAKVE

SEQ ID NO: 2814 - protein, 2097 aa, synthetic construct
MPAAKRVKLDGGDKKYSIGLDIGTNSVGWAVITDEYKVPSKKFKVLGNTDRHSIKKNLIGALLFDSGETAEATRLKRTARRRYTRRKNRICYLQEIFSNEMAKVDDSFFHRLEESFLVEEDKKHERHPIFGNIVDEVAYHEKYPTIYHLRKKLVDSTDKADLRLIYLALAHMIKFRGHFLIEGDLNPDNSDVDKLFIQLVQTYNQLFEENPINASGVDAKAILSARLSKSRRLENLIAQLPGEKKNGLFGNLIALSLGLTPNFKSNFDLAEDAKLQLSKDTYDDDLDNLLAQIGDQYADLFLAAKNLSDAILLSDILRVNTEITKAPLSASMIKRYDEHHQDLTLLKALVRQQLPEKYKEIFFDQSKNGYAGYIDGGASQEEFYKFIKPILEKMDGTEELLVKLNREDLLRKQRTFDNGSIPHQIHLGELHAILRRQEDFYPFLKDNREKIEKILTFRIPYYVGPLARGNSRFAWMTRKSEETITPWNFEEVVDKGASAQSFIERMTNFDKNLPNEKVLPKHSLLYEYFTVYNELTKVKYVTEGMRKPAFLSGEQKKAIVDLLFKTNRKVTVKQLKEDYFKKIECFDSVEISGVEDRFNASLGTYHDLLKIIKDKDFLDNEENEDILEDIVLTLTLFEDREMIEERLKTYAHLFDDKVMKQLKRRRYTGWGRLSRKLINGIRDKQSGKTILDFLKSDGFANRNFMQLIHDDSLTFKEDIQKAQVSGQGDSLHEHIANLAGSPAIKKGILQTVKVVDELVKVMGRHKPENIVIEMARENQTTQKGQKNSRERMKRIEEGIKELGSQILKEHPVENTQLQNEKLYLYYLQNGRDMYVDQELDINRLSDYDVDHIVPQSFLKDDSIDNKVLTRSDKARGKSDNVPSEEVVKKMKNYWRQLLNAKLITQRKFDNLTKAERGGLSELDKAGFIKRQLVETRQITKHVAQILDSRMNTKYDENDKLIREVKVITLKSKLVSDFRKDFQFYKVREINNYHHAHDAYLNAVVGTALIKKYPKLESEFVYGDYKVYDVRKMIAKSEQEIGKATAKYFFYSNIMNFFKTEITLANGEIRKRPLIETNGETGEIVWDKGRDFATVRKVLSMPQVNIVKKTEVQTGGFSKESILPKRNSDKLIARKKDWDPKKYGGFDSPTVAYSVLVVAKVEKGKSKKLKSVKELLGITIMERSSFEKNPIDFLEAKGYKEVKKDLIIKLPKYSLFELENGRKRMLASAGELQKGNELALPSKYVNFLYLASHYEKLKGSPEDNEQKQLFVEQHKHYLDEIIEQISEFSKRVILADANLDKVLSAYNKHRDKPIREQAENIIHLFTLTNLGAPAAFKYFDTTIDRKRYTSTKEVLDATLIHQSITGLYETRIDLSQLGGDGGGSAGSAAGSGEFGGTLNIEDEHRLHETSKEPDVSLGSTWLSDFPQAWAETGGMGLAVRQAPLIIPLKATSTPVSIKQYPMSQEARLGIKPHIQRLLDQGILVPCQSPWNTPLLPVKKPGTNDYRPVQDLREVNKRVEDIHPTVPNPYNLLSGLPPSHQWYTVLDLKDAFFCLRLHPTSQPLFAFEWRDPEMGISGQLTWTRLPQGFKNSPTLFNEALHRDLADFRIQHPDLILLQYVDDLLLAATSELDCQQGTRALLQTLGNLGYRASAKKAQICQKQVKYLGYLLKEGQRWLTEARKETVMGQPTPKTPRQLREFLGKAGFCRLFIPGFAEMAAPLYPLTKPGTLFNWGPDQQKAYQEIKQALLTAPALGLPDLTKPFELFVDEKQGYAKGVLTQKLGPWRRPVAYLSKKLDPVAAGWPPCLRMVAAIAVLTKDAGKLTMGQPLVILAPHAVEALVKQPPDRWLSNARMTHYQALLLDTDRVQFGPVVALNPATLLPLPEEGLQHNCLDILAEAHGTRPDLTDQPLPDADHTWYTDGSSLLQEGQRKAGAAVTTETEVIWAKALPAGTSAQRAELIALTQALKMAEGKKLNVYTDSRYAFATAHIHGEIYRRRGWLTSEGKEIKNKDEILALLKALFLPKRLSIIHCPGHQKGHSAEARGNRMADQAARKAAITETPDTSTLLAGKRTADGSEFEKRTADGSEFESPKKKAKVE

SEQ ID NO: 2815 - protein, 2096 aa, synthetic construct
MPAAKRVKLDGGDKKYSIGLDIGTNSVGWAVITDEYKVPSKKFKVLGNTDRHSIKKNLIGALLFDSGETAEATRLKRTARRRYTRRKNRICYLQEIFSNEMAKVDDSFFHRLEESFLVEEDKKHERHPIFGNIVDEVAYHEKYPTIYHLRKKLVDSTDKADLRLIYLALAHMIKFRGHFLIEGDLNPDNSDVDKLFIQLVQTYNQLFEENPINASGVDAKAILSARLSKSRRLENLIAQLPGEKKNGLFGNLIALSLGLTPNFKSNFDLAEDAKLQLSKDTYDDDLDNLLAQIGDQYADLFLAAKNLSDAILLSDILRVNTEITKAPLSASMIKRYDEHHQDLTLLKALVRQQLPEKYKEIFFDQSKNGYAGYIDGGASQEEFYKFIKPILEKMDGTEELLVKLNREDLLRKQRTFDNGSIPHQIHLGELHAILRRQEDFYPFLKDNREKIEKILTFRIPYYVGPLARGNSRFAWMTRKSEETITPWNFEEVVDKGASAQSFIERMTNFDKNLPNEKVLPKHSLLYEYFTVYNELTKVKYVTEGMRKPAFLSGEQKKAIVDLLFKTNRKVTVKQLKEDYFKKIECFDSVEISGVEDRFNASLGTYHDLLKIIKDKDFLDNEENEDILEDIVLTLTLFEDREMIEERLKTYAHLFDDKVMKQLKRRRYTGWGRLSRKLINGIRDKQSGKTILDFLKSDGFANRNFMQLIHDDSLTFKEDIQKAQVSGQGDSLHEHIANLAGSPAIKKGILQTVKVVDELVKVMGRHKPENIVIEMARENQTTQKGQKNSRERMKRIEEGIKELGSQILKEHPVENTQLQNEKLYLYYLQNGRDMYVDQELDINRLSDYDVDHIVPQSFLKDDSIDNKVLTRSDKARGKSDNVPSEEVVKKMKNYWRQLLNAKLITQRKFDNLTKAERGGLSELDKAGFIKRQLVETRQITKHVAQILDSRMNTKYDENDKLIREVKVITLKSKLVSDFRKDFQFYKVREINNYHHAHDAYLNAVVGTALIKKYPKLESEFVYGDYKVYDVRKMIAKSEQEIGKATAKYFFYSNIMNFFKTEITLANGEIRKRPLIETNGETGEIVWDKGRDFATVRKVLSMPQVNIVKKTEVQTGGFSKESILPKRNSDKLIARKKDWDPKKYGGFDSPTVAYSVLVVAKVEKGKSKKLKSVKELLGITIMERSSFEKNPIDFLEAKGYKEVKKDLIIKLPKYSLFELENGRKRMLASAGELQKGNELALPSKYVNFLYLASHYEKLKGSPEDNEQKQLFVEQHKHYLDEIIEQISEFSKRVILADANLDKVLSAYNKHRDKPIREQAENIIHLFTLTNLGAPAAFKYFDTTIDRKRYTSTKEVLDATLIHQSITGLYETRIDLSQLGGDGGEAAAKGGGGGSGGTLNIEDEHRLHETSKEPDVSLGSTWLSDFPQAWAETGGMGLAVRQAPLIIPLKATSTPVSIKQYPMSQEARLGIKPHIQRLLDQGILVPCQSPWNTPLLPVKKPGTNDYRPVQDLREVNKRVEDIHPTVPNPYNLLSGLPPSHQWYTVLDLKDAFFCLRLHPTSQPLFAFEWRDPEMGISGQLTWTRLPQGFKNSPTLFNEALHRDLADFRIQHPDLILLQYVDDLLLAATSELDCQQGTRALLQTLGNLGYRASAKKAQICQKQVKYLGYLLKEGQRWLTEARKETVMGQPTPKTPRQLREFLGKAGFCRLFIPGFAEMAAPLYPLTKPGTLFNWGPDQQKAYQEIKQALLTAPALGLPDLTKPFELFVDEKQGYAKGVLTQKLGPWRRPVAYLSKKLDPVAAGWPPCLRMVAAIAVLTKDAGKLTMGQPLVILAPHAVEALVKQPPDRWLSNARMTHYQALLLDTDRVQFGPVVALNPATLLPLPEEGLQHNCLDILAEAHGTRPDLTDQPLPDADHTWYTDGSSLLQEGQRKAGAAVTTETEVIWAKALPAGTSAQRAELIALTQALKMAEGKKLNVYTDSRYAFATAHIHGEIYRRRGWLTSEGKEIKNKDEILALLKALFLPKRLSIIHCPGHQKGHSAEARGNRMADQAARKAAITETPDTSTLLAGKRTADGSEFEKRTADGSEFESPKKKAKVE

SEQ ID NO: 2816 - protein, 2103 aa, synthetic construct
MPAAKRVKLDGGDKKYSIGLDIGTNSVGWAVITDEYKVPSKKFKVLGNTDRHSIKKNLIGALLFDSGETAEATRLKRTARRRYTRRKNRICYLQEIFSNEMAKVDDSFFHRLEESFLVEEDKKHERHPIFGNIVDEVAYHEKYPTIYHLRKKLVDSTDKADLRLIYLALAHMIKFRGHFLIEGDLNPDNSDVDKLFIQLVQTYNQLFEENPINASGVDAKAILSARLSKSRRLENLIAQLPGEKKNGLFGNLIALSLGLTPNFKSNFDLAEDAKLQLSKDTYDDDLDNLLAQIGDQYADLFLAAKNLSDAILLSDILRVNTEITKAPLSASMIKRYDEHHQDLTLLKALVRQQLPEKYKEIFFDQSKNGYAGYIDGGASQEEFYKFIKPILEKMDGTEELLVKLNREDLLRKQRTFDNGSIPHQIHLGELHAILRRQEDFYPFLKDNREKIEKILTFRIPYYVGPLARGNSRFAWMTRKSEETITPWNFEEVVDKGASAQSFIERMTNFDKNLPNEKVLPKHSLLYEYFTVYNELTKVKYVTEGMRKPAFLSGEQKKAIVDLLFKTNRKVTVKQLKEDYFKKIECFDSVEISGVEDRFNASLGTYHDLLKIIKDKDFLDNEENEDILEDIVLTLTLFEDREMIEERLKTYAHLFDDKVMKQLKRRRYTGWGRLSRKLINGIRDKQSGKTILDFLKSDGFANRNFMQLIHDDSLTFKEDIQKAQVSGQGDSLHEHIANLAGSPAIKKGILQTVKVVDELVKVMGRHKPENIVIEMARENQTTQKGQKNSRERMKRIEEGIKELGSQILKEHPVENTQLQNEKLYLYYLQNGRDMYVDQELDINRLSDYDVDHIVPQSFLKDDSIDNKVLTRSDKARGKSDNVPSEEVVKKMKNYWRQLLNAKLITQRKFDNLTKAERGGLSELDKAGFIKRQLVETRQITKHVAQILDSRMNTKYDENDKLIREVKVITLKSKLVSDFRKDFQFYKVREINNYHHAHDAYLNAVVGTALIKKYPKLESEFVYGDYKVYDVRKMIAKSEQEIGKATAKYFFYSNIMNFFKTEITLANGEIRKRPLIETNGETGEIVWDKGRDFATVRKVLSMPQVNIVKKTEVQTGGFSKESILPKRNSDKLIARKKDWDPKKYGGFDSPTVAYSVLVVAKVEKGKSKKLKSVKELLGITIMERSSFEKNPIDFLEAKGYKEVKKDLIIKLPKYSLFELENGRKRMLASAGELQKGNELALPSKYVNFLYLASHYEKLKGSPEDNEQKQLFVEQHKHYLDEIIEQISEFSKRVILADANLDKVLSAYNKHRDKPIREQAENIIHLFTLTNLGAPAAFKYFDTTIDRKRYTSTKEVLDATLIHQSITGLYETRIDLSQLGGDGGGSSGSSGSSGSSGSSGSSGGTLNIEDEHRLHETSKEPDVSLGSTWLSDFPQAWAETGGMGLAVRQAPLIIPLKATSTPVSIKQYPMSQEARLGIKPHIQRLLDQGILVPCQSPWNTPLLPVKKPGTNDYRPVQDLREVNKRVEDIHPTVPNPYNLLSGLPPSHQWYTVLDLKDAFFCLRLHPTSQPLFAFEWRDPEMGISGQLTWTRLPQGFKNSPTLFNEALHRDLADFRIQHPDLILLQYVDDLLLAATSELDCQQGTRALLQTLGNLGYRASAKKAQICQKQVKYLGYLLKEGQRWLTEARKETVMGQPTPKTPRQLREFLGKAGFCRLFIPGFAEMAAPLYPLTKPGTLFNWGPDQQKAYQEIKQALLTAPALGLPDLTKPFELFVDEKQGYAKGVLTQKLGPWRRPVAYLSKKLDPVAAGWPPCLRMVAAIAVLTKDAGKLTMGQPLVILAPHAVEALVKQPPDRWLSNARMTHYQALLLDTDRVQFGPVVALNPATLLPLPEEGLQHNCLDILAEAHGTRPDLTDQPLPDADHTWYTDGSSLLQEGQRKAGAAVTTETEVIWAKALPAGTSAQRAELIALTQALKMAEGKKLNVYTDSRYAFATAHIHGEIYRRRGWLTSEGKEIKNKDEILALLKALFLPKRLSIIHCPGHQKGHSAEARGNRMADQAARKAAITETPDTSTLLAGKRTADGSEFEKRTADGSEFESPKKKAKVE

SEQ ID NO: 2817 - protein, 2096 aa, synthetic construct
MPAAKRVKLDGGDKKYSIGLDIGTNSVGWAVITDEYKVPSKKFKVLGNTDRHSIKKNLIGALLFDSGETAEATRLKRTARRRYTRRKNRICYLQEIFSNEMAKVDDSFFHRLEESFLVEEDKKHERHPIFGNIVDEVAYHEKYPTIYHLRKKLVDSTDKADLRLIYLALAHMIKFRGHFLIEGDLNPDNSDVDKLFIQLVQTYNQLFEENPINASGVDAKAILSARLSKSRRLENLIAQLPGEKKNGLFGNLIALSLGLTPNFKSNFDLAEDAKLQLSKDTYDDDLDNLLAQIGDQYADLFLAAKNLSDAILLSDILRVNTEITKAPLSASMIKRYDEHHQDLTLLKALVRQQLPEKYKEIFFDQSKNGYAGYIDGGASQEEFYKFIKPILEKMDGTEELLVKLNREDLLRKQRTFDNGSIPHQIHLGELHAILRRQEDFYPFLKDNREKIEKILTFRIPYYVGPLARGNSRFAWMTRKSEETITPWNFEEVVDKGASAQSFIERMTNFDKNLPNEKVLPKHSLLYEYFTVYNELTKVKYVTEGMRKPAFLSGEQKKAIVDLLFKTNRKVTVKQLKEDYFKKIECFDSVEISGVEDRFNASLGTYHDLLKIIKDKDFLDNEENEDILEDIVLTLTLFEDREMIEERLKTYAHLFDDKVMKQLKRRRYTGWGRLSRKLINGIRDKQSGKTILDFLKSDGFANRNFMQLIHDDSLTFKEDIQKAQVSGQGDSLHEHIANLAGSPAIKKGILQTVKVVDELVKVMGRHKPENIVIEMARENQTTQKGQKNSRERMKRIEEGIKELGSQILKEHPVENTQLQNEKLYLYYLQNGRDMYVDQELDINRLSDYDVDHIVPQSFLKDDSIDNKVLTRSDKARGKSDNVPSEEVVKKMKNYWRQLLNAKLITQRKFDNLTKAERGGLSELDKAGFIKRQLVETRQITKHVAQILDSRMNTKYDENDKLIREVKVITLKSKLVSDFRKDFQFYKVREINNYHHAHDAYLNAVVGTALIKKYPKLESEFVYGDYKVYDVRKMIAKSEQEIGKATAKYFFYSNIMNFFKTEITLANGEIRKRPLIETNGETGEIVWDKGRDFATVRKVLSMPQVNIVKKTEVQTGGFSKESILPKRNSDKLIARKKDWDPKKYGGFDSPTVAYSVLVVAKVEKGKSKKLKSVKELLGITIMERSSFEKNPIDFLEAKGYKEVKKDLIIKLPKYSLFELENGRKRMLASAGELQKGNELALPSKYVNFLYLASHYEKLKGSPEDNEQKQLFVEQHKHYLDEIIEQISEFSKRVILADANLDKVLSAYNKHRDKPIREQAENIIHLFTLTNLGAPAAFKYFDTTIDRKRYTSTKEVLDATLIHQSITGLYETRIDLSQLGGDGGEAAAKGGSGSSGGTLNIEDEHRLHETSKEPDVSLGSTWLSDFPQAWAETGGMGLAVRQAPLIIPLKATSTPVSIKQYPMSQEARLGIKPHIQRLLDQGILVPCQSPWNTPLLPVKKPGTNDYRPVQDLREVNKRVEDIHPTVPNPYNLLSGLPPSHQWYTVLDLKDAFFCLRLHPTSQPLFAFEWRDPEMGISGQLTWTRLPQGFKNSPTLFNEALHRDLADFRIQHPDLILLQYVDDLLLAATSELDCQQGTRALLQTLGNLGYRASAKKAQICQKQVKYLGYLLKEGQRWLTEARKETVMGQPTPKTPRQLREFLGKAGFCRLFIPGFAEMAAPLYPLTKPGTLFNWGPDQQKAYQEIKQALLTAPALGLPDLTKPFELFVDEKQGYAKGVLTQKLGPWRRPVAYLSKKLDPVAAGWPPCLRMVAAIAVLTKDAGKLTMGQPLVILAPHAVEALVKQPPDRWLSNARMTHYQALLLDTDRVQFGPVVALNPATLLPLPEEGLQHNCLDILAEAHGTRPDLTDQPLPDADHTWYTDGSSLLQEGQRKAGAAVTTETEVIWAKALPAGTSAQRAELIALTQALKMAEGKKLNVYTDSRYAFATAHIHGEIYRRRGWLTSEGKEIKNKDEILALLKALFLPKRLSIIHCPGHQKGHSAEARGNRMADQAARKAAITETPDTSTLLAGKRTADGSEFEKRTADGSEFESPKKKAKVE

SEQ ID NO: 2818 - protein, 2094 aa, synthetic construct
MPAAKRVKLDGGDKKYSIGLDIGTNSVGWAVITDEYKVPSKKFKVLGNTDRHSIKKNLIGALLFDSGETAEATRLKRTARRRYTRRKNRICYLQEIFSNEMAKVDDSFFHRLEESFLVEEDKKHERHPIFGNIVDEVAYHEKYPTIYHLRKKLVDSTDKADLRLIYLALAHMIKFRGHFLIEGDLNPDNSDVDKLFIQLVQTYNQLFEENPINASGVDAKAILSARLSKSRRLENLIAQLPGEKKNGLFGNLIALSLGLTPNFKSNFDLAEDAKLQLSKDTYDDDLDNLLAQIGDQYADLFLAAKNLSDAILLSDILRVNTEITKAPLSASMIKRYDEHHQDLTLLKALVRQQLPEKYKEIFFDQSKNGYAGYIDGGASQEEFYKFIKPILEKMDGTEELLVKLNREDLLRKQRTFDNGSIPHQIHLGELHAILRRQEDFYPFLKDNREKIEKILTFRIPYYVGPLARGNSRFAWMTRKSEETITPWNFEEVVDKGASAQSFIERMTNFDKNLPNEKVLPKHSLLYEYFTVYNELTKVKYVTEGMRKPAFLSGEQKKAIVDLLFKTNRKVTVKQLKEDYFKKIECFDSVEISGVEDRFNASLGTYHDLLKIIKDKDFLDNEENEDILEDIVLTLTLFEDREMIEERLKTYAHLFDDKVMKQLKRRRYTGWGRLSRKLINGIRDKQSGKTILDFLKSDGFANRNFMQLIHDDSLTFKEDIQKAQVSGQGDSLHEHIANLAGSPAIKKGILQTVKVVDELVKVMGRHKPENIVIEMARENQTTQKGQKNSRERMKRIEEGIKELGSQILKEHPVENTQLQNEKLYLYYLQNGRDMYVDQELDINRLSDYDVDHIVPQSFLKDDSIDNKVLTRSDKARGKSDNVPSEEVVKKMKNYWRQLLNAKLITQRKFDNLTKAERGGLSELDKAGFIKRQLVETRQITKHVAQILDSRMNTKYDENDKLIREVKVITLKSKLVSDFRKDFQFYKVREINNYHHAHDAYLNAVVGTALIKKYPKLESEFVYGDYKVYDVRKMIAKSEQEIGKATAKYFFYSNIMNFFKTEITLANGEIRKRPLIETNGETGEIVWDKGRDFATVRKVLSMPQVNIVKKTEVQTGGFSKESILPKRNSDKLIARKKDWDPKKYGGFDSPTVAYSVLVVAKVEKGKSKKLKSVKELLGITIMERSSFEKNPIDFLEAKGYKEVKKDLIIKLPKYSLFELENGRKRMLASAGELQKGNELALPSKYVNFLYLASHYEKLKGSPEDNEQKQLFVEQHKHYLDEIIEQISEFSKRVILADANLDKVLSAYNKHRDKPIREQAENIIHLFTLTNLGAPAAFKYFDTTIDRKRYTSTKEVLDATLIHQSITGLYETRIDLSQLGGDGGGGSGSSGGGGGTLNIEDEHRLHETSKEPDVSLGSTWLSDFPQAWAETGGMGLAVRQAPLIIPLKATSTPVSIKQYPMSQEARLGIKPHIQRLLDQGILVPCQSPWNTPLLPVKKPGTNDYRPVQDLREVNKRVEDIHPTVPNPYNLLSGLPPSHQWYTVLDLKDAFFCLRLHPTSQPLFAFEWRDPEMGISGQLTWTRLPQGFKNSPTLFNEALHRDLADFRIQHPDLILLQYVDDLLLAATSELDCQQGTRALLQTLGNLGYRASAKKAQICQKQVKYLGYLLKEGQRWLTEARKETVMGQPTPKTPRQLREFLGKAGFCRLFIPGFAEMAAPLYPLTKPGTLFNWGPDQQKAYQEIKQALLTAPALGLPDLTKPFELFVDEKQGYAKGVLTQKLGPWRRPVAYLSKKLDPVAAGWPPCLRMVAAIAVLTKDAGKLTMGQPLVILAPHAVEALVKQPPDRWLSNARMTHYQALLLDTDRVQFGPVVALNPATLLPLPEEGLQHNCLDILAEAHGTRPDLTDQPLPDADHTWYTDGSSLLQEGQRKAGAAVTTETEVIWAKALPAGTSAQRAELIALTQALKMAEGKKLNVYTDSRYAFATAHIHGEIYRRRGWLTSEGKEIKNKDEILALLKALFLPKRLSIIHCPGHQKGHSAEARGNRMADQAARKAAITETPDTSTLLAGKRTADGSEFEKRTADGSEFESPKKKAKVE

SEQ ID NO: 2819 - protein, 2100 aa, synthetic construct
MPAAKRVKLDGGDKKYSIGLDIGTNSVGWAVITDEYKVPSKKFKVLGNTDRHSIKKNLIGALLFDSGETAEATRLKRTARRRYTRRKNRICYLQEIFSNEMAKVDDSFFHRLEESFLVEEDKKHERHPIFGNIVDEVAYHEKYPTIYHLRKKLVDSTDKADLRLIYLALAHMIKFRGHFLIEGDLNPDNSDVDKLFIQLVQTYNQLFEENPINASGVDAKAILSARLSKSRRLENLIAQLPGEKKNGLFGNLIALSLGLTPNFKSNFDLAEDAKLQLSKDTYDDDLDNLLAQIGDQYADLFLAAKNLSDAILLSDILRVNTEITKAPLSASMIKRYDEHHQDLTLLKALVRQQLPEKYKEIFFDQSKNGYAGYIDGGASQEEFYKFIKPILEKMDGTEELLVKLNREDLLRKQRTFDNGSIPHQIHLGELHAILRRQEDFYPFLKDNREKIEKILTFRIPYYVGPLARGNSRFAWMTRKSEETITPWNFEEVVDKGASAQSFIERMTNFDKNLPNEKVLPKHSLLYEYFTVYNELTKVKYVTEGMRKPAFLSGEQKKAIVDLLFKTNRKVTVKQLKEDYFKKIECFDSVEISGVEDRFNASLGTYHDLLKIIKDKDFLDNEENEDILEDIVLTLTLFEDREMIEERLKTYAHLFDDKVMKQLKRRRYTGWGRLSRKLINGIRDKQSGKTILDFLKSDGFANRNFMQLIHDDSLTFKEDIQKAQVSGQGDSLHEHIANLAGSPAIKKGILQTVKVVDELVKVMGRHKPENIVIEMARENQTTQKGQKNSRERMKRIEEGIKELGSQILKEHPVENTQLQNEKLYLYYLQNGRDMYVDQELDINRLSDYDVDHIVPQSFLKDDSIDNKVLTRSDKARGKSDNVPSEEVVKKMKNYWRQLLNAKLITQRKFDNLTKAERGGLSELDKAGFIKRQLVETRQITKHVAQILDSRMNTKYDENDKLIREVKVITLKSKLVSDFRKDFQFYKVREINNYHHAHDAYLNAVVGTALIKKYPKLESEFVYGDYKVYDVRKMIAKSEQEIGKATAKYFFYSNIMNFFKTEITLANGEIRKRPLIETNGETGEIVWDKGRDFATVRKVLSMPQVNIVKKTEVQTGGFSKESILPKRNSDKLIARKKDWDPKKYGGFDSPTVAYSVLVVAKVEKGKSKKLKSVKELLGITIMERSSFEKNPIDFLEAKGYKEVKKDLIIKLPKYSLFELENGRKRMLASAGELQKGNELALPSKYVNFLYLASHYEKLKGSPEDNEQKQLFVEQHKHYLDEIIEQISEFSKRVILADANLDKVLSAYNKHRDKPIREQAENIIHLFTLTNLGAPAAFKYFDTTIDRKRYTSTKEVLDATLIHQSITGLYETRIDLSQLGGDGGGGGGSGGGGSGGGGSGGTLNIEDEHRLHETSKEPDVSLGSTWLSDFPQAWAETGGMGLAVRQAPLIIPLKATSTPVSIKQYPMSQEARLGIKPHIQRLLDQGILVPCQSPWNTPLLPVKKPGTNDYRPVQDLREVNKRVEDIHPTVPNPYNLLSGLPPSHQWYTVLDLKDAFFCLRLHPTSQPLFAFEWRDPEMGISGQLTWTRLPQGFKNSPTLFNEALHRDLADFRIQHPDLILLQYVDDLLLAATSELDCQQGTRALLQTLGNLGYRASAKKAQICQKQVKYLGYLLKEGQRWLTEARKETVMGQPTPKTPRQLREFLGKAGFCRLFIPGFAEMAAPLYPLTKPGTLFNWGPDQQKAYQEIKQALLTAPALGLPDLTKPFELFVDEKQGYAKGVLTQKLGPWRRPVAYLSKKLDPVAAGWPPCLRMVAAIAVLTKDAGKLTMGQPLVILAPHAVEALVKQPPDRWLSNARMTHYQALLLDTDRVQFGPVVALNPATLLPLPEEGLQHNCLDILAEAHGTRPDLTDQPLPDADHTWYTDGSSLLQEGQRKAGAAVTTETEVIWAKALPAGTSAQRAELIALTQALKMAEGKKLNVYTDSRYAFATAHIHGEIYRRRGWLTSEGKEIKNKDEILALLKALFLPKRLSIIHCPGHQKGHSAEARGNRMADQAARKAAITETPDTSTLLAGKRTADGSEFEKRTADGSEFESPKKKAKVE

SEQ ID NO: 2820 - protein, 2091 aa, synthetic construct
MPAAKRVKLDGGDKKYSIGLDIGTNSVGWAVITDEYKVPSKKFKVLGNTDRHSIKKNLIGALLFDSGETAEATRLKRTARRRYTRRKNRICYLQEIFSNEMAKVDDSFFHRLEESFLVEEDKKHERHPIFGNIVDEVAYHEKYPTIYHLRKKLVDSTDKADLRLIYLALAHMIKFRGHFLIEGDLNPDNSDVDKLFIQLVQTYNQLFEENPINASGVDAKAILSARLSKSRRLENLIAQLPGEKKNGLFGNLIALSLGLTPNFKSNFDLAEDAKLQLSKDTYDDDLDNLLAQIGDQYADLFLAAKNLSDAILLSDILRVNTEITKAPLSASMIKRYDEHHQDLTLLKALVRQQLPEKYKEIFFDQSKNGYAGYIDGGASQEEFYKFIKPILEKMDGTEELLVKLNREDLLRKQRTFDNGSIPHQIHLGELHAILRRQEDFYPFLKDNREKIEKILTFRIPYYVGPLARGNSRFAWMTRKSEETITPWNFEEVVDKGASAQSFIERMTNFDKNLPNEKVLPKHSLLYEYFTVYNELTKVKYVTEGMRKPAFLSGEQKKAIVDLLFKTNRKVTVKQLKEDYFKKIECFDSVEISGVEDRFNASLGTYHDLLKIIKDKDFLDNEENEDILEDIVLTLTLFEDREMIEERLKTYAHLFDDKVMKQLKRRRYTGWGRLSRKLINGIRDKQSGKTILDFLKSDGFANRNFMQLIHDDSLTFKEDIQKAQVSGQGDSLHEHIANLAGSPAIKKGILQTVKVVDELVKVMGRHKPENIVIEMARENQTTQKGQKNSRERMKRIEEGIKELGSQILKEHPVENTQLQNEKLYLYYLQNGRDMYVDQELDINRLSDYDVDHIVPQSFLKDDSIDNKVLTRSDKARGKSDNVPSEEVVKKMKNYWRQLLNAKLITQRKFDNLTKAERGGLSELDKAGFIKRQLVETRQITKHVAQILDSRMNTKYDENDKLIREVKVITLKSKLVSDFRKDFQFYKVREINNYHHAHDAYLNAVVGTALIKKYPKLESEFVYGDYKVYDVRKMIAKSEQEIGKATAKYFFYSNIMNFFKTEITLANGEIRKRPLIETNGETGEIVWDKGRDFATVRKVLSMPQVNIVKKTEVQTGGFSKESILPKRNSDKLIARKKDWDPKKYGGFDSPTVAYSVLVVAKVEKGKSKKLKSVKELLGITIMERSSFEKNPIDFLEAKGYKEVKKDLIIKLPKYSLFELENGRKRMLASAGELQKGNELALPSKYVNFLYLASHYEKLKGSPEDNEQKQLFVEQHKHYLDEIIEQISEFSKRVILADANLDKVLSAYNKHRDKPIREQAENIIHLFTLTNLGAPAAFKYFDTTIDRKRYTSTKEVLDATLIHQSITGLYETRIDLSQLGGDGGGGGGSSGGTLNIEDEHRLHETSKEPDVSLGSTWLSDFPQAWAETGGMGLAVRQAPLIIPLKATSTPVSIKQYPMSQEARLGIKPHIQRLLDQGILVPCQSPWNTPLLPVKKPGTNDYRPVQDLREVNKRVEDIHPTVPNPYNLLSGLPPSHQWYTVLDLKDAFFCLRLHPTSQPLFAFEWRDPEMGISGQLTWTRLPQGFKNSPTLFNEALHRDLADFRIQHPDLILLQYVDDLLLAATSELDCQQGTRALLQTLGNLGYRASAKKAQICQKQVKYLGYLLKEGQRWLTEARKETVMGQPTPKTPRQLREFLGKAGFCRLFIPGFAEMAAPLYPLTKPGTLFNWGPDQQKAYQEIKQALLTAPALGLPDLTKPFELFVDEKQGYAKGVLTQKLGPWRRPVAYLSKKLDPVAAGWPPCLRMVAAIAVLTKDAGKLTMGQPLVILAPHAVEALVKQPPDRWLSNARMTHYQALLLDTDRVQFGPVVALNPATLLPLPEEGLQHNCLDILAEAHGTRPDLTDQPLPDADHTWYTDGSSLLQEGQRKAGAAVTTETEVIWAKALPAGTSAQRAELIALTQALKMAEGKKLNVYTDSRYAFATAHIHGEIYRRRGWLTSEGKEIKNKDEILALLKALFLPKRLSIIHCPGHQKGHSAEARGNRMADQAARKAAITETPDTSTLLAGKRTADGSEFEKRTADGSEFESPKKKAKVE

SEQ ID NO: 2821 - protein, 2093 aa, synthetic construct
MPAAKRVKLDGGDKKYSIGLDIGTNSVGWAVITDEYKVPSKKFKVLGNTDRHSIKKNLIGALLFDSGETAEATRLKRTARRRYTRRKNRICYLQEIFSNEMAKVDDSFFHRLEESFLVEEDKKHERHPIFGNIVDEVAYHEKYPTIYHLRKKLVDSTDKADLRLIYLALAHMIKFRGHFLIEGDLNPDNSDVDKLFIQLVQTYNQLFEENPINASGVDAKAILSARLSKSRRLENLIAQLPGEKKNGLFGNLIALSLGLTPNFKSNFDLAEDAKLQLSKDTYDDDLDNLLAQIGDQYADLFLAAKNLSDAILLSDILRVNTEITKAPLSASMIKRYDEHHQDLTLLKALVRQQLPEKYKEIFFDQSKNGYAGYIDGGASQEEFYKFIKPILEKMDGTEELLVKLNREDLLRKQRTFDNGSIPHQIHLGELHAILRRQEDFYPFLKDNREKIEKILTFRIPYYVGPLARGNSRFAWMTRKSEETITPWNFEEVVDKGASAQSFIERMTNFDKNLPNEKVLPKHSLLYEYFTVYNELTKVKYVTEGMRKPAFLSGEQKKAIVDLLFKTNRKVTVKQLKEDYFKKIECFDSVEISGVEDRFNASLGTYHDLLKIIKDKDFLDNEENEDILEDIVLTLTLFEDREMIEERLKTYAHLFDDKVMKQLKRRRYTGWGRLSRKLINGIRDKQSGKTILDFLKSDGFANRNFMQLIHDDSLTFKEDIQKAQVSGQGDSLHEHIANLAGSPAIKKGILQTVKVVDELVKVMGRHKPENIVIEMARENQTTQKGQKNSRERMKRIEEGIKELGSQILKEHPVENTQLQNEKLYLYYLQNGRDMYVDQELDINRLSDYDVDHIVPQSFLKDDSIDNKVLTRSDKARGKSDNVPSEEVVKKMKNYWRQLLNAKLITQRKFDNLTKAERGGLSELDKAGFIKRQLVETRQITKHVAQILDSRMNTKYDENDKLIREVKVITLKSKLVSDFRKDFQFYKVREINNYHHAHDAYLNAVVGTALIKKYPKLESEFVYGDYKVYDVRKMIAKSEQEIGKATAKYFFYSNIMNFFKTEITLANGEIRKRPLIETNGETGEIVWDKGRDFATVRKVLSMPQVNIVKKTEVQTGGFSKESILPKRNSDKLIARKKDWDPKKYGGFDSPTVAYSVLVVAKVEKGKSKKLKSVKELLGITIMERSSFEKNPIDFLEAKGYKEVKKDLIIKLPKYSLFELENGRKRMLASAGELQKGNELALPSKYVNFLYLASHYEKLKGSPEDNEQKQLFVEQHKHYLDEIIEQISEFSKRVILADANLDKVLSAYNKHRDKPIREQAENIIHLFTLTNLGAPAAFKYFDTTIDRKRYTSTKEVLDATLIHQSITGLYETRIDLSQLGGDGGEAAAKGSSGGTLNIEDEHRLHETSKEPDVSLGSTWLSDFPQAWAETGGMGLAVRQAPLIIPLKATSTPVSIKQYPMSQEARLGIKPHIQRLLDQGILVPCQSPWNTPLLPVKKPGTNDYRPVQDLREVNKRVEDIHPTVPNPYNLLSGLPPSHQWYTVLDLKDAFFCLRLHPTSQPLFAFEWRDPEMGISGQLTWTRLPQGFKNSPTLFNEALHRDLADFRIQHPDLILLQYVDDLLLAATSELDCQQGTRALLQTLGNLGYRASAKKAQICQKQVKYLGYLLKEGQRWLTEARKETVMGQPTPKTPRQLREFLGKAGFCRLFIPGFAEMAAPLYPLTKPGTLFNWGPDQQKAYQEIKQALLTAPALGLPDLTKPFELFVDEKQGYAKGVLTQKLGPWRRPVAYLSKKLDPVAAGWPPCLRMVAAIAVLTKDAGKLTMGQPLVILAPHAVEALVKQPPDRWLSNARMTHYQALLLDTDRVQFGPVVALNPATLLPLPEEGLQHNCLDILAEAHGTRPDLTDQPLPDADHTWYTDGSSLLQEGQRKAGAAVTTETEVIWAKALPAGTSAQRAELIALTQALKMAEGKKLNVYTDSRYAFATAHIHGEIYRRRGWLTSEGKEIKNKDEILALLKALFLPKRLSIIHCPGHQKGHSAEARGNRMADQAARKAAITETPDTSTLLAGKRTADGSEFEKRTADGSEFESPKKKAKVE

SEQ ID NO: 2822 - protein, 2096 aa, synthetic construct
MPAAKRVKLDGGDKKYSIGLDIGTNSVGWAVITDEYKVPSKKFKVLGNTDRHSIKKNLIGALLFDSGETAEATRLKRTARRRYTRRKNRICYLQEIFSNEMAKVDDSFFHRLEESFLVEEDKKHERHPIFGNIVDEVAYHEKYPTIYHLRKKLVDSTDKADLRLIYLALAHMIKFRGHFLIEGDLNPDNSDVDKLFIQLVQTYNQLFEENPINASGVDAKAILSARLSKSRRLENLIAQLPGEKKNGLFGNLIALSLGLTPNFKSNFDLAEDAKLQLSKDTYDDDLDNLLAQIGDQYADLFLAAKNLSDAILLSDILRVNTEITKAPLSASMIKRYDEHHQDLTLLKALVRQQLPEKYKEIFFDQSKNGYAGYIDGGASQEEFYKFIKPILEKMDGTEELLVKLNREDLLRKQRTFDNGSIPHQIHLGELHAILRRQEDFYPFLKDNREKIEKILTFRIPYYVGPLARGNSRFAWMTRKSEETITPWNFEEVVDKGASAQSFIERMTNFDKNLPNEKVLPKHSLLYEYFTVYNELTKVKYVTEGMRKPAFLSGEQKKAIVDLLFKTNRKVTVKQLKEDYFKKIECFDSVEISGVEDRFNASLGTYHDLLKIIKDKDFLDNEENEDILEDIVLTLTLFEDREMIEERLKTYAHLFDDKVMKQLKRRRYTGWGRLSRKLINGIRDKQSGKTILDFLKSDGFANRNFMQLIHDDSLTFKEDIQKAQVSGQGDSLHEHIANLAGSPAIKKGILQTVKVVDELVKVMGRHKPENIVIEMARENQTTQKGQKNSRERMKRIEEGIKELGSQILKEHPVENTQLQNEKLYLYYLQNGRDMYVDQELDINRLSDYDVDHIVPQSFLKDDSIDNKVLTRSDKARGKSDNVPSEEVVKKMKNYWRQLLNAKLITQRKFDNLTKAERGGLSELDKAGFIKRQLVETRQITKHVAQILDSRMNTKYDENDKLIREVKVITLKSKLVSDFRKDFQFYKVREINNYHHAHDAYLNAVVGTALIKKYPKLESEFVYGDYKVYDVRKMIAKSEQEIGKATAKYFFYSNIMNFFKTEITLANGEIRKRPLIETNGETGEIVWDKGRDFATVRKVLSMPQVNIVKKTEVQTGGFSKESILPKRNSDKLIARKKDWDPKKYGGFDSPTVAYSVLVVAKVEKGKSKKLKSVKELLGITIMERSSFEKNPIDFLEAKGYKEVKKDLIIKLPKYSLFELENGRKRMLASAGELQKGNELALPSKYVNFLYLASHYEKLKGSPEDNEQKQLFVEQHKHYLDEIIEQISEFSKRVILADANLDKVLSAYNKHRDKPIREQAENIIHLFTLTNLGAPAAFKYFDTTIDRKRYTSTKEVLDATLIHQSITGLYETRIDLSQLGGDGGPAPGGGEAAAKGGTLNIEDEHRLHETSKEPDVSLGSTWLSDFPQAWAETGGMGLAVRQAPLIIPLKATSTPVSIKQYPMSQEARLGIKPHIQRLLDQGILVPCQSPWNTPLLPVKKPGTNDYRPVQDLREVNKRVEDIHPTVPNPYNLLSGLPPSHQWYTVLDLKDAFFCLRLHPTSQPLFAFEWRDPEMGISGQLTWTRLPQGFKNSPTLFNEALHRDLADFRIQHPDLILLQYVDDLLLAATSELDCQQGTRALLQTLGNLGYRASAKKAQICQKQVKYLGYLLKEGQRWLTEARKETVMGQPTPKTPRQLREFLGKAGFCRLFIPGFAEMAAPLYPLTKPGTLFNWGPDQQKAYQEIKQALLTAPALGLPDLTKPFELFVDEKQGYAKGVLTQKLGPWRRPVAYLSKKLDPVAAGWPPCLRMVAAIAVLTKDAGKLTMGQPLVILAPHAVEALVKQPPDRWLSNARMTHYQALLLDTDRVQFGPVVALNPATLLPLPEEGLQHNCLDILAEAHGTRPDLTDQPLPDADHTWYTDGSSLLQEGQRKAGAAVTTETEVIWAKALPAGTSAQRAELIALTQALKMAEGKKLNVYTDSRYAFATAHIHGEIYRRRGWLTSEGKEIKNKDEILALLKALFLPKRLSIIHCPGHQKGHSAEARGNRMADQAARKAAITETPDTSTLLAGKRTADGSEFEKRTADGSEFESPKKKAKVE

SEQ ID NO: 2823 - protein, 2090 aa, synthetic construct
MPAAKRVKLDGGDKKYSIGLDIGTNSVGWAVITDEYKVPSKKFKVLGNTDRHSIKKNLIGALLFDSGETAEATRLKRTARRRYTRRKNRICYLQEIFSNEMAKVDDSFFHRLEESFLVEEDKKHERHPIFGNIVDEVAYHEKYPTIYHLRKKLVDSTDKADLRLIYLALAHMIKFRGHFLIEGDLNPDNSDVDKLFIQLVQTYNQLFEENPINASGVDAKAILSARLSKSRRLENLIAQLPGEKKNGLFGNLIALSLGLTPNFKSNFDLAEDAKLQLSKDTYDDDLDNLLAQIGDQYADLFLAAKNLSDAILLSDILRVNTEITKAPLSASMIKRYDEHHQDLTLLKALVRQQLPEKYKEIFFDQSKNGYAGYIDGGASQEEFYKFIKPILEKMDGTEELLVKLNREDLLRKQRTFDNGSIPHQIHLGELHAILRRQEDFYPFLKDNREKIEKILTFRIPYYVGPLARGNSRFAWMTRKSEETITPWNFEEVVDKGASAQSFIERMTNFDKNLPNEKVLPKHSLLYEYFTVYNELTKVKYVTEGMRKPAFLSGEQKKAIVDLLFKTNRKVTVKQLKEDYFKKIECFDSVEISGVEDRFNASLGTYHDLLKIIKDKDFLDNEENEDILEDIVLTLTLFEDREMIEERLKTYAHLFDDKVMKQLKRRRYTGWGRLSRKLINGIRDKQSGKTILDFLKSDGFANRNFMQLIHDDSLTFKEDIQKAQVSGQGDSLHEHIANLAGSPAIKKGILQTVKVVDELVKVMGRHKPENIVIEMARENQTTQKGQKNSRERMKRIEEGIKELGSQILKEHPVENTQLQNEKLYLYYLQNGRDMYVDQELDINRLSDYDVDHIVPQSFLKDDSIDNKVLTRSDKARGKSDNVPSEEVVKKMKNYWRQLLNAKLITQRKFDNLTKAERGGLSELDKAGFIKRQLVETRQITKHVAQILDSRMNTKYDENDKLIREVKVITLKSKLVSDFRKDFQFYKVREINNYHHAHDAYLNAVVGTALIKKYPKLESEFVYGDYKVYDVRKMIAKSEQEIGKATAKYFFYSNIMNFFKTEITLANGEIRKRPLIETNGETGEIVWDKGRDFATVRKVLSMPQVNIVKKTEVQTGGFSKESILPKRNSDKLIARKKDWDPKKYGGFDSPTVAYSVLVVAKVEKGKSKKLKSVKELLGITIMERSSFEKNPIDFLEAKGYKEVKKDLIIKLPKYSLFELENGRKRMLASAGELQKGNELALPSKYVNFLYLASHYEKLKGSPEDNEQKQLFVEQHKHYLDEIIEQISEFSKRVILADANLDKVLSAYNKHRDKPIREQAENIIHLFTLTNLGAPAAFKYFDTTIDRKRYTSTKEVLDATLIHQSITGLYETRIDLSQLGGDGGEAAAKGGTLNIEDEHRLHETSKEPDVSLGSTWLSDFPQAWAETGGMGLAVRQAPLIIPLKATSTPVSIKQYPMSQEARLGIKPHIQRLLDQGILVPCQSPWNTPLLPVKKPGTNDYRPVQDLREVNKRVEDIHPTVPNPYNLLSGLPPSHQWYTVLDLKDAFFCLRLHPTSQPLFAFEWRDPEMGISGQLTWTRLPQGFKNSPTLFNEALHRDLADFRIQHPDLILLQYVDDLLLAATSELDCQQGTRALLQTLGNLGYRASAKKAQICQKQVKYLGYLLKEGQRWLTEARKETVMGQPTPKTPRQLREFLGKAGFCRLFIPGFAEMAAPLYPLTKPGTLFNWGPDQQKAYQEIKQALLTAPALGLPDLTKPFELFVDEKQGYAKGVLTQKLGPWRRPVAYLSKKLDPVAAGWPPCLRMVAAIAVLTKDAGKLTMGQPLVILAPHAVEALVKQPPDRWLSNARMTHYQALLLDTDRVQFGPVVALNPATLLPLPEEGLQHNCLDILAEAHGTRPDLTDQPLPDADHTWYTDGSSLLQEGQRKAGAAVTTETEVIWAKALPAGTSAQRAELIALTQALKMAEGKKLNVYTDSRYAFATAHIHGEIYRRRGWLTSEGKEIKNKDEILALLKALFLPKRLSIIHCPGHQKGHSAEARGNRMADQAARKAAITETPDTSTLLAGKRTADGSEFEKRTADGSEFESPKKKAKVE

SEQ ID NO: 2824 - protein, 2088 aa, synthetic construct
MPAAKRVKLDGGDKKYSIGLDIGTNSVGWAVITDEYKVPSKKFKVLGNTDRHSIKKNLIGALLFDSGETAEATRLKRTARRRYTRRKNRICYLQEIFSNEMAKVDDSFFHRLEESFLVEEDKKHERHPIFGNIVDEVAYHEKYPTIYHLRKKLVDSTDKADLRLIYLALAHMIKFRGHFLIEGDLNPDNSDVDKLFIQLVQTYNQLFEENPINASGVDAKAILSARLSKSRRLENLIAQLPGEKKNGLFGNLIALSLGLTPNFKSNFDLAEDAKLQLSKDTYDDDLDNLLAQIGDQYADLFLAAKNLSDAILLSDILRVNTEITKAPLSASMIKRYDEHHQDLTLLKALVRQQLPEKYKEIFFDQSKNGYAGYIDGGASQEEFYKFIKPILEKMDGTEELLVKLNREDLLRKQRTFDNGSIPHQIHLGELHAILRRQEDFYPFLKDNREKIEKILTFRIPYYVGPLARGNSRFAWMTRKSEETITPWNFEEVVDKGASAQSFIERMTNFDKNLPNEKVLPKHSLLYEYFTVYNELTKVKYVTEGMRKPAFLSGEQKKAIVDLLFKTNRKVTVKQLKEDYFKKIECFDSVEISGVEDRFNASLGTYHDLLKIIKDKDFLDNEENEDILEDIVLTLTLFEDREMIEERLKTYAHLFDDKVMKQLKRRRYTGWGRLSRKLINGIRDKQSGKTILDFLKSDGFANRNFMQLIHDDSLTFKEDIQKAQVSGQGDSLHEHIANLAGSPAIKKGILQTVKVVDELVKVMGRHKPENIVIEMARENQTTQKGQKNSRERMKRIEEGIKELGSQILKEHPVENTQLQNEKLYLYYLQNGRDMYVDQELDINRLSDYDVDHIVPQSFLKDDSIDNKVLTRSDKARGKSDNVPSEEVVKKMKNYWRQLLNAKLITQRKFDNLTKAERGGLSELDKAGFIKRQLVETRQITKHVAQILDSRMNTKYDENDKLIREVKVITLKSKLVSDFRKDFQFYKVREINNYHHAHDAYLNAVVGTALIKKYPKLESEFVYGDYKVYDVRKMIAKSEQEIGKATAKYFFYSNIMNFFKTEITLANGEIRKRPLIETNGETGEIVWDKGRDFATVRKVLSMPQVNIVKKTEVQTGGFSKESILPKRNSDKLIARKKDWDPKKYGGFDSPTVAYSVLVVAKVEKGKSKKLKSVKELLGITIMERSSFEKNPIDFLEAKGYKEVKKDLIIKLPKYSLFELENGRKRMLASAGELQKGNELALPSKYVNFLYLASHYEKLKGSPEDNEQKQLFVEQHKHYLDEIIEQISEFSKRVILADANLDKVLSAYNKHRDKPIREQAENIIHLFTLTNLGAPAAFKYFDTTIDRKRYTSTKEVLDATLIHQSITGLYETRIDLSQLGGDGGGGGGGTLNIEDEHRLHETSKEPDVSLGSTWLSDFPQAWAETGGMGLAVRQAPLIIPLKATSTPVSIKQYPMSQEARLGIKPHIQRLLDQGILVPCQSPWNTPLLPVKKPGTNDYRPVQDLREVNKRVEDIHPTVPNPYNLLSGLPPSHQWYTVLDLKDAFFCLRLHPTSQPLFAFEWRDPEMGISGQLTWTRLPQGFKNSPTLFNEALHRDLADFRIQHPDLILLQYVDDLLLAATSELDCQQGTRALLQTLGNLGYRASAKKAQICQKQVKYLGYLLKEGQRWLTEARKETVMGQPTPKTPRQLREFLGKAGFCRLFIPGFAEMAAPLYPLTKPGTLFNWGPDQQKAYQEIKQALLTAPALGLPDLTKPFELFVDEKQGYAKGVLTQKLGPWRRPVAYLSKKLDPVAAGWPPCLRMVAAIAVLTKDAGKLTMGQPLVILAPHAVEALVKQPPDRWLSNARMTHYQALLLDTDRVQFGPVVALNPATLLPLPEEGLQHNCLDILAEAHGTRPDLTDQPLPDADHTWYTDGSSLLQEGQRKAGAAVTTETEVIWAKALPAGTSAQRAELIALTQALKMAEGKKLNVYTDSRYAFATAHIHGEIYRRRGWLTSEGKEIKNKDEILALLKALFLPKRLSIIHCPGHQKGHSAEARGNRMADQAARKAAITETPDTSTLLAGKRTADGSEFEKRTADGSEFESPKKKAKVE

SEQ ID NO: 2825 - protein, 2090 aa, synthetic construct
MPAAKRVKLDGGDKKYSIGLDIGTNSVGWAVITDEYKVPSKKFKVLGNTDRHSIKKNLIGALLFDSGETAEATRLKRTARRRYTRRKNRICYLQEIFSNEMAKVDDSFFHRLEESFLVEEDKKHERHPIFGNIVDEVAYHEKYPTIYHLRKKLVDSTDKADLRLIYLALAHMIKFRGHFLIEGDLNPDNSDVDKLFIQLVQTYNQLFEENPINASGVDAKAILSARLSKSRRLENLIAQLPGEKKNGLFGNLIALSLGLTPNFKSNFDLAEDAKLQLSKDTYDDDLDNLLAQIGDQYADLFLAAKNLSDAILLSDILRVNTEITKAPLSASMIKRYDEHHQDLTLLKALVRQQLPEKYKEIFFDQSKNGYAGYIDGGASQEEFYKFIKPILEKMDGTEELLVKLNREDLLRKQRTFDNGSIPHQIHLGELHAILRRQEDFYPFLKDNREKIEKILTFRIPYYVGPLARGNSRFAWMTRKSEETITPWNFEEVVDKGASAQSFIERMTNFDKNLPNEKVLPKHSLLYEYFTVYNELTKVKYVTEGMRKPAFLSGEQKKAIVDLLFKTNRKVTVKQLKEDYFKKIECFDSVEISGVEDRFNASLGTYHDLLKIIKDKDFLDNEENEDILEDIVLTLTLFEDREMIEERLKTYAHLFDDKVMKQLKRRRYTGWGRLSRKLINGIRDKQSGKTILDFLKSDGFANRNFMQLIHDDSLTFKEDIQKAQVSGQGDSLHEHIANLAGSPAIKKGILQTVKVVDELVKVMGRHKPENIVIEMARENQTTQKGQKNSRERMKRIEEGIKELGSQILKEHPVENTQLQNEKLYLYYLQNGRDMYVDQELDINRLSDYDVDHIVPQSFLKDDSIDNKVLTRSDKARGKSDNVPSEEVVKKMKNYWRQLLNAKLITQRKFDNLTKAERGGLSELDKAGFIKRQLVETRQITKHVAQILDSRMNTKYDENDKLIREVKVITLKSKLVSDFRKDFQFYKVREINNYHHAHDAYLNAVVGTALIKKYPKLESEFVYGDYKVYDVRKMIAKSEQEIGKATAKYFFYSNIMNFFKTEITLANGEIRKRPLIETNGETGEIVWDKGRDFATVRKVLSMPQVNIVKKTEVQTGGFSKESILPKRNSDKLIARKKDWDPKKYGGFDSPTVAYSVLVVAKVEKGKSKKLKSVKELLGITIMERSSFEKNPIDFLEAKGYKEVKKDLIIKLPKYSLFELENGRKRMLASAGELQKGNELALPSKYVNFLYLASHYEKLKGSPEDNEQKQLFVEQHKHYLDEIIEQISEFSKRVILADANLDKVLSAYNKHRDKPIREQAENIIHLFTLTNLGAPAAFKYFDTTIDRKRYTSTKEVLDATLIHQSITGLYETRIDLSQLGGDGGGGGGSGGTLNIEDEHRLHETSKEPDVSLGSTWLSDFPQAWAETGGMGLAVRQAPLIIPLKATSTPVSIKQYPMSQEARLGIKPHIQRLLDQGILVPCQSPWNTPLLPVKKPGTNDYRPVQDLREVNKRVEDIHPTVPNPYNLLSGLPPSHQWYTVLDLKDAFFCLRLHPTSQPLFAFEWRDPEMGISGQLTWTRLPQGFKNSPTLFNEALHRDLADFRIQHPDLILLQYVDDLLLAATSELDCQQGTRALLQTLGNLGYRASAKKAQICQKQVKYLGYLLKEGQRWLTEARKETVMGQPTPKTPRQLREFLGKAGFCRLFIPGFAEMAAPLYPLTKPGTLFNWGPDQQKAYQEIKQALLTAPALGLPDLTKPFELFVDEKQGYAKGVLTQKLGPWRRPVAYLSKKLDPVAAGWPPCLRMVAAIAVLTKDAGKLTMGQPLVILAPHAVEALVKQPPDRWLSNARMTHYQALLLDTDRVQFGPVVALNPATLLPLPEEGLQHNCLDILAEAHGTRPDLTDQPLPDADHTWYTDGSSLLQEGQRKAGAAVTTETEVIWAKALPAGTSAQRAELIALTQALKMAEGKKLNVYTDSRYAFATAHIHGEIYRRRGWLTSEGKEIKNKDEILALLKALFLPKRLSIIHCPGHQKGHSAEARGNRMADQAARKAAITETPDTSTLLAGKRTADGSEFEKRTADGSEFESPKKKAKVE

SEQ ID NO: 2826 - protein, 2096 aa, synthetic construct
MPAAKRVKLDGGDKKYSIGLDIGTNSVGWAVITDEYKVPSKKFKVLGNTDRHSIKKNLIGALLFDSGETAEATRLKRTARRRYTRRKNRICYLQEIFSNEMAKVDDSFFHRLEESFLVEEDKKHERHPIFGNIVDEVAYHEKYPTIYHLRKKLVDSTDKADLRLIYLALAHMIKFRGHFLIEGDLNPDNSDVDKLFIQLVQTYNQLFEENPINASGVDAKAILSARLSKSRRLENLIAQLPGEKKNGLFGNLIALSLGLTPNFKSNFDLAEDAKLQLSKDTYDDDLDNLLAQIGDQYADLFLAAKNLSDAILLSDILRVNTEITKAPLSASMIKRYDEHHQDLTLLKALVRQQLPEKYKEIFFDQSKNGYAGYIDGGASQEEFYKFIKPILEKMDGTEELLVKLNREDLLRKQRTFDNGSIPHQIHLGELHAILRRQEDFYPFLKDNREKIEKILTFRIPYYVGPLARGNSRFAWMTRKSEETITPWNFEEVVDKGASAQSFIERMTNFDKNLPNEKVLPKHSLLYEYFTVYNELTKVKYVTEGMRKPAFLSGEQKKAIVDLLFKTNRKVTVKQLKEDYFKKIECFDSVEISGVEDRFNASLGTYHDLLKIIKDKDFLDNEENEDILEDIVLTLTLFEDREMIEERLKTYAHLFDDKVMKQLKRRRYTGWGRLSRKLINGIRDKQSGKTILDFLKSDGFANRNFMQLIHDDSLTFKEDIQKAQVSGQGDSLHEHIANLAGSPAIKKGILQTVKVVDELVKVMGRHKPENIVIEMARENQTTQKGQKNSRERMKRIEEGIKELGSQILKEHPVENTQLQNEKLYLYYLQNGRDMYVDQELDINRLSDYDVDHIVPQSFLKDDSIDNKVLTRSDKARGKSDNVPSEEVVKKMKNYWRQLLNAKLITQRKFDNLTKAERGGLSELDKAGFIKRQLVETRQITKHVAQILDSRMNTKYDENDKLIREVKVITLKSKLVSDFRKDFQFYKVREINNYHHAHDAYLNAVVGTALIKKYPKLESEFVYGDYKVYDVRKMIAKSEQEIGKATAKYFFYSNIMNFFKTEITLANGEIRKRPLIETNGETGEIVWDKGRDFATVRKVLSMPQVNIVKKTEVQTGGFSKESILPKRNSDKLIARKKDWDPKKYGGFDSPTVAYSVLVVAKVEKGKSKKLKSVKELLGITIMERSSFEKNPIDFLEAKGYKEVKKDLIIKLPKYSLFELENGRKRMLASAGELQKGNELALPSKYVNFLYLASHYEKLKGSPEDNEQKQLFVEQHKHYLDEIIEQISEFSKRVILADANLDKVLSAYNKHRDKPIREQAENIIHLFTLTNLGAPAAFKYFDTTIDRKRYTSTKEVLDATLIHQSITGLYETRIDLSQLGGDGGGGSEAAAKGSSGGTLNIEDEHRLHETSKEPDVSLGSTWLSDFPQAWAETGGMGLAVRQAPLIIPLKATSTPVSIKQYPMSQEARLGIKPHIQRLLDQGILVPCQSPWNTPLLPVKKPGTNDYRPVQDLREVNKRVEDIHPTVPNPYNLLSGLPPSHQWYTVLDLKDAFFCLRLHPTSQPLFAFEWRDPEMGISGQLTWTRLPQGFKNSPTLFNEALHRDLADFRIQHPDLILLQYVDDLLLAATSELDCQQGTRALLQTLGNLGYRASAKKAQICQKQVKYLGYLLKEGQRWLTEARKETVMGQPTPKTPRQLREFLGKAGFCRLFIPGFAEMAAPLYPLTKPGTLFNWGPDQQKAYQEIKQALLTAPALGLPDLTKPFELFVDEKQGYAKGVLTQKLGPWRRPVAYLSKKLDPVAAGWPPCLRMVAAIAVLTKDAGKLTMGQPLVILAPHAVEALVKQPPDRWLSNARMTHYQALLLDTDRVQFGPVVALNPATLLPLPEEGLQHNCLDILAEAHGTRPDLTDQPLPDADHTWYTDGSSLLQEGQRKAGAAVTTETEVIWAKALPAGTSAQRAELIALTQALKMAEGKKLNVYTDSRYAFATAHIHGEIYRRRGWLTSEGKEIKNKDEILALLKALFLPKRLSIIHCPGHQKGHSAEARGNRMADQAARKAAITETPDTSTLLAGKRTADGSEFEKRTADGSEFESPKKKAKVE

SEQ ID NO: 2827 - protein, 2115 aa, synthetic construct
MPAAKRVKLDGGDKKYSIGLDIGTNSVGWAVITDEYKVPSKKFKVLGNTDRHSIKKNLIGALLFDSGETAEATRLKRTARRRYTRRKNRICYLQEIFSNEMAKVDDSFFHRLEESFLVEEDKKHERHPIFGNIVDEVAYHEKYPTIYHLRKKLVDSTDKADLRLIYLALAHMIKFRGHFLIEGDLNPDNSDVDKLFIQLVQTYNQLFEENPINASGVDAKAILSARLSKSRRLENLIAQLPGEKKNGLFGNLIALSLGLTPNFKSNFDLAEDAKLQLSKDTYDDDLDNLLAQIGDQYADLFLAAKNLSDAILLSDILRVNTEITKAPLSASMIKRYDEHHQDLTLLKALVRQQLPEKYKEIFFDQSKNGYAGYIDGGASQEEFYKFIKPILEKMDGTEELLVKLNREDLLRKQRTFDNGSIPHQIHLGELHAILRRQEDFYPFLKDNREKIEKILTFRIPYYVGPLARGNSRFAWMTRKSEETITPWNFEEVVDKGASAQSFIERMTNFDKNLPNEKVLPKHSLLYEYFTVYNELTKVKYVTEGMRKPAFLSGEQKKAIVDLLFKTNRKVTVKQLKEDYFKKIECFDSVEISGVEDRFNASLGTYHDLLKIIKDKDFLDNEENEDILEDIVLTLTLFEDREMIEERLKTYAHLFDDKVMKQLKRRRYTGWGRLSRKLINGIRDKQSGKTILDFLKSDGFANRNFMQLIHDDSLTFKEDIQKAQVSGQGDSLHEHIANLAGSPAIKKGILQTVKVVDELVKVMGRHKPENIVIEMARENQTTQKGQKNSRERMKRIEEGIKELGSQILKEHPVENTQLQNEKLYLYYLQNGRDMYVDQELDINRLSDYDVDHIVPQSFLKDDSIDNKVLTRSDKARGKSDNVPSEEVVKKMKNYWRQLLNAKLITQRKFDNLTKAERGGLSELDKAGFIKRQLVETRQITKHVAQILDSRMNTKYDENDKLIREVKVITLKSKLVSDFRKDFQFYKVREINNYHHAHDAYLNAVVGTALIKKYPKLESEFVYGDYKVYDVRKMIAKSEQEIGKATAKYFFYSNIMNFFKTEITLANGEIRKRPLIETNGETGEIVWDKGRDFATVRKVLSMPQVNIVKKTEVQTGGFSKESILPKRNSDKLIARKKDWDPKKYGGFDSPTVAYSVLVVAKVEKGKSKKLKSVKELLGITIMERSSFEKNPIDFLEAKGYKEVKKDLIIKLPKYSLFELENGRKRMLASAGELQKGNELALPSKYVNFLYLASHYEKLKGSPEDNEQKQLFVEQHKHYLDEIIEQISEFSKRVILADANLDKVLSAYNKHRDKPIREQAENIIHLFTLTNLGAPAAFKYFDTTIDRKRYTSTKEVLDATLIHQSITGLYETRIDLSQLGGDGGGGGGSGGGGSGGGGSGGGGSGGGGSGGGGSGGTLNIEDEHRLHETSKEPDVSLGSTWLSDFPQAWAETGGMGLAVRQAPLIIPLKATSTPVSIKQYPMSQEARLGIKPHIQRLLDQGILVPCQSPWNTPLLPVKKPGTNDYRPVQDLREVNKRVEDIHPTVPNPYNLLSGLPPSHQWYTVLDLKDAFFCLRLHPTSQPLFAFEWRDPEMGISGQLTWTRLPQGFKNSPTLFNEALHRDLADFRIQHPDLILLQYVDDLLLAATSELDCQQGTRALLQTLGNLGYRASAKKAQICQKQVKYLGYLLKEGQRWLTEARKETVMGQPTPKTPRQLREFLGKAGFCRLFIPGFAEMAAPLYPLTKPGTLFNWGPDQQKAYQEIKQALLTAPALGLPDLTKPFELFVDEKQGYAKGVLTQKLGPWRRPVAYLSKKLDPVAAGWPPCLRMVAAIAVLTKDAGKLTMGQPLVILAPHAVEALVKQPPDRWLSNARMTHYQALLLDTDRVQFGPVVALNPATLLPLPEEGLQHNCLDILAEAHGTRPDLTDQPLPDADHTWYTDGSSLLQEGQRKAGAAVTTETEVIWAKALPAGTSAQRAELIALTQALKMAEGKKLNVYTDSRYAFATAHIHGEIYRRRGWLTSEGKEIKNKDEILALLKALFLPKRLSIIHCPGHQKGHSAEARGNRMADQAARKAAITETPDTSTLLAGKRTADGSEFEKRTADGSEFESPKKKAKVE

SEQ ID NO: 2828 - protein, 2093 aa, synthetic construct
MPAAKRVKLDGGDKKYSIGLDIGTNSVGWAVITDEYKVPSKKFKVLGNTDRHSIKKNLIGALLFDSGETAEATRLKRTARRRYTRRKNRICYLQEIFSNEMAKVDDSFFHRLEESFLVEEDKKHERHPIFGNIVDEVAYHEKYPTIYHLRKKLVDSTDKADLRLIYLALAHMIKFRGHFLIEGDLNPDNSDVDKLFIQLVQTYNQLFEENPINASGVDAKAILSARLSKSRRLENLIAQLPGEKKNGLFGNLIALSLGLTPNFKSNFDLAEDAKLQLSKDTYDDDLDNLLAQIGDQYADLFLAAKNLSDAILLSDILRVNTEITKAPLSASMIKRYDEHHQDLTLLKALVRQQLPEKYKEIFFDQSKNGYAGYIDGGASQEEFYKFIKPILEKMDGTEELLVKLNREDLLRKQRTFDNGSIPHQIHLGELHAILRRQEDFYPFLKDNREKIEKILTFRIPYYVGPLARGNSRFAWMTRKSEETITPWNFEEVVDKGASAQSFIERMTNFDKNLPNEKVLPKHSLLYEYFTVYNELTKVKYVTEGMRKPAFLSGEQKKAIVDLLFKTNRKVTVKQLKEDYFKKIECFDSVEISGVEDRFNASLGTYHDLLKIIKDKDFLDNEENEDILEDIVLTLTLFEDREMIEERLKTYAHLFDDKVMKQLKRRRYTGWGRLSRKLINGIRDKQSGKTILDFLKSDGFANRNFMQLIHDDSLTFKEDIQKAQVSGQGDSLHEHIANLAGSPAIKKGILQTVKVVDELVKVMGRHKPENIVIEMARENQTTQKGQKNSRERMKRIEEGIKELGSQILKEHPVENTQLQNEKLYLYYLQNGRDMYVDQELDINRLSDYDVDHIVPQSFLKDDSIDNKVLTRSDKARGKSDNVPSEEVVKKMKNYWRQLLNAKLITQRKFDNLTKAERGGLSELDKAGFIKRQLVETRQITKHVAQILDSRMNTKYDENDKLIREVKVITLKSKLVSDFRKDFQFYKVREINNYHHAHDAYLNAVVGTALIKKYPKLESEFVYGDYKVYDVRKMIAKSEQEIGKATAKYFFYSNIMNFFKTEITLANGEIRKRPLIETNGETGEIVWDKGRDFATVRKVLSMPQVNIVKKTEVQTGGFSKESILPKRNSDKLIARKKDWDPKKYGGFDSPTVAYSVLVVAKVEKGKSKKLKSVKELLGITIMERSSFEKNPIDFLEAKGYKEVKKDLIIKLPKYSLFELENGRKRMLASAGELQKGNELALPSKYVNFLYLASHYEKLKGSPEDNEQKQLFVEQHKHYLDEIIEQISEFSKRVILADANLDKVLSAYNKHRDKPIREQAENIIHLFTLTNLGAPAAFKYFDTTIDRKRYTSTKEVLDATLIHQSITGLYETRIDLSQLGGDGGGSSEAAAKGGTLNIEDEHRLHETSKEPDVSLGSTWLSDFPQAWAETGGMGLAVRQAPLIIPLKATSTPVSIKQYPMSQEARLGIKPHIQRLLDQGILVPCQSPWNTPLLPVKKPGTNDYRPVQDLREVNKRVEDIHPTVPNPYNLLSGLPPSHQWYTVLDLKDAFFCLRLHPTSQPLFAFEWRDPEMGISGQLTWTRLPQGFKNSPTLFNEALHRDLADFRIQHPDLILLQYVDDLLLAATSELDCQQGTRALLQTLGNLGYRASAKKAQICQKQVKYLGYLLKEGQRWLTEARKETVMGQPTPKTPRQLREFLGKAGFCRLFIPGFAEMAAPLYPLTKPGTLFNWGPDQQKAYQEIKQALLTAPALGLPDLTKPFELFVDEKQGYAKGVLTQKLGPWRRPVAYLSKKLDPVAAGWPPCLRMVAAIAVLTKDAGKLTMGQPLVILAPHAVEALVKQPPDRWLSNARMTHYQALLLDTDRVQFGPVVALNPATLLPLPEEGLQHNCLDILAEAHGTRPDLTDQPLPDADHTWYTDGSSLLQEGQRKAGAAVTTETEVIWAKALPAGTSAQRAELIALTQALKMAEGKKLNVYTDSRYAFATAHIHGEIYRRRGWLTSEGKEIKNKDEILALLKALFLPKRLSIIHCPGHQKGHSAEARGNRMADQAARKAAITETPDTSTLLAGKRTADGSEFEKRTADGSEFESPKKKAKVE

SEQ ID NO: 2829 - protein, 2096 aa, synthetic construct
MPAAKRVKLDGGDKKYSIGLDIGTNSVGWAVITDEYKVPSKKFKVLGNTDRHSIKKNLIGALLFDSGETAEATRLKRTARRRYTRRKNRICYLQEIFSNEMAKVDDSFFHRLEESFLVEEDKKHERHPIFGNIVDEVAYHEKYPTIYHLRKKLVDSTDKADLRLIYLALAHMIKFRGHFLIEGDLNPDNSDVDKLFIQLVQTYNQLFEENPINASGVDAKAILSARLSKSRRLENLIAQLPGEKKNGLFGNLIALSLGLTPNFKSNFDLAEDAKLQLSKDTYDDDLDNLLAQIGDQYADLFLAAKNLSDAILLSDILRVNTEITKAPLSASMIKRYDEHHQDLTLLKALVRQQLPEKYKEIFFDQSKNGYAGYIDGGASQEEFYKFIKPILEKMDGTEELLVKLNREDLLRKQRTFDNGSIPHQIHLGELHAILRRQEDFYPFLKDNREKIEKILTFRIPYYVGPLARGNSRFAWMTRKSEETITPWNFEEVVDKGASAQSFIERMTNFDKNLPNEKVLPKHSLLYEYFTVYNELTKVKYVTEGMRKPAFLSGEQKKAIVDLLFKTNRKVTVKQLKEDYFKKIECFDSVEISGVEDRFNASLGTYHDLLKIIKDKDFLDNEENEDILEDIVLTLTLFEDREMIEERLKTYAHLFDDKVMKQLKRRRYTGWGRLSRKLINGIRDKQSGKTILDFLKSDGFANRNFMQLIHDDSLTFKEDIQKAQVSGQGDSLHEHIANLAGSPAIKKGILQTVKVVDELVKVMGRHKPENIVIEMARENQTTQKGQKNSRERMKRIEEGIKELGSQILKEHPVENTQLQNEKLYLYYLQNGRDMYVDQELDINRLSDYDVDHIVPQSFLKDDSIDNKVLTRSDKARGKSDNVPSEEVVKKMKNYWRQLLNAKLITQRKFDNLTKAERGGLSELDKAGFIKRQLVETRQITKHVAQILDSRMNTKYDENDKLIREVKVITLKSKLVSDFRKDFQFYKVREINNYHHAHDAYLNAVVGTALIKKYPKLESEFVYGDYKVYDVRKMIAKSEQEIGKATAKYFFYSNIMNFFKTEITLANGEIRKRPLIETNGETGEIVWDKGRDFATVRKVLSMPQVNIVKKTEVQTGGFSKESILPKRNSDKLIARKKDWDPKKYGGFDSPTVAYSVLVVAKVEKGKSKKLKSVKELLGITIMERSSFEKNPIDFLEAKGYKEVKKDLIIKLPKYSLFELENGRKRMLASAGELQKGNELALPSKYVNFLYLASHYEKLKGSPEDNEQKQLFVEQHKHYLDEIIEQISEFSKRVILADANLDKVLSAYNKHRDKPIREQAENIIHLFTLTNLGAPAAFKYFDTTIDRKRYTSTKEVLDATLIHQSITGLYETRIDLSQLGGDGGPAPEAAAKGGSGGTLNIEDEHRLHETSKEPDVSLGSTWLSDFPQAWAETGGMGLAVRQAPLIIPLKATSTPVSIKQYPMSQEARLGIKPHIQRLLDQGILVPCQSPWNTPLLPVKKPGTNDYRPVQDLREVNKRVEDIHPTVPNPYNLLSGLPPSHQWYTVLDLKDAFFCLRLHPTSQPLFAFEWRDPEMGISGQLTWTRLPQGFKNSPTLFNEALHRDLADFRIQHPDLILLQYVDDLLLAATSELDCQQGTRALLQTLGNLGYRASAKKAQICQKQVKYLGYLLKEGQRWLTEARKETVMGQPTPKTPRQLREFLGKAGFCRLFIPGFAEMAAPLYPLTKPGTLFNWGPDQQKAYQEIKQALLTAPALGLPDLTKPFELFVDEKQGYAKGVLTQKLGPWRRPVAYLSKKLDPVAAGWPPCLRMVAAIAVLTKDAGKLTMGQPLVILAPHAVEALVKQPPDRWLSNARMTHYQALLLDTDRVQFGPVVALNPATLLPLPEEGLQHNCLDILAEAHGTRPDLTDQPLPDADHTWYTDGSSLLQEGQRKAGAAVTTETEVIWAKALPAGTSAQRAELIALTQALKMAEGKKLNVYTDSRYAFATAHIHGEIYRRRGWLTSEGKEIKNKDEILALLKALFLPKRLSIIHCPGHQKGHSAEARGNRMADQAARKAAITETPDTSTLLAGKRTADGSEFEKRTADGSEFESPKKKAKVE

SEQ ID NO: 2830 - protein, 2096 aa, synthetic construct
MPAAKRVKLDGGDKKYSIGLDIGTNSVGWAVITDEYKVPSKKFKVLGNTDRHSIKKNLIGALLFDSGETAEATRLKRTARRRYTRRKNRICYLQEIFSNEMAKVDDSFFHRLEESFLVEEDKKHERHPIFGNIVDEVAYHEKYPTIYHLRKKLVDSTDKADLRLIYLALAHMIKFRGHFLIEGDLNPDNSDVDKLFIQLVQTYNQLFEENPINASGVDAKAILSARLSKSRRLENLIAQLPGEKKNGLFGNLIALSLGLTPNFKSNFDLAEDAKLQLSKDTYDDDLDNLLAQIGDQYADLFLAAKNLSDAILLSDILRVNTEITKAPLSASMIKRYDEHHQDLTLLKALVRQQLPEKYKEIFFDQSKNGYAGYIDGGASQEEFYKFIKPILEKMDGTEELLVKLNREDLLRKQRTFDNGSIPHQIHLGELHAILRRQEDFYPFLKDNREKIEKILTFRIPYYVGPLARGNSRFAWMTRKSEETITPWNFEEVVDKGASAQSFIERMTNFDKNLPNEKVLPKHSLLYEYFTVYNELTKVKYVTEGMRKPAFLSGEQKKAIVDLLFKTNRKVTVKQLKEDYFKKIECFDSVEISGVEDRFNASLGTYHDLLKIIKDKDFLDNEENEDILEDIVLTLTLFEDREMIEERLKTYAHLFDDKVMKQLKRRRYTGWGRLSRKLINGIRDKQSGKTILDFLKSDGFANRNFMQLIHDDSLTFKEDIQKAQVSGQGDSLHEHIANLAGSPAIKKGILQTVKVVDELVKVMGRHKPENIVIEMARENQTTQKGQKNSRERMKRIEEGIKELGSQILKEHPVENTQLQNEKLYLYYLQNGRDMYVDQELDINRLSDYDVDHIVPQSFLKDDSIDNKVLTRSDKARGKSDNVPSEEVVKKMKNYWRQLLNAKLITQRKFDNLTKAERGGLSELDKAGFIKRQLVETRQITKHVAQILDSRMNTKYDENDKLIREVKVITLKSKLVSDFRKDFQFYKVREINNYHHAHDAYLNAVVGTALIKKYPKLESEFVYGDYKVYDVRKMIAKSEQEIGKATAKYFFYSNIMNFFKTEITLANGEIRKRPLIETNGETGEIVWDKGRDFATVRKVLSMPQVNIVKKTEVQTGGFSKESILPKRNSDKLIARKKDWDPKKYGGFDSPTVAYSVLVVAKVEKGKSKKLKSVKELLGITIMERSSFEKNPIDFLEAKGYKEVKKDLIIKLPKYSLFELENGRKRMLASAGELQKGNELALPSKYVNFLYLASHYEKLKGSPEDNEQKQLFVEQHKHYLDEIIEQISEFSKRVILADANLDKVLSAYNKHRDKPIREQAENIIHLFTLTNLGAPAAFKYFDTTIDRKRYTSTKEVLDATLIHQSITGLYETRIDLSQLGGDGGGGGEAAAKPAPGGTLNIEDEHRLHETSKEPDVSLGSTWLSDFPQAWAETGGMGLAVRQAPLIIPLKATSTPVSIKQYPMSQEARLGIKPHIQRLLDQGILVPCQSPWNTPLLPVKKPGTNDYRPVQDLREVNKRVEDIHPTVPNPYNLLSGLPPSHQWYTVLDLKDAFFCLRLHPTSQPLFAFEWRDPEMGISGQLTWTRLPQGFKNSPTLFNEALHRDLADFRIQHPDLILLQYVDDLLLAATSELDCQQGTRALLQTLGNLGYRASAKKAQICQKQVKYLGYLLKEGQRWLTEARKETVMGQPTPKTPRQLREFLGKAGFCRLFIPGFAEMAAPLYPLTKPGTLFNWGPDQQKAYQEIKQALLTAPALGLPDLTKPFELFVDEKQGYAKGVLTQKLGPWRRPVAYLSKKLDPVAAGWPPCLRMVAAIAVLTKDAGKLTMGQPLVILAPHAVEALVKQPPDRWLSNARMTHYQALLLDTDRVQFGPVVALNPATLLPLPEEGLQHNCLDILAEAHGTRPDLTDQPLPDADHTWYTDGSSLLQEGQRKAGAAVTTETEVIWAKALPAGTSAQRAELIALTQALKMAEGKKLNVYTDSRYAFATAHIHGEIYRRRGWLTSEGKEIKNKDEILALLKALFLPKRLSIIHCPGHQKGHSAEARGNRMADQAARKAAITETPDTSTLLAGKRTADGSEFEKRTADGSEFESPKKKAKVE

SEQ ID NO: 2831 - protein, 2096 aa, synthetic construct
MPAAKRVKLDGGDKKYSIGLDIGTNSVGWAVITDEYKVPSKKFKVLGNTDRHSIKKNLIGALLFDSGETAEATRLKRTARRRYTRRKNRICYLQEIFSNEMAKVDDSFFHRLEESFLVEEDKKHERHPIFGNIVDEVAYHEKYPTIYHLRKKLVDSTDKADLRLIYLALAHMIKFRGHFLIEGDLNPDNSDVDKLFIQLVQTYNQLFEENPINASGVDAKAILSARLSKSRRLENLIAQLPGEKKNGLFGNLIALSLGLTPNFKSNFDLAEDAKLQLSKDTYDDDLDNLLAQIGDQYADLFLAAKNLSDAILLSDILRVNTEITKAPLSASMIKRYDEHHQDLTLLKALVRQQLPEKYKEIFFDQSKNGYAGYIDGGASQEEFYKFIKPILEKMDGTEELLVKLNREDLLRKQRTFDNGSIPHQIHLGELHAILRRQEDFYPFLKDNREKIEKILTFRIPYYVGPLARGNSRFAWMTRKSEETITPWNFEEVVDKGASAQSFIERMTNFDKNLPNEKVLPKHSLLYEYFTVYNELTKVKYVTEGMRKPAFLSGEQKKAIVDLLFKTNRKVTVKQLKEDYFKKIECFDSVEISGVEDRFNASLGTYHDLLKIIKDKDFLDNEENEDILEDIVLTLTLFEDREMIEERLKTYAHLFDDKVMKQLKRRRYTGWGRLSRKLINGIRDKQSGKTILDFLKSDGFANRNFMQLIHDDSLTFKEDIQKAQVSGQGDSLHEHIANLAGSPAIKKGILQTVKVVDELVKVMGRHKPENIVIEMARENQTTQKGQKNSRERMKRIEEGIKELGSQILKEHPVENTQLQNEKLYLYYLQNGRDMYVDQELDINRLSDYDVDHIVPQSFLKDDSIDNKVLTRSDKARGKSDNVPSEEVVKKMKNYWRQLLNAKLITQRKFDNLTKAERGGLSELDKAGFIKRQLVETRQITKHVAQILDSRMNTKYDENDKLIREVKVITLKSKLVSDFRKDFQFYKVREINNYHHAHDAYLNAVVGTALIKKYPKLESEFVYGDYKVYDVRKMIAKSEQEIGKATAKYFFYSNIMNFFKTEITLANGEIRKRPLIETNGETGEIVWDKGRDFATVRKVLSMPQVNIVKKTEVQTGGFSKESILPKRNSDKLIARKKDWDPKKYGGFDSPTVAYSVLVVAKVEKGKSKKLKSVKELLGITIMERSSFEKNPIDFLEAKGYKEVKKDLIIKLPKYSLFELENGRKRMLASAGELQKGNELALPSKYVNFLYLASHYEKLKGSPEDNEQKQLFVEQHKHYLDEIIEQISEFSKRVILADANLDKVLSAYNKHRDKPIREQAENIIHLFTLTNLGAPAAFKYFDTTIDRKRYTSTKEVLDATLIHQSITGLYETRIDLSQLGGDGGGGGGSSEAAAKGGTLNIEDEHRLHETSKEPDVSLGSTWLSDFPQAWAETGGMGLAVRQAPLIIPLKATSTPVSIKQYPMSQEARLGIKPHIQRLLDQGILVPCQSPWNTPLLPVKKPGTNDYRPVQDLREVNKRVEDIHPTVPNPYNLLSGLPPSHQWYTVLDLKDAFFCLRLHPTSQPLFAFEWRDPEMGISGQLTWTRLPQGFKNSPTLFNEALHRDLADFRIQHPDLILLQYVDDLLLAATSELDCQQGTRALLQTLGNLGYRASAKKAQICQKQVKYLGYLLKEGQRWLTEARKETVMGQPTPKTPRQLREFLGKAGFCRLFIPGFAEMAAPLYPLTKPGTLFNWGPDQQKAYQEIKQALLTAPALGLPDLTKPFELFVDEKQGYAKGVLTQKLGPWRRPVAYLSKKLDPVAAGWPPCLRMVAAIAVLTKDAGKLTMGQPLVILAPHAVEALVKQPPDRWLSNARMTHYQALLLDTDRVQFGPVVALNPATLLPLPEEGLQHNCLDILAEAHGTRPDLTDQPLPDADHTWYTDGSSLLQEGQRKAGAAVTTETEVIWAKALPAGTSAQRAELIALTQALKMAEGKKLNVYTDSRYAFATAHIHGEIYRRRGWLTSEGKEIKNKDEILALLKALFLPKRLSIIHCPGHQKGHSAEARGNRMADQAARKAAITETPDTSTLLAGKRTADGSEFEKRTADGSEFESPKKKAKVE

SEQ ID NO: 2832 - protein, 2091 aa, synthetic construct
MPAAKRVKLDGGDKKYSIGLDIGTNSVGWAVITDEYKVPSKKFKVLGNTDRHSIKKNLIGALLFDSGETAEATRLKRTARRRYTRRKNRICYLQEIFSNEMAKVDDSFFHRLEESFLVEEDKKHERHPIFGNIVDEVAYHEKYPTIYHLRKKLVDSTDKADLRLIYLALAHMIKFRGHFLIEGDLNPDNSDVDKLFIQLVQTYNQLFEENPINASGVDAKAILSARLSKSRRLENLIAQLPGEKKNGLFGNLIALSLGLTPNFKSNFDLAEDAKLQLSKDTYDDDLDNLLAQIGDQYADLFLAAKNLSDAILLSDILRVNTEITKAPLSASMIKRYDEHHQDLTLLKALVRQQLPEKYKEIFFDQSKNGYAGYIDGGASQEEFYKFIKPILEKMDGTEELLVKLNREDLLRKQRTFDNGSIPHQIHLGELHAILRRQEDFYPFLKDNREKIEKILTFRIPYYVGPLARGNSRFAWMTRKSEETITPWNFEEVVDKGASAQSFIERMTNFDKNLPNEKVLPKHSLLYEYFTVYNELTKVKYVTEGMRKPAFLSGEQKKAIVDLLFKTNRKVTVKQLKEDYFKKIECFDSVEISGVEDRFNASLGTYHDLLKIIKDKDFLDNEENEDILEDIVLTLTLFEDREMIEERLKTYAHLFDDKVMKQLKRRRYTGWGRLSRKLINGIRDKQSGKTILDFLKSDGFANRNFMQLIHDDSLTFKEDIQKAQVSGQGDSLHEHIANLAGSPAIKKGILQTVKVVDELVKVMGRHKPENIVIEMARENQTTQKGQKNSRERMKRIEEGIKELGSQILKEHPVENTQLQNEKLYLYYLQNGRDMYVDQELDINRLSDYDVDHIVPQSFLKDDSIDNKVLTRSDKARGKSDNVPSEEVVKKMKNYWRQLLNAKLITQRKFDNLTKAERGGLSELDKAGFIKRQLVETRQITKHVAQILDSRMNTKYDENDKLIREVKVITLKSKLVSDFRKDFQFYKVREINNYHHAHDAYLNAVVGTALIKKYPKLESEFVYGDYKVYDVRKMIAKSEQEIGKATAKYFFYSNIMNFFKTEITLANGEIRKRPLIETNGETGEIVWDKGRDFATVRKVLSMPQVNIVKKTEVQTGGFSKESILPKRNSDKLIARKKDWDPKKYGGFDSPTVAYSVLVVAKVEKGKSKKLKSVKELLGITIMERSSFEKNPIDFLEAKGYKEVKKDLIIKLPKYSLFELENGRKRMLASAGELQKGNELALPSKYVNFLYLASHYEKLKGSPEDNEQKQLFVEQHKHYLDEIIEQISEFSKRVILADANLDKVLSAYNKHRDKPIREQAENIIHLFTLTNLGAPAAFKYFDTTIDRKRYTSTKEVLDATLIHQSITGLYETRIDLSQLGGDGGGSSGSSGGTLNIEDEHRLHETSKEPDVSLGSTWLSDFPQAWAETGGMGLAVRQAPLIIPLKATSTPVSIKQYPMSQEARLGIKPHIQRLLDQGILVPCQSPWNTPLLPVKKPGTNDYRPVQDLREVNKRVEDIHPTVPNPYNLLSGLPPSHQWYTVLDLKDAFFCLRLHPTSQPLFAFEWRDPEMGISGQLTWTRLPQGFKNSPTLFNEALHRDLADFRIQHPDLILLQYVDDLLLAATSELDCQQGTRALLQTLGNLGYRASAKKAQICQKQVKYLGYLLKEGQRWLTEARKETVMGQPTPKTPRQLREFLGKAGFCRLFIPGFAEMAAPLYPLTKPGTLFNWGPDQQKAYQEIKQALLTAPALGLPDLTKPFELFVDEKQGYAKGVLTQKLGPWRRPVAYLSKKLDPVAAGWPPCLRMVAAIAVLTKDAGKLTMGQPLVILAPHAVEALVKQPPDRWLSNARMTHYQALLLDTDRVQFGPVVALNPATLLPLPEEGLQHNCLDILAEAHGTRPDLTDQPLPDADHTWYTDGSSLLQEGQRKAGAAVTTETEVIWAKALPAGTSAQRAELIALTQALKMAEGKKLNVYTDSRYAFATAHIHGEIYRRRGWLTSEGKEIKNKDEILALLKALFLPKRLSIIHCPGHQKGHSAEARGNRMADQAARKAAITETPDTSTLLAGKRTADGSEFEKRTADGSEFESPKKKAKVE

SEQ ID NO: 2833 - protein, 2094 aa, synthetic construct
MPAAKRVKLDGGDKKYSIGLDIGTNSVGWAVITDEYKVPSKKFKVLGNTDRHSIKKNLIGALLFDSGETAEATRLKRTARRRYTRRKNRICYLQEIFSNEMAKVDDSFFHRLEESFLVEEDKKHERHPIFGNIVDEVAYHEKYPTIYHLRKKLVDSTDKADLRLIYLALAHMIKFRGHFLIEGDLNPDNSDVDKLFIQLVQTYNQLFEENPINASGVDAKAILSARLSKSRRLENLIAQLPGEKKNGLFGNLIALSLGLTPNFKSNFDLAEDAKLQLSKDTYDDDLDNLLAQIGDQYADLFLAAKNLSDAILLSDILRVNTEITKAPLSASMIKRYDEHHQDLTLLKALVRQQLPEKYKEIFFDQSKNGYAGYIDGGASQEEFYKFIKPILEKMDGTEELLVKLNREDLLRKQRTFDNGSIPHQIHLGELHAILRRQEDFYPFLKDNREKIEKILTFRIPYYVGPLARGNSRFAWMTRKSEETITPWNFEEVVDKGASAQSFIERMTNFDKNLPNEKVLPKHSLLYEYFTVYNELTKVKYVTEGMRKPAFLSGEQKKAIVDLLFKTNRKVTVKQLKEDYFKKIECFDSVEISGVEDRFNASLGTYHDLLKIIKDKDFLDNEENEDILEDIVLTLTLFEDREMIEERLKTYAHLFDDKVMKQLKRRRYTGWGRLSRKLINGIRDKQSGKTILDFLKSDGFANRNFMQLIHDDSLTFKEDIQKAQVSGQGDSLHEHIANLAGSPAIKKGILQTVKVVDELVKVMGRHKPENIVIEMARENQTTQKGQKNSRERMKRIEEGIKELGSQILKEHPVENTQLQNEKLYLYYLQNGRDMYVDQELDINRLSDYDVDHIVPQSFLKDDSIDNKVLTRSDKARGKSDNVPSEEVVKKMKNYWRQLLNAKLITQRKFDNLTKAERGGLSELDKAGFIKRQLVETRQITKHVAQILDSRMNTKYDENDKLIREVKVITLKSKLVSDFRKDFQFYKVREINNYHHAHDAYLNAVVGTALIKKYPKLESEFVYGDYKVYDVRKMIAKSEQEIGKATAKYFFYSNIMNFFKTEITLANGEIRKRPLIETNGETGEIVWDKGRDFATVRKVLSMPQVNIVKKTEVQTGGFSKESILPKRNSDKLIARKKDWDPKKYGGFDSPTVAYSVLVVAKVEKGKSKKLKSVKELLGITIMERSSFEKNPIDFLEAKGYKEVKKDLIIKLPKYSLFELENGRKRMLASAGELQKGNELALPSKYVNFLYLASHYEKLKGSPEDNEQKQLFVEQHKHYLDEIIEQISEFSKRVILADANLDKVLSAYNKHRDKPIREQAENIIHLFTLTNLGAPAAFKYFDTTIDRKRYTSTKEVLDATLIHQSITGLYETRIDLSQLGGDGGPAPGGSGGGGGTLNIEDEHRLHETSKEPDVSLGSTWLSDFPQAWAETGGMGLAVRQAPLIIPLKATSTPVSIKQYPMSQEARLGIKPHIQRLLDQGILVPCQSPWNTPLLPVKKPGTNDYRPVQDLREVNKRVEDIHPTVPNPYNLLSGLPPSHQWYTVLDLKDAFFCLRLHPTSQPLFAFEWRDPEMGISGQLTWTRLPQGFKNSPTLFNEALHRDLADFRIQHPDLILLQYVDDLLLAATSELDCQQGTRALLQTLGNLGYRASAKKAQICQKQVKYLGYLLKEGQRWLTEARKETVMGQPTPKTPRQLREFLGKAGFCRLFIPGFAEMAAPLYPLTKPGTLFNWGPDQQKAYQEIKQALLTAPALGLPDLTKPFELFVDEKQGYAKGVLTQKLGPWRRPVAYLSKKLDPVAAGWPPCLRMVAAIAVLTKDAGKLTMGQPLVILAPHAVEALVKQPPDRWLSNARMTHYQALLLDTDRVQFGPVVALNPATLLPLPEEGLQHNCLDILAEAHGTRPDLTDQPLPDADHTWYTDGSSLLQEGQRKAGAAVTTETEVIWAKALPAGTSAQRAELIALTQALKMAEGKKLNVYTDSRYAFATAHIHGEIYRRRGWLTSEGKEIKNKDEILALLKALFLPKRLSIIHCPGHQKGHSAEARGNRMADQAARKAAITETPDTSTLLAGKRTADGSEFEKRTADGSEFESPKKKAKVE

SEQ ID NO: 2834 - protein, 2090 aa, synthetic construct
MPAAKRVKLDGGDKKYSIGLDIGTNSVGWAVITDEYKVPSKKFKVLGNTDRHSIKKNLIGALLFDSGETAEATRLKRTARRRYTRRKNRICYLQEIFSNEMAKVDDSFFHRLEESFLVEEDKKHERHPIFGNIVDEVAYHEKYPTIYHLRKKLVDSTDKADLRLIYLALAHMIKFRGHFLIEGDLNPDNSDVDKLFIQLVQTYNQLFEENPINASGVDAKAILSARLSKSRRLENLIAQLPGEKKNGLFGNLIALSLGLTPNFKSNFDLAEDAKLQLSKDTYDDDLDNLLAQIGDQYADLFLAAKNLSDAILLSDILRVNTEITKAPLSASMIKRYDEHHQDLTLLKALVRQQLPEKYKEIFFDQSKNGYAGYIDGGASQEEFYKFIKPILEKMDGTEELLVKLNREDLLRKQRTFDNGSIPHQIHLGELHAILRRQEDFYPFLKDNREKIEKILTFRIPYYVGPLARGNSRFAWMTRKSEETITPWNFEEVVDKGASAQSFIERMTNFDKNLPNEKVLPKHSLLYEYFTVYNELTKVKYVTEGMRKPAFLSGEQKKAIVDLLFKTNRKVTVKQLKEDYFKKIECFDSVEISGVEDRFNASLGTYHDLLKIIKDKDFLDNEENEDILEDIVLTLTLFEDREMIEERLKTYAHLFDDKVMKQLKRRRYTGWGRLSRKLINGIRDKQSGKTILDFLKSDGFANRNFMQLIHDDSLTFKEDIQKAQVSGQGDSLHEHIANLAGSPAIKKGILQTVKVVDELVKVMGRHKPENIVIEMARENQTTQKGQKNSRERMKRIEEGIKELGSQILKEHPVENTQLQNEKLYLYYLQNGRDMYVDQELDINRLSDYDVDHIVPQSFLKDDSIDNKVLTRSDKARGKSDNVPSEEVVKKMKNYWRQLLNAKLITQRKFDNLTKAERGGLSELDKAGFIKRQLVETRQITKHVAQILDSRMNTKYDENDKLIREVKVITLKSKLVSDFRKDFQFYKVREINNYHHAHDAYLNAVVGTALIKKYPKLESEFVYGDYKVYDVRKMIAKSEQEIGKATAKYFFYSNIMNFFKTEITLANGEIRKRPLIETNGETGEIVWDKGRDFATVRKVLSMPQVNIVKKTEVQTGGFSKESILPKRNSDKLIARKKDWDPKKYGGFDSPTVAYSVLVVAKVEKGKSKKLKSVKELLGITIMERSSFEKNPIDFLEAKGYKEVKKDLIIKLPKYSLFELENGRKRMLASAGELQKGNELALPSKYVNFLYLASHYEKLKGSPEDNEQKQLFVEQHKHYLDEIIEQISEFSKRVILADANLDKVLSAYNKHRDKPIREQAENIIHLFTLTNLGAPAAFKYFDTTIDRKRYTSTKEVLDATLIHQSITGLYETRIDLSQLGGDGGGGGGGGGTLNIEDEHRLHETSKEPDVSLGSTWLSDFPQAWAETGGMGLAVRQAPLIIPLKATSTPVSIKQYPMSQEARLGIKPHIQRLLDQGILVPCQSPWNTPLLPVKKPGTNDYRPVQDLREVNKRVEDIHPTVPNPYNLLSGLPPSHQWYTVLDLKDAFFCLRLHPTSQPLFAFEWRDPEMGISGQLTWTRLPQGFKNSPTLFNEALHRDLADFRIQHPDLILLQYVDDLLLAATSELDCQQGTRALLQTLGNLGYRASAKKAQICQKQVKYLGYLLKEGQRWLTEARKETVMGQPTPKTPRQLREFLGKAGFCRLFIPGFAEMAAPLYPLTKPGTLFNWGPDQQKAYQEIKQALLTAPALGLPDLTKPFELFVDEKQGYAKGVLTQKLGPWRRPVAYLSKKLDPVAAGWPPCLRMVAAIAVLTKDAGKLTMGQPLVILAPHAVEALVKQPPDRWLSNARMTHYQALLLDTDRVQFGPVVALNPATLLPLPEEGLQHNCLDILAEAHGTRPDLTDQPLPDADHTWYTDGSSLLQEGQRKAGAAVTTETEVIWAKALPAGTSAQRAELIALTQALKMAEGKKLNVYTDSRYAFATAHIHGEIYRRRGWLTSEGKEIKNKDEILALLKALFLPKRLSIIHCPGHQKGHSAEARGNRMADQAARKAAITETPDTSTLLAGKRTADGSEFEKRTADGSEFESPKKKAKVE

SEQ ID NO: 2835 - protein, 2094 aa, synthetic construct
MPAAKRVKLDGGDKKYSIGLDIGTNSVGWAVITDEYKVPSKKFKVLGNTDRHSIKKNLIGALLFDSGETAEATRLKRTARRRYTRRKNRICYLQEIFSNEMAKVDDSFFHRLEESFLVEEDKKHERHPIFGNIVDEVAYHEKYPTIYHLRKKLVDSTDKADLRLIYLALAHMIKFRGHFLIEGDLNPDNSDVDKLFIQLVQTYNQLFEENPINASGVDAKAILSARLSKSRRLENLIAQLPGEKKNGLFGNLIALSLGLTPNFKSNFDLAEDAKLQLSKDTYDDDLDNLLAQIGDQYADLFLAAKNLSDAILLSDILRVNTEITKAPLSASMIKRYDEHHQDLTLLKALVRQQLPEKYKEIFFDQSKNGYAGYIDGGASQEEFYKFIKPILEKMDGTEELLVKLNREDLLRKQRTFDNGSIPHQIHLGELHAILRRQEDFYPFLKDNREKIEKILTFRIPYYVGPLARGNSRFAWMTRKSEETITPWNFEEVVDKGASAQSFIERMTNFDKNLPNEKVLPKHSLLYEYFTVYNELTKVKYVTEGMRKPAFLSGEQKKAIVDLLFKTNRKVTVKQLKEDYFKKIECFDSVEISGVEDRFNASLGTYHDLLKIIKDKDFLDNEENEDILEDIVLTLTLFEDREMIEERLKTYAHLFDDKVMKQLKRRRYTGWGRLSRKLINGIRDKQSGKTILDFLKSDGFANRNFMQLIHDDSLTFKEDIQKAQVSGQGDSLHEHIANLAGSPAIKKGILQTVKVVDELVKVMGRHKPENIVIEMARENQTTQKGQKNSRERMKRIEEGIKELGSQILKEHPVENTQLQNEKLYLYYLQNGRDMYVDQELDINRLSDYDVDHIVPQSFLKDDSIDNKVLTRSDKARGKSDNVPSEEVVKKMKNYWRQLLNAKLITQRKFDNLTKAERGGLSELDKAGFIKRQLVETRQITKHVAQILDSRMNTKYDENDKLIREVKVITLKSKLVSDFRKDFQFYKVREINNYHHAHDAYLNAVVGTALIKKYPKLESEFVYGDYKVYDVRKMIAKSEQEIGKATAKYFFYSNIMNFFKTEITLANGEIRKRPLIETNGETGEIVWDKGRDFATVRKVLSMPQVNIVKKTEVQTGGFSKESILPKRNSDKLIARKKDWDPKKYGGFDSPTVAYSVLVVAKVEKGKSKKLKSVKELLGITIMERSSFEKNPIDFLEAKGYKEVKKDLIIKLPKYSLFELENGRKRMLASAGELQKGNELALPSKYVNFLYLASHYEKLKGSPEDNEQKQLFVEQHKHYLDEIIEQISEFSKRVILADANLDKVLSAYNKHRDKPIREQAENIIHLFTLTNLGAPAAFKYFDTTIDRKRYTSTKEVLDATLIHQSITGLYETRIDLSQLGGDGGGSSPAPGGGGGTLNIEDEHRLHETSKEPDVSLGSTWLSDFPQAWAETGGMGLAVRQAPLIIPLKATSTPVSIKQYPMSQEARLGIKPHIQRLLDQGILVPCQSPWNTPLLPVKKPGTNDYRPVQDLREVNKRVEDIHPTVPNPYNLLSGLPPSHQWYTVLDLKDAFFCLRLHPTSQPLFAFEWRDPEMGISGQLTWTRLPQGFKNSPTLFNEALHRDLADFRIQHPDLILLQYVDDLLLAATSELDCQQGTRALLQTLGNLGYRASAKKAQICQKQVKYLGYLLKEGQRWLTEARKETVMGQPTPKTPRQLREFLGKAGFCRLFIPGFAEMAAPLYPLTKPGTLFNWGPDQQKAYQEIKQALLTAPALGLPDLTKPFELFVDEKQGYAKGVLTQKLGPWRRPVAYLSKKLDPVAAGWPPCLRMVAAIAVLTKDAGKLTMGQPLVILAPHAVEALVKQPPDRWLSNARMTHYQALLLDTDRVQFGPVVALNPATLLPLPEEGLQHNCLDILAEAHGTRPDLTDQPLPDADHTWYTDGSSLLQEGQRKAGAAVTTETEVIWAKALPAGTSAQRAELIALTQALKMAEGKKLNVYTDSRYAFATAHIHGEIYRRRGWLTSEGKEIKNKDEILALLKALFLPKRLSIIHCPGHQKGHSAEARGNRMADQAARKAAITETPDTSTLLAGKRTADGSEFEKRTADGSEFESPKKKAKVE

SEQ ID NO: 2836 - protein, 2100 aa, synthetic construct
MPAAKRVKLDGGDKKYSIGLDIGTNSVGWAVITDEYKVPSKKFKVLGNTDRHSIKKNLIGALLFDSGETAEATRLKRTARRRYTRRKNRICYLQEIFSNEMAKVDDSFFHRLEESFLVEEDKKHERHPIFGNIVDEVAYHEKYPTIYHLRKKLVDSTDKADLRLIYLALAHMIKFRGHFLIEGDLNPDNSDVDKLFIQLVQTYNQLFEENPINASGVDAKAILSARLSKSRRLENLIAQLPGEKKNGLFGNLIALSLGLTPNFKSNFDLAEDAKLQLSKDTYDDDLDNLLAQIGDQYADLFLAAKNLSDAILLSDILRVNTEITKAPLSASMIKRYDEHHQDLTLLKALVRQQLPEKYKEIFFDQSKNGYAGYIDGGASQEEFYKFIKPILEKMDGTEELLVKLNREDLLRKQRTFDNGSIPHQIHLGELHAILRRQEDFYPFLKDNREKIEKILTFRIPYYVGPLARGNSRFAWMTRKSEETITPWNFEEVVDKGASAQSFIERMTNFDKNLPNEKVLPKHSLLYEYFTVYNELTKVKYVTEGMRKPAFLSGEQKKAIVDLLFKTNRKVTVKQLKEDYFKKIECFDSVEISGVEDRFNASLGTYHDLLKIIKDKDFLDNEENEDILEDIVLTLTLFEDREMIEERLKTYAHLFDDKVMKQLKRRRYTGWGRLSRKLINGIRDKQSGKTILDFLKSDGFANRNFMQLIHDDSLTFKEDIQKAQVSGQGDSLHEHIANLAGSPAIKKGILQTVKVVDELVKVMGRHKPENIVIEMARENQTTQKGQKNSRERMKRIEEGIKELGSQILKEHPVENTQLQNEKLYLYYLQNGRDMYVDQELDINRLSDYDVDHIVPQSFLKDDSIDNKVLTRSDKARGKSDNVPSEEVVKKMKNYWRQLLNAKLITQRKFDNLTKAERGGLSELDKAGFIKRQLVETRQITKHVAQILDSRMNTKYDENDKLIREVKVITLKSKLVSDFRKDFQFYKVREINNYHHAHDAYLNAVVGTALIKKYPKLESEFVYGDYKVYDVRKMIAKSEQEIGKATAKYFFYSNIMNFFKTEITLANGEIRKRPLIETNGETGEIVWDKGRDFATVRKVLSMPQVNIVKKTEVQTGGFSKESILPKRNSDKLIARKKDWDPKKYGGFDSPTVAYSVLVVAKVEKGKSKKLKSVKELLGITIMERSSFEKNPIDFLEAKGYKEVKKDLIIKLPKYSLFELENGRKRMLASAGELQKGNELALPSKYVNFLYLASHYEKLKGSPEDNEQKQLFVEQHKHYLDEIIEQISEFSKRVILADANLDKVLSAYNKHRDKPIREQAENIIHLFTLTNLGAPAAFKYFDTTIDRKRYTSTKEVLDATLIHQSITGLYETRIDLSQLGGDGGGGGGSEAAAKGGGGSGGTLNIEDEHRLHETSKEPDVSLGSTWLSDFPQAWAETGGMGLAVRQAPLIIPLKATSTPVSIKQYPMSQEARLGIKPHIQRLLDQGILVPCQSPWNTPLLPVKKPGTNDYRPVQDLREVNKRVEDIHPTVPNPYNLLSGLPPSHQWYTVLDLKDAFFCLRLHPTSQPLFAFEWRDPEMGISGQLTWTRLPQGFKNSPTLFNEALHRDLADFRIQHPDLILLQYVDDLLLAATSELDCQQGTRALLQTLGNLGYRASAKKAQICQKQVKYLGYLLKEGQRWLTEARKETVMGQPTPKTPRQLREFLGKAGFCRLFIPGFAEMAAPLYPLTKPGTLFNWGPDQQKAYQEIKQALLTAPALGLPDLTKPFELFVDEKQGYAKGVLTQKLGPWRRPVAYLSKKLDPVAAGWPPCLRMVAAIAVLTKDAGKLTMGQPLVILAPHAVEALVKQPPDRWLSNARMTHYQALLLDTDRVQFGPVVALNPATLLPLPEEGLQHNCLDILAEAHGTRPDLTDQPLPDADHTWYTDGSSLLQEGQRKAGAAVTTETEVIWAKALPAGTSAQRAELIALTQALKMAEGKKLNVYTDSRYAFATAHIHGEIYRRRGWLTSEGKEIKNKDEILALLKALFLPKRLSIIHCPGHQKGHSAEARGNRMADQAARKAAITETPDTSTLLAGKRTADGSEFEKRTADGSEFESPKKKAKVE

SEQ ID NO: 2837 - protein, 2091 aa, synthetic construct
MPAAKRVKLDGGDKKYSIGLDIGTNSVGWAVITDEYKVPSKKFKVLGNTDRHSIKKNLIGALLFDSGETAEATRLKRTARRRYTRRKNRICYLQEIFSNEMAKVDDSFFHRLEESFLVEEDKKHERHPIFGNIVDEVAYHEKYPTIYHLRKKLVDSTDKADLRLIYLALAHMIKFRGHFLIEGDLNPDNSDVDKLFIQLVQTYNQLFEENPINASGVDAKAILSARLSKSRRLENLIAQLPGEKKNGLFGNLIALSLGLTPNFKSNFDLAEDAKLQLSKDTYDDDLDNLLAQIGDQYADLFLAAKNLSDAILLSDILRVNTEITKAPLSASMIKRYDEHHQDLTLLKALVRQQLPEKYKEIFFDQSKNGYAGYIDGGASQEEFYKFIKPILEKMDGTEELLVKLNREDLLRKQRTFDNGSIPHQIHLGELHAILRRQEDFYPFLKDNREKIEKILTFRIPYYVGPLARGNSRFAWMTRKSEETITPWNFEEVVDKGASAQSFIERMTNFDKNLPNEKVLPKHSLLYEYFTVYNELTKVKYVTEGMRKPAFLSGEQKKAIVDLLFKTNRKVTVKQLKEDYFKKIECFDSVEISGVEDRFNASLGTYHDLLKIIKDKDFLDNEENEDILEDIVLTLTLFEDREMIEERLKTYAHLFDDKVMKQLKRRRYTGWGRLSRKLINGIRDKQSGKTILDFLKSDGFANRNFMQLIHDDSLTFKEDIQKAQVSGQGDSLHEHIANLAGSPAIKKGILQTVKVVDELVKVMGRHKPENIVIEMARENQTTQKGQKNSRERMKRIEEGIKELGSQILKEHPVENTQLQNEKLYLYYLQNGRDMYVDQELDINRLSDYDVDHIVPQSFLKDDSIDNKVLTRSDKARGKSDNVPSEEVVKKMKNYWRQLLNAKLITQRKFDNLTKAERGGLSELDKAGFIKRQLVETRQITKHVAQILDSRMNTKYDENDKLIREVKVITLKSKLVSDFRKDFQFYKVREINNYHHAHDAYLNAVVGTALIKKYPKLESEFVYGDYKVYDVRKMIAKSEQEIGKATAKYFFYSNIMNFFKTEITLANGEIRKRPLIETNGETGEIVWDKGRDFATVRKVLSMPQVNIVKKTEVQTGGFSKESILPKRNSDKLIARKKDWDPKKYGGFDSPTVAYSVLVVAKVEKGKSKKLKSVKELLGITIMERSSFEKNPIDFLEAKGYKEVKKDLIIKLPKYSLFELENGRKRMLASAGELQKGNELALPSKYVNFLYLASHYEKLKGSPEDNEQKQLFVEQHKHYLDEIIEQISEFSKRVILADANLDKVLSAYNKHRDKPIREQAENIIHLFTLTNLGAPAAFKYFDTTIDRKRYTSTKEVLDATLIHQSITGLYETRIDLSQLGGDGGPAPGGGGGTLNIEDEHRLHETSKEPDVSLGSTWLSDFPQAWAETGGMGLAVRQAPLIIPLKATSTPVSIKQYPMSQEARLGIKPHIQRLLDQGILVPCQSPWNTPLLPVKKPGTNDYRPVQDLREVNKRVEDIHPTVPNPYNLLSGLPPSHQWYTVLDLKDAFFCLRLHPTSQPLFAFEWRDPEMGISGQLTWTRLPQGFKNSPTLFNEALHRDLADFRIQHPDLILLQYVDDLLLAATSELDCQQGTRALLQTLGNLGYRASAKKAQICQKQVKYLGYLLKEGQRWLTEARKETVMGQPTPKTPRQLREFLGKAGFCRLFIPGFAEMAAPLYPLTKPGTLFNWGPDQQKAYQEIKQALLTAPALGLPDLTKPFELFVDEKQGYAKGVLTQKLGPWRRPVAYLSKKLDPVAAGWPPCLRMVAAIAVLTKDAGKLTMGQPLVILAPHAVEALVKQPPDRWLSNARMTHYQALLLDTDRVQFGPVVALNPATLLPLPEEGLQHNCLDILAEAHGTRPDLTDQPLPDADHTWYTDGSSLLQEGQRKAGAAVTTETEVIWAKALPAGTSAQRAELIALTQALKMAEGKKLNVYTDSRYAFATAHIHGEIYRRRGWLTSEGKEIKNKDEILALLKALFLPKRLSIIHCPGHQKGHSAEARGNRMADQAARKAAITETPDTSTLLAGKRTADGSEFEKRTADGSEFESPKKKAKVE

SEQ ID NO: 2838 - protein, 2096 aa, synthetic construct
MPAAKRVKLDGGDKKYSIGLDIGTNSVGWAVITDEYKVPSKKFKVLGNTDRHSIKKNLIGALLFDSGETAEATRLKRTARRRYTRRKNRICYLQEIFSNEMAKVDDSFFHRLEESFLVEEDKKHERHPIFGNIVDEVAYHEKYPTIYHLRKKLVDSTDKADLRLIYLALAHMIKFRGHFLIEGDLNPDNSDVDKLFIQLVQTYNQLFEENPINASGVDAKAILSARLSKSRRLENLIAQLPGEKKNGLFGNLIALSLGLTPNFKSNFDLAEDAKLQLSKDTYDDDLDNLLAQIGDQYADLFLAAKNLSDAILLSDILRVNTEITKAPLSASMIKRYDEHHQDLTLLKALVRQQLPEKYKEIFFDQSKNGYAGYIDGGASQEEFYKFIKPILEKMDGTEELLVKLNREDLLRKQRTFDNGSIPHQIHLGELHAILRRQEDFYPFLKDNREKIEKILTFRIPYYVGPLARGNSRFAWMTRKSEETITPWNFEEVVDKGASAQSFIERMTNFDKNLPNEKVLPKHSLLYEYFTVYNELTKVKYVTEGMRKPAFLSGEQKKAIVDLLFKTNRKVTVKQLKEDYFKKIECFDSVEISGVEDRFNASLGTYHDLLKIIKDKDFLDNEENEDILEDIVLTLTLFEDREMIEERLKTYAHLFDDKVMKQLKRRRYTGWGRLSRKLINGIRDKQSGKTILDFLKSDGFANRNFMQLIHDDSLTFKEDIQKAQVSGQGDSLHEHIANLAGSPAIKKGILQTVKVVDELVKVMGRHKPENIVIEMARENQTTQKGQKNSRERMKRIEEGIKELGSQILKEHPVENTQLQNEKLYLYYLQNGRDMYVDQELDINRLSDYDVDHIVPQSFLKDDSIDNKVLTRSDKARGKSDNVPSEEVVKKMKNYWRQLLNAKLITQRKFDNLTKAERGGLSELDKAGFIKRQLVETRQITKHVAQILDSRMNTKYDENDKLIREVKVITLKSKLVSDFRKDFQFYKVREINNYHHAHDAYLNAVVGTALIKKYPKLESEFVYGDYKVYDVRKMIAKSEQEIGKATAKYFFYSNIMNFFKTEITLANGEIRKRPLIETNGETGEIVWDKGRDFATVRKVLSMPQVNIVKKTEVQTGGFSKESILPKRNSDKLIARKKDWDPKKYGGFDSPTVAYSVLVVAKVEKGKSKKLKSVKELLGITIMERSSFEKNPIDFLEAKGYKEVKKDLIIKLPKYSLFELENGRKRMLASAGELQKGNELALPSKYVNFLYLASHYEKLKGSPEDNEQKQLFVEQHKHYLDEIIEQISEFSKRVILADANLDKVLSAYNKHRDKPIREQAENIIHLFTLTNLGAPAAFKYFDTTIDRKRYTSTKEVLDATLIHQSITGLYETRIDLSQLGGDGGEAAAKPAPGGGGGTLNIEDEHRLHETSKEPDVSLGSTWLSDFPQAWAETGGMGLAVRQAPLIIPLKATSTPVSIKQYPMSQEARLGIKPHIQRLLDQGILVPCQSPWNTPLLPVKKPGTNDYRPVQDLREVNKRVEDIHPTVPNPYNLLSGLPPSHQWYTVLDLKDAFFCLRLHPTSQPLFAFEWRDPEMGISGQLTWTRLPQGFKNSPTLFNEALHRDLADFRIQHPDLILLQYVDDLLLAATSELDCQQGTRALLQTLGNLGYRASAKKAQICQKQVKYLGYLLKEGQRWLTEARKETVMGQPTPKTPRQLREFLGKAGFCRLFIPGFAEMAAPLYPLTKPGTLFNWGPDQQKAYQEIKQALLTAPALGLPDLTKPFELFVDEKQGYAKGVLTQKLGPWRRPVAYLSKKLDPVAAGWPPCLRMVAAIAVLTKDAGKLTMGQPLVILAPHAVEALVKQPPDRWLSNARMTHYQALLLDTDRVQFGPVVALNPATLLPLPEEGLQHNCLDILAEAHGTRPDLTDQPLPDADHTWYTDGSSLLQEGQRKAGAAVTTETEVIWAKALPAGTSAQRAELIALTQALKMAEGKKLNVYTDSRYAFATAHIHGEIYRRRGWLTSEGKEIKNKDEILALLKALFLPKRLSIIHCPGHQKGHSAEARGNRMADQAARKAAITETPDTSTLLAGKRTADGSEFEKRTADGSEFESPKKKAKVE

SEQ ID NO: 2839 - protein, 2096 aa, synthetic construct
MPAAKRVKLDGGDKKYSIGLDIGTNSVGWAVITDEYKVPSKKFKVLGNTDRHSIKKNLIGALLFDSGETAEATRLKRTARRRYTRRKNRICYLQEIFSNEMAKVDDSFFHRLEESFLVEEDKKHERHPIFGNIVDEVAYHEKYPTIYHLRKKLVDSTDKADLRLIYLALAHMIKFRGHFLIEGDLNPDNSDVDKLFIQLVQTYNQLFEENPINASGVDAKAILSARLSKSRRLENLIAQLPGEKKNGLFGNLIALSLGLTPNFKSNFDLAEDAKLQLSKDTYDDDLDNLLAQIGDQYADLFLAAKNLSDAILLSDILRVNTEITKAPLSASMIKRYDEHHQDLTLLKALVRQQLPEKYKEIFFDQSKNGYAGYIDGGASQEEFYKFIKPILEKMDGTEELLVKLNREDLLRKQRTFDNGSIPHQIHLGELHAILRRQEDFYPFLKDNREKIEKILTFRIPYYVGPLARGNSRFAWMTRKSEETITPWNFEEVVDKGASAQSFIERMTNFDKNLPNEKVLPKHSLLYEYFTVYNELTKVKYVTEGMRKPAFLSGEQKKAIVDLLFKTNRKVTVKQLKEDYFKKIECFDSVEISGVEDRFNASLGTYHDLLKIIKDKDFLDNEENEDILEDIVLTLTLFEDREMIEERLKTYAHLFDDKVMKQLKRRRYTGWGRLSRKLINGIRDKQSGKTILDFLKSDGFANRNFMQLIHDDSLTFKEDIQKAQVSGQGDSLHEHIANLAGSPAIKKGILQTVKVVDELVKVMGRHKPENIVIEMARENQTTQKGQKNSRERMKRIEEGIKELGSQILKEHPVENTQLQNEKLYLYYLQNGRDMYVDQELDINRLSDYDVDHIVPQSFLKDDSIDNKVLTRSDKARGKSDNVPSEEVVKKMKNYWRQLLNAKLITQRKFDNLTKAERGGLSELDKAGFIKRQLVETRQITKHVAQILDSRMNTKYDENDKLIREVKVITLKSKLVSDFRKDFQFYKVREINNYHHAHDAYLNAVVGTALIKKYPKLESEFVYGDYKVYDVRKMIAKSEQEIGKATAKYFFYSNIMNFFKTEITLANGEIRKRPLIETNGETGEIVWDKGRDFATVRKVLSMPQVNIVKKTEVQTGGFSKESILPKRNSDKLIARKKDWDPKKYGGFDSPTVAYSVLVVAKVEKGKSKKLKSVKELLGITIMERSSFEKNPIDFLEAKGYKEVKKDLIIKLPKYSLFELENGRKRMLASAGELQKGNELALPSKYVNFLYLASHYEKLKGSPEDNEQKQLFVEQHKHYLDEIIEQISEFSKRVILADANLDKVLSAYNKHRDKPIREQAENIIHLFTLTNLGAPAAFKYFDTTIDRKRYTSTKEVLDATLIHQSITGLYETRIDLSQLGGDGGGSSPAPEAAAKGGTLNIEDEHRLHETSKEPDVSLGSTWLSDFPQAWAETGGMGLAVRQAPLIIPLKATSTPVSIKQYPMSQEARLGIKPHIQRLLDQGILVPCQSPWNTPLLPVKKPGTNDYRPVQDLREVNKRVEDIHPTVPNPYNLLSGLPPSHQWYTVLDLKDAFFCLRLHPTSQPLFAFEWRDPEMGISGQLTWTRLPQGFKNSPTLFNEALHRDLADFRIQHPDLILLQYVDDLLLAATSELDCQQGTRALLQTLGNLGYRASAKKAQICQKQVKYLGYLLKEGQRWLTEARKETVMGQPTPKTPRQLREFLGKAGFCRLFIPGFAEMAAPLYPLTKPGTLFNWGPDQQKAYQEIKQALLTAPALGLPDLTKPFELFVDEKQGYAKGVLTQKLGPWRRPVAYLSKKLDPVAAGWPPCLRMVAAIAVLTKDAGKLTMGQPLVILAPHAVEALVKQPPDRWLSNARMTHYQALLLDTDRVQFGPVVALNPATLLPLPEEGLQHNCLDILAEAHGTRPDLTDQPLPDADHTWYTDGSSLLQEGQRKAGAAVTTETEVIWAKALPAGTSAQRAELIALTQALKMAEGKKLNVYTDSRYAFATAHIHGEIYRRRGWLTSEGKEIKNKDEILALLKALFLPKRLSIIHCPGHQKGHSAEARGNRMADQAARKAAITETPDTSTLLAGKRTADGSEFEKRTADGSEFESPKKKAKVE

SEQ ID NO: 2840 - protein, 2094 aa, synthetic construct
MPAAKRVKLDGGDKKYSIGLDIGTNSVGWAVITDEYKVPSKKFKVLGNTDRHSIKKNLIGALLFDSGETAEATRLKRTARRRYTRRKNRICYLQEIFSNEMAKVDDSFFHRLEESFLVEEDKKHERHPIFGNIVDEVAYHEKYPTIYHLRKKLVDSTDKADLRLIYLALAHMIKFRGHFLIEGDLNPDNSDVDKLFIQLVQTYNQLFEENPINASGVDAKAILSARLSKSRRLENLIAQLPGEKKNGLFGNLIALSLGLTPNFKSNFDLAEDAKLQLSKDTYDDDLDNLLAQIGDQYADLFLAAKNLSDAILLSDILRVNTEITKAPLSASMIKRYDEHHQDLTLLKALVRQQLPEKYKEIFFDQSKNGYAGYIDGGASQEEFYKFIKPILEKMDGTEELLVKLNREDLLRKQRTFDNGSIPHQIHLGELHAILRRQEDFYPFLKDNREKIEKILTFRIPYYVGPLARGNSRFAWMTRKSEETITPWNFEEVVDKGASAQSFIERMTNFDKNLPNEKVLPKHSLLYEYFTVYNELTKVKYVTEGMRKPAFLSGEQKKAIVDLLFKTNRKVTVKQLKEDYFKKIECFDSVEISGVEDRFNASLGTYHDLLKIIKDKDFLDNEENEDILEDIVLTLTLFEDREMIEERLKTYAHLFDDKVMKQLKRRRYTGWGRLSRKLINGIRDKQSGKTILDFLKSDGFANRNFMQLIHDDSLTFKEDIQKAQVSGQGDSLHEHIANLAGSPAIKKGILQTVKVVDELVKVMGRHKPENIVIEMARENQTTQKGQKNSRERMKRIEEGIKELGSQILKEHPVENTQLQNEKLYLYYLQNGRDMYVDQELDINRLSDYDVDHIVPQSFLKDDSIDNKVLTRSDKARGKSDNVPSEEVVKKMKNYWRQLLNAKLITQRKFDNLTKAERGGLSELDKAGFIKRQLVETRQITKHVAQILDSRMNTKYDENDKLIREVKVITLKSKLVSDFRKDFQFYKVREINNYHHAHDAYLNAVVGTALIKKYPKLESEFVYGDYKVYDVRKMIAKSEQEIGKATAKYFFYSNIMNFFKTEITLANGEIRKRPLIETNGETGEIVWDKGRDFATVRKVLSMPQVNIVKKTEVQTGGFSKESILPKRNSDKLIARKKDWDPKKYGGFDSPTVAYSVLVVAKVEKGKSKKLKSVKELLGITIMERSSFEKNPIDFLEAKGYKEVKKDLIIKLPKYSLFELENGRKRMLASAGELQKGNELALPSKYVNFLYLASHYEKLKGSPEDNEQKQLFVEQHKHYLDEIIEQISEFSKRVILADANLDKVLSAYNKHRDKPIREQAENIIHLFTLTNLGAPAAFKYFDTTIDRKRYTSTKEVLDATLIHQSITGLYETRIDLSQLGGDGGGGGGGSPAPGGTLNIEDEHRLHETSKEPDVSLGSTWLSDFPQAWAETGGMGLAVRQAPLIIPLKATSTPVSIKQYPMSQEARLGIKPHIQRLLDQGILVPCQSPWNTPLLPVKKPGTNDYRPVQDLREVNKRVEDIHPTVPNPYNLLSGLPPSHQWYTVLDLKDAFFCLRLHPTSQPLFAFEWRDPEMGISGQLTWTRLPQGFKNSPTLFNEALHRDLADFRIQHPDLILLQYVDDLLLAATSELDCQQGTRALLQTLGNLGYRASAKKAQICQKQVKYLGYLLKEGQRWLTEARKETVMGQPTPKTPRQLREFLGKAGFCRLFIPGFAEMAAPLYPLTKPGTLFNWGPDQQKAYQEIKQALLTAPALGLPDLTKPFELFVDEKQGYAKGVLTQKLGPWRRPVAYLSKKLDPVAAGWPPCLRMVAAIAVLTKDAGKLTMGQPLVILAPHAVEALVKQPPDRWLSNARMTHYQALLLDTDRVQFGPVVALNPATLLPLPEEGLQHNCLDILAEAHGTRPDLTDQPLPDADHTWYTDGSSLLQEGQRKAGAAVTTETEVIWAKALPAGTSAQRAELIALTQALKMAEGKKLNVYTDSRYAFATAHIHGEIYRRRGWLTSEGKEIKNKDEILALLKALFLPKRLSIIHCPGHQKGHSAEARGNRMADQAARKAAITETPDTSTLLAGKRTADGSEFEKRTADGSEFESPKKKAKVE

SEQ ID NO: 2841 - protein, 2094 aa, synthetic construct
MPAAKRVKLDGGDKKYSIGLDIGTNSVGWAVITDEYKVPSKKFKVLGNTDRHSIKKNLIGALLFDSGETAEATRLKRTARRRYTRRKNRICYLQEIFSNEMAKVDDSFFHRLEESFLVEEDKKHERHPIFGNIVDEVAYHEKYPTIYHLRKKLVDSTDKADLRLIYLALAHMIKFRGHFLIEGDLNPDNSDVDKLFIQLVQTYNQLFEENPINASGVDAKAILSARLSKSRRLENLIAQLPGEKKNGLFGNLIALSLGLTPNFKSNFDLAEDAKLQLSKDTYDDDLDNLLAQIGDQYADLFLAAKNLSDAILLSDILRVNTEITKAPLSASMIKRYDEHHQDLTLLKALVRQQLPEKYKEIFFDQSKNGYAGYIDGGASQEEFYKFIKPILEKMDGTEELLVKLNREDLLRKQRTFDNGSIPHQIHLGELHAILRRQEDFYPFLKDNREKIEKILTFRIPYYVGPLARGNSRFAWMTRKSEETITPWNFEEVVDKGASAQSFIERMTNFDKNLPNEKVLPKHSLLYEYFTVYNELTKVKYVTEGMRKPAFLSGEQKKAIVDLLFKTNRKVTVKQLKEDYFKKIECFDSVEISGVEDRFNASLGTYHDLLKIIKDKDFLDNEENEDILEDIVLTLTLFEDREMIEERLKTYAHLFDDKVMKQLKRRRYTGWGRLSRKLINGIRDKQSGKTILDFLKSDGFANRNFMQLIHDDSLTFKEDIQKAQVSGQGDSLHEHIANLAGSPAIKKGILQTVKVVDELVKVMGRHKPENIVIEMARENQTTQKGQKNSRERMKRIEEGIKELGSQILKEHPVENTQLQNEKLYLYYLQNGRDMYVDQELDINRLSDYDVDHIVPQSFLKDDSIDNKVLTRSDKARGKSDNVPSEEVVKKMKNYWRQLLNAKLITQRKFDNLTKAERGGLSELDKAGFIKRQLVETRQITKHVAQILDSRMNTKYDENDKLIREVKVITLKSKLVSDFRKDFQFYKVREINNYHHAHDAYLNAVVGTALIKKYPKLESEFVYGDYKVYDVRKMIAKSEQEIGKATAKYFFYSNIMNFFKTEITLANGEIRKRPLIETNGETGEIVWDKGRDFATVRKVLSMPQVNIVKKTEVQTGGFSKESILPKRNSDKLIARKKDWDPKKYGGFDSPTVAYSVLVVAKVEKGKSKKLKSVKELLGITIMERSSFEKNPIDFLEAKGYKEVKKDLIIKLPKYSLFELENGRKRMLASAGELQKGNELALPSKYVNFLYLASHYEKLKGSPEDNEQKQLFVEQHKHYLDEIIEQISEFSKRVILADANLDKVLSAYNKHRDKPIREQAENIIHLFTLTNLGAPAAFKYFDTTIDRKRYTSTKEVLDATLIHQSITGLYETRIDLSQLGGDGGGGGPAPGSSGGTLNIEDEHRLHETSKEPDVSLGSTWLSDFPQAWAETGGMGLAVRQAPLIIPLKATSTPVSIKQYPMSQEARLGIKPHIQRLLDQGILVPCQSPWNTPLLPVKKPGTNDYRPVQDLREVNKRVEDIHPTVPNPYNLLSGLPPSHQWYTVLDLKDAFFCLRLHPTSQPLFAFEWRDPEMGISGQLTWTRLPQGFKNSPTLFNEALHRDLADFRIQHPDLILLQYVDDLLLAATSELDCQQGTRALLQTLGNLGYRASAKKAQICQKQVKYLGYLLKEGQRWLTEARKETVMGQPTPKTPRQLREFLGKAGFCRLFIPGFAEMAAPLYPLTKPGTLFNWGPDQQKAYQEIKQALLTAPALGLPDLTKPFELFVDEKQGYAKGVLTQKLGPWRRPVAYLSKKLDPVAAGWPPCLRMVAAIAVLTKDAGKLTMGQPLVILAPHAVEALVKQPPDRWLSNARMTHYQALLLDTDRVQFGPVVALNPATLLPLPEEGLQHNCLDILAEAHGTRPDLTDQPLPDADHTWYTDGSSLLQEGQRKAGAAVTTETEVIWAKALPAGTSAQRAELIALTQALKMAEGKKLNVYTDSRYAFATAHIHGEIYRRRGWLTSEGKEIKNKDEILALLKALFLPKRLSIIHCPGHQKGHSAEARGNRMADQAARKAAITETPDTSTLLAGKRTADGSEFEKRTADGSEFESPKKKAKVE

SEQ ID NO: 2842 - protein, 2096 aa, synthetic construct
MPAAKRVKLDGGDKKYSIGLDIGTNSVGWAVITDEYKVPSKKFKVLGNTDRHSIKKNLIGALLFDSGETAEATRLKRTARRRYTRRKNRICYLQEIFSNEMAKVDDSFFHRLEESFLVEEDKKHERHPIFGNIVDEVAYHEKYPTIYHLRKKLVDSTDKADLRLIYLALAHMIKFRGHFLIEGDLNPDNSDVDKLFIQLVQTYNQLFEENPINASGVDAKAILSARLSKSRRLENLIAQLPGEKKNGLFGNLIALSLGLTPNFKSNFDLAEDAKLQLSKDTYDDDLDNLLAQIGDQYADLFLAAKNLSDAILLSDILRVNTEITKAPLSASMIKRYDEHHQDLTLLKALVRQQLPEKYKEIFFDQSKNGYAGYIDGGASQEEFYKFIKPILEKMDGTEELLVKLNREDLLRKQRTFDNGSIPHQIHLGELHAILRRQEDFYPFLKDNREKIEKILTFRIPYYVGPLARGNSRFAWMTRKSEETITPWNFEEVVDKGASAQSFIERMTNFDKNLPNEKVLPKHSLLYEYFTVYNELTKVKYVTEGMRKPAFLSGEQKKAIVDLLFKTNRKVTVKQLKEDYFKKIECFDSVEISGVEDRFNASLGTYHDLLKIIKDKDFLDNEENEDILEDIVLTLTLFEDREMIEERLKTYAHLFDDKVMKQLKRRRYTGWGRLSRKLINGIRDKQSGKTILDFLKSDGFANRNFMQLIHDDSLTFKEDIQKAQVSGQGDSLHEHIANLAGSPAIKKGILQTVKVVDELVKVMGRHKPENIVIEMARENQTTQKGQKNSRERMKRIEEGIKELGSQILKEHPVENTQLQNEKLYLYYLQNGRDMYVDQELDINRLSDYDVDHIVPQSFLKDDSIDNKVLTRSDKARGKSDNVPSEEVVKKMKNYWRQLLNAKLITQRKFDNLTKAERGGLSELDKAGFIKRQLVETRQITKHVAQILDSRMNTKYDENDKLIREVKVITLKSKLVSDFRKDFQFYKVREINNYHHAHDAYLNAVVGTALIKKYPKLESEFVYGDYKVYDVRKMIAKSEQEIGKATAKYFFYSNIMNFFKTEITLANGEIRKRPLIETNGETGEIVWDKGRDFATVRKVLSMPQVNIVKKTEVQTGGFSKESILPKRNSDKLIARKKDWDPKKYGGFDSPTVAYSVLVVAKVEKGKSKKLKSVKELLGITIMERSSFEKNPIDFLEAKGYKEVKKDLIIKLPKYSLFELENGRKRMLASAGELQKGNELALPSKYVNFLYLASHYEKLKGSPEDNEQKQLFVEQHKHYLDEIIEQISEFSKRVILADANLDKVLSAYNKHRDKPIREQAENIIHLFTLTNLGAPAAFKYFDTTIDRKRYTSTKEVLDATLIHQSITGLYETRIDLSQLGGDGGGGSGSSEAAAKGGTLNIEDEHRLHETSKEPDVSLGSTWLSDFPQAWAETGGMGLAVRQAPLIIPLKATSTPVSIKQYPMSQEARLGIKPHIQRLLDQGILVPCQSPWNTPLLPVKKPGTNDYRPVQDLREVNKRVEDIHPTVPNPYNLLSGLPPSHQWYTVLDLKDAFFCLRLHPTSQPLFAFEWRDPEMGISGQLTWTRLPQGFKNSPTLFNEALHRDLADFRIQHPDLILLQYVDDLLLAATSELDCQQGTRALLQTLGNLGYRASAKKAQICQKQVKYLGYLLKEGQRWLTEARKETVMGQPTPKTPRQLREFLGKAGFCRLFIPGFAEMAAPLYPLTKPGTLFNWGPDQQKAYQEIKQALLTAPALGLPDLTKPFELFVDEKQGYAKGVLTQKLGPWRRPVAYLSKKLDPVAAGWPPCLRMVAAIAVLTKDAGKLTMGQPLVILAPHAVEALVKQPPDRWLSNARMTHYQALLLDTDRVQFGPVVALNPATLLPLPEEGLQHNCLDILAEAHGTRPDLTDQPLPDADHTWYTDGSSLLQEGQRKAGAAVTTETEVIWAKALPAGTSAQRAELIALTQALKMAEGKKLNVYTDSRYAFATAHIHGEIYRRRGWLTSEGKEIKNKDEILALLKALFLPKRLSIIHCPGHQKGHSAEARGNRMADQAARKAAITETPDTSTLLAGKRTADGSEFEKRTADGSEFESPKKKAKVE

SEQ ID NO: 2843 - protein, 2096 aa, synthetic construct
MPAAKRVKLDGGDKKYSIGLDIGTNSVGWAVITDEYKVPSKKFKVLGNTDRHSIKKNLIGALLFDSGETAEATRLKRTARRRYTRRKNRICYLQEIFSNEMAKVDDSFFHRLEESFLVEEDKKHERHPIFGNIVDEVAYHEKYPTIYHLRKKLVDSTDKADLRLIYLALAHMIKFRGHFLIEGDLNPDNSDVDKLFIQLVQTYNQLFEENPINASGVDAKAILSARLSKSRRLENLIAQLPGEKKNGLFGNLIALSLGLTPNFKSNFDLAEDAKLQLSKDTYDDDLDNLLAQIGDQYADLFLAAKNLSDAILLSDILRVNTEITKAPLSASMIKRYDEHHQDLTLLKALVRQQLPEKYKEIFFDQSKNGYAGYIDGGASQEEFYKFIKPILEKMDGTEELLVKLNREDLLRKQRTFDNGSIPHQIHLGELHAILRRQEDFYPFLKDNREKIEKILTFRIPYYVGPLARGNSRFAWMTRKSEETITPWNFEEVVDKGASAQSFIERMTNFDKNLPNEKVLPKHSLLYEYFTVYNELTKVKYVTEGMRKPAFLSGEQKKAIVDLLFKTNRKVTVKQLKEDYFKKIECFDSVEISGVEDRFNASLGTYHDLLKIIKDKDFLDNEENEDILEDIVLTLTLFEDREMIEERLKTYAHLFDDKVMKQLKRRRYTGWGRLSRKLINGIRDKQSGKTILDFLKSDGFANRNFMQLIHDDSLTFKEDIQKAQVSGQGDSLHEHIANLAGSPAIKKGILQTVKVVDELVKVMGRHKPENIVIEMARENQTTQKGQKNSRERMKRIEEGIKELGSQILKEHPVENTQLQNEKLYLYYLQNGRDMYVDQELDINRLSDYDVDHIVPQSFLKDDSIDNKVLTRSDKARGKSDNVPSEEVVKKMKNYWRQLLNAKLITQRKFDNLTKAERGGLSELDKAGFIKRQLVETRQITKHVAQILDSRMNTKYDENDKLIREVKVITLKSKLVSDFRKDFQFYKVREINNYHHAHDAYLNAVVGTALIKKYPKLESEFVYGDYKVYDVRKMIAKSEQEIGKATAKYFFYSNIMNFFKTEITLANGEIRKRPLIETNGETGEIVWDKGRDFATVRKVLSMPQVNIVKKTEVQTGGFSKESILPKRNSDKLIARKKDWDPKKYGGFDSPTVAYSVLVVAKVEKGKSKKLKSVKELLGITIMERSSFEKNPIDFLEAKGYKEVKKDLIIKLPKYSLFELENGRKRMLASAGELQKGNELALPSKYVNFLYLASHYEKLKGSPEDNEQKQLFVEQHKHYLDEIIEQISEFSKRVILADANLDKVLSAYNKHRDKPIREQAENIIHLFTLTNLGAPAAFKYFDTTIDRKRYTSTKEVLDATLIHQSITGLYETRIDLSQLGGDGGEAAAKGGGPAPGGTLNIEDEHRLHETSKEPDVSLGSTWLSDFPQAWAETGGMGLAVRQAPLIIPLKATSTPVSIKQYPMSQEARLGIKPHIQRLLDQGILVPCQSPWNTPLLPVKKPGTNDYRPVQDLREVNKRVEDIHPTVPNPYNLLSGLPPSHQWYTVLDLKDAFFCLRLHPTSQPLFAFEWRDPEMGISGQLTWTRLPQGFKNSPTLFNEALHRDLADFRIQHPDLILLQYVDDLLLAATSELDCQQGTRALLQTLGNLGYRASAKKAQICQKQVKYLGYLLKEGQRWLTEARKETVMGQPTPKTPRQLREFLGKAGFCRLFIPGFAEMAAPLYPLTKPGTLFNWGPDQQKAYQEIKQALLTAPALGLPDLTKPFELFVDEKQGYAKGVLTQKLGPWRRPVAYLSKKLDPVAAGWPPCLRMVAAIAVLTKDAGKLTMGQPLVILAPHAVEALVKQPPDRWLSNARMTHYQALLLDTDRVQFGPVVALNPATLLPLPEEGLQHNCLDILAEAHGTRPDLTDQPLPDADHTWYTDGSSLLQEGQRKAGAAVTTETEVIWAKALPAGTSAQRAELIALTQALKMAEGKKLNVYTDSRYAFATAHIHGEIYRRRGWLTSEGKEIKNKDEILALLKALFLPKRLSIIHCPGHQKGHSAEARGNRMADQAARKAAITETPDTSTLLAGKRTADGSEFEKRTADGSEFESPKKKAKVE

SEQ ID NO: 2844 - protein, 2105 aa, synthetic construct
MPAAKRVKLDGGDKKYSIGLDIGTNSVGWAVITDEYKVPSKKFKVLGNTDRHSIKKNLIGALLFDSGETAEATRLKRTARRRYTRRKNRICYLQEIFSNEMAKVDDSFFHRLEESFLVEEDKKHERHPIFGNIVDEVAYHEKYPTIYHLRKKLVDSTDKADLRLIYLALAHMIKFRGHFLIEGDLNPDNSDVDKLFIQLVQTYNQLFEENPINASGVDAKAILSARLSKSRRLENLIAQLPGEKKNGLFGNLIALSLGLTPNFKSNFDLAEDAKLQLSKDTYDDDLDNLLAQIGDQYADLFLAAKNLSDAILLSDILRVNTEITKAPLSASMIKRYDEHHQDLTLLKALVRQQLPEKYKEIFFDQSKNGYAGYIDGGASQEEFYKFIKPILEKMDGTEELLVKLNREDLLRKQRTFDNGSIPHQIHLGELHAILRRQEDFYPFLKDNREKIEKILTFRIPYYVGPLARGNSRFAWMTRKSEETITPWNFEEVVDKGASAQSFIERMTNFDKNLPNEKVLPKHSLLYEYFTVYNELTKVKYVTEGMRKPAFLSGEQKKAIVDLLFKTNRKVTVKQLKEDYFKKIECFDSVEISGVEDRFNASLGTYHDLLKIIKDKDFLDNEENEDILEDIVLTLTLFEDREMIEERLKTYAHLFDDKVMKQLKRRRYTGWGRLSRKLINGIRDKQSGKTILDFLKSDGFANRNFMQLIHDDSLTFKEDIQKAQVSGQGDSLHEHIANLAGSPAIKKGILQTVKVVDELVKVMGRHKPENIVIEMARENQTTQKGQKNSRERMKRIEEGIKELGSQILKEHPVENTQLQNEKLYLYYLQNGRDMYVDQELDINRLSDYDVDHIVPQSFLKDDSIDNKVLTRSDKARGKSDNVPSEEVVKKMKNYWRQLLNAKLITQRKFDNLTKAERGGLSELDKAGFIKRQLVETRQITKHVAQILDSRMNTKYDENDKLIREVKVITLKSKLVSDFRKDFQFYKVREINNYHHAHDAYLNAVVGTALIKKYPKLESEFVYGDYKVYDVRKMIAKSEQEIGKATAKYFFYSNIMNFFKTEITLANGEIRKRPLIETNGETGEIVWDKGRDFATVRKVLSMPQVNIVKKTEVQTGGFSKESILPKRNSDKLIARKKDWDPKKYGGFDSPTVAYSVLVVAKVEKGKSKKLKSVKELLGITIMERSSFEKNPIDFLEAKGYKEVKKDLIIKLPKYSLFELENGRKRMLASAGELQKGNELALPSKYVNFLYLASHYEKLKGSPEDNEQKQLFVEQHKHYLDEIIEQISEFSKRVILADANLDKVLSAYNKHRDKPIREQAENIIHLFTLTNLGAPAAFKYFDTTIDRKRYTSTKEVLDATLIHQSITGLYETRIDLSQLGGDGGEAAAKEAAAKEAAAKEAAAKGGTLNIEDEHRLHETSKEPDVSLGSTWLSDFPQAWAETGGMGLAVRQAPLIIPLKATSTPVSIKQYPMSQEARLGIKPHIQRLLDQGILVPCQSPWNTPLLPVKKPGTNDYRPVQDLREVNKRVEDIHPTVPNPYNLLSGLPPSHQWYTVLDLKDAFFCLRLHPTSQPLFAFEWRDPEMGISGQLTWTRLPQGFKNSPTLFNEALHRDLADFRIQHPDLILLQYVDDLLLAATSELDCQQGTRALLQTLGNLGYRASAKKAQICQKQVKYLGYLLKEGQRWLTEARKETVMGQPTPKTPRQLREFLGKAGFCRLFIPGFAEMAAPLYPLTKPGTLFNWGPDQQKAYQEIKQALLTAPALGLPDLTKPFELFVDEKQGYAKGVLTQKLGPWRRPVAYLSKKLDPVAAGWPPCLRMVAAIAVLTKDAGKLTMGQPLVILAPHAVEALVKQPPDRWLSNARMTHYQALLLDTDRVQFGPVVALNPATLLPLPEEGLQHNCLDILAEAHGTRPDLTDQPLPDADHTWYTDGSSLLQEGQRKAGAAVTTETEVIWAKALPAGTSAQRAELIALTQALKMAEGKKLNVYTDSRYAFATAHIHGEIYRRRGWLTSEGKEIKNKDEILALLKALFLPKRLSIIHCPGHQKGHSAEARGNRMADQAARKAAITETPDTSTLLAGKRTADGSEFEKRTADGSEFESPKKKAKVE

SEQ ID NO: 2845 - protein, 2095 aa, synthetic construct
MPAAKRVKLDGGDKKYSIGLDIGTNSVGWAVITDEYKVPSKKFKVLGNTDRHSIKKNLIGALLFDSGETAEATRLKRTARRRYTRRKNRICYLQEIFSNEMAKVDDSFFHRLEESFLVEEDKKHERHPIFGNIVDEVAYHEKYPTIYHLRKKLVDSTDKADLRLIYLALAHMIKFRGHFLIEGDLNPDNSDVDKLFIQLVQTYNQLFEENPINASGVDAKAILSARLSKSRRLENLIAQLPGEKKNGLFGNLIALSLGLTPNFKSNFDLAEDAKLQLSKDTYDDDLDNLLAQIGDQYADLFLAAKNLSDAILLSDILRVNTEITKAPLSASMIKRYDEHHQDLTLLKALVRQQLPEKYKEIFFDQSKNGYAGYIDGGASQEEFYKFIKPILEKMDGTEELLVKLNREDLLRKQRTFDNGSIPHQIHLGELHAILRRQEDFYPFLKDNREKIEKILTFRIPYYVGPLARGNSRFAWMTRKSEETITPWNFEEVVDKGASAQSFIERMTNFDKNLPNEKVLPKHSLLYEYFTVYNELTKVKYVTEGMRKPAFLSGEQKKAIVDLLFKTNRKVTVKQLKEDYFKKIECFDSVEISGVEDRFNASLGTYHDLLKIIKDKDFLDNEENEDILEDIVLTLTLFEDREMIEERLKTYAHLFDDKVMKQLKRRRYTGWGRLSRKLINGIRDKQSGKTILDFLKSDGFANRNFMQLIHDDSLTFKEDIQKAQVSGQGDSLHEHIANLAGSPAIKKGILQTVKVVDELVKVMGRHKPENIVIEMARENQTTQKGQKNSRERMKRIEEGIKELGSQILKEHPVENTQLQNEKLYLYYLQNGRDMYVDQELDINRLSDYDVDHIVPQSFLKDDSIDNKVLTRSDKARGKSDNVPSEEVVKKMKNYWRQLLNAKLITQRKFDNLTKAERGGLSELDKAGFIKRQLVETRQITKHVAQILDSRMNTKYDENDKLIREVKVITLKSKLVSDFRKDFQFYKVREINNYHHAHDAYLNAVVGTALIKKYPKLESEFVYGDYKVYDVRKMIAKSEQEIGKATAKYFFYSNIMNFFKTEITLANGEIRKRPLIETNGETGEIVWDKGRDFATVRKVLSMPQVNIVKKTEVQTGGFSKESILPKRNSDKLIARKKDWDPKKYGGFDSPTVAYSVLVVAKVEKGKSKKLKSVKELLGITIMERSSFEKNPIDFLEAKGYKEVKKDLIIKLPKYSLFELENGRKRMLASAGELQKGNELALPSKYVNFLYLASHYEKLKGSPEDNEQKQLFVEQHKHYLDEIIEQISEFSKRVILADANLDKVLSAYNKHRDKPIREQAENIIHLFTLTNLGAPAAFKYFDTTIDRKRYTSTKEVLDATLIHQSITGLYETRIDLSQLGGDGGEAAAKEAAAKGGTLNIEDEHRLHETSKEPDVSLGSTWLSDFPQAWAETGGMGLAVRQAPLIIPLKATSTPVSIKQYPMSQEARLGIKPHIQRLLDQGILVPCQSPWNTPLLPVKKPGTNDYRPVQDLREVNKRVEDIHPTVPNPYNLLSGLPPSHQWYTVLDLKDAFFCLRLHPTSQPLFAFEWRDPEMGISGQLTWTRLPQGFKNSPTLFNEALHRDLADFRIQHPDLILLQYVDDLLLAATSELDCQQGTRALLQTLGNLGYRASAKKAQICQKQVKYLGYLLKEGQRWLTEARKETVMGQPTPKTPRQLREFLGKAGFCRLFIPGFAEMAAPLYPLTKPGTLFNWGPDQQKAYQEIKQALLTAPALGLPDLTKPFELFVDEKQGYAKGVLTQKLGPWRRPVAYLSKKLDPVAAGWPPCLRMVAAIAVLTKDAGKLTMGQPLVILAPHAVEALVKQPPDRWLSNARMTHYQALLLDTDRVQFGPVVALNPATLLPLPEEGLQHNCLDILAEAHGTRPDLTDQPLPDADHTWYTDGSSLLQEGQRKAGAAVTTETEVIWAKALPAGTSAQRAELIALTQALKMAEGKKLNVYTDSRYAFATAHIHGEIYRRRGWLTSEGKEIKNKDEILALLKALFLPKRLSIIHCPGHQKGHSAEARGNRMADQAARKAAITETPDTSTLLAGKRTADGSEFEKRTADGSEFESPKKKAKVE

SEQ ID NO: 2846 - protein, 2094 aa, synthetic construct
MPAAKRVKLDGGDKKYSIGLDIGTNSVGWAVITDEYKVPSKKFKVLGNTDRHSIKKNLIGALLFDSGETAEATRLKRTARRRYTRRKNRICYLQEIFSNEMAKVDDSFFHRLEESFLVEEDKKHERHPIFGNIVDEVAYHEKYPTIYHLRKKLVDSTDKADLRLIYLALAHMIKFRGHFLIEGDLNPDNSDVDKLFIQLVQTYNQLFEENPINASGVDAKAILSARLSKSRRLENLIAQLPGEKKNGLFGNLIALSLGLTPNFKSNFDLAEDAKLQLSKDTYDDDLDNLLAQIGDQYADLFLAAKNLSDAILLSDILRVNTEITKAPLSASMIKRYDEHHQDLTLLKALVRQQLPEKYKEIFFDQSKNGYAGYIDGGASQEEFYKFIKPILEKMDGTEELLVKLNREDLLRKQRTFDNGSIPHQIHLGELHAILRRQEDFYPFLKDNREKIEKILTFRIPYYVGPLARGNSRFAWMTRKSEETITPWNFEEVVDKGASAQSFIERMTNFDKNLPNEKVLPKHSLLYEYFTVYNELTKVKYVTEGMRKPAFLSGEQKKAIVDLLFKTNRKVTVKQLKEDYFKKIECFDSVEISGVEDRFNASLGTYHDLLKIIKDKDFLDNEENEDILEDIVLTLTLFEDREMIEERLKTYAHLFDDKVMKQLKRRRYTGWGRLSRKLINGIRDKQSGKTILDFLKSDGFANRNFMQLIHDDSLTFKEDIQKAQVSGQGDSLHEHIANLAGSPAIKKGILQTVKVVDELVKVMGRHKPENIVIEMARENQTTQKGQKNSRERMKRIEEGIKELGSQILKEHPVENTQLQNEKLYLYYLQNGRDMYVDQELDINRLSDYDVDHIVPQSFLKDDSIDNKVLTRSDKARGKSDNVPSEEVVKKMKNYWRQLLNAKLITQRKFDNLTKAERGGLSELDKAGFIKRQLVETRQITKHVAQILDSRMNTKYDENDKLIREVKVITLKSKLVSDFRKDFQFYKVREINNYHHAHDAYLNAVVGTALIKKYPKLESEFVYGDYKVYDVRKMIAKSEQEIGKATAKYFFYSNIMNFFKTEITLANGEIRKRPLIETNGETGEIVWDKGRDFATVRKVLSMPQVNIVKKTEVQTGGFSKESILPKRNSDKLIARKKDWDPKKYGGFDSPTVAYSVLVVAKVEKGKSKKLKSVKELLGITIMERSSFEKNPIDFLEAKGYKEVKKDLIIKLPKYSLFELENGRKRMLASAGELQKGNELALPSKYVNFLYLASHYEKLKGSPEDNEQKQLFVEQHKHYLDEIIEQISEFSKRVILADANLDKVLSAYNKHRDKPIREQAENIIHLFTLTNLGAPAAFKYFDTTIDRKRYTSTKEVLDATLIHQSITGLYETRIDLSQLGGDGGGGGGGSGSSGGTLNIEDEHRLHETSKEPDVSLGSTWLSDFPQAWAETGGMGLAVRQAPLIIPLKATSTPVSIKQYPMSQEARLGIKPHIQRLLDQGILVPCQSPWNTPLLPVKKPGTNDYRPVQDLREVNKRVEDIHPTVPNPYNLLSGLPPSHQWYTVLDLKDAFFCLRLHPTSQPLFAFEWRDPEMGISGQLTWTRLPQGFKNSPTLFNEALHRDLADFRIQHPDLILLQYVDDLLLAATSELDCQQGTRALLQTLGNLGYRASAKKAQICQKQVKYLGYLLKEGQRWLTEARKETVMGQPTPKTPRQLREFLGKAGFCRLFIPGFAEMAAPLYPLTKPGTLFNWGPDQQKAYQEIKQALLTAPALGLPDLTKPFELFVDEKQGYAKGVLTQKLGPWRRPVAYLSKKLDPVAAGWPPCLRMVAAIAVLTKDAGKLTMGQPLVILAPHAVEALVKQPPDRWLSNARMTHYQALLLDTDRVQFGPVVALNPATLLPLPEEGLQHNCLDILAEAHGTRPDLTDQPLPDADHTWYTDGSSLLQEGQRKAGAAVTTETEVIWAKALPAGTSAQRAELIALTQALKMAEGKKLNVYTDSRYAFATAHIHGEIYRRRGWLTSEGKEIKNKDEILALLKALFLPKRLSIIHCPGHQKGHSAEARGNRMADQAARKAAITETPDTSTLLAGKRTADGSEFEKRTADGSEFESPKKKAKVE

SEQ ID NO: 2847 - protein, 2094 aa, synthetic construct
MPAAKRVKLDGGDKKYSIGLDIGTNSVGWAVITDEYKVPSKKFKVLGNTDRHSIKKNLIGALLFDSGETAEATRLKRTARRRYTRRKNRICYLQEIFSNEMAKVDDSFFHRLEESFLVEEDKKHERHPIFGNIVDEVAYHEKYPTIYHLRKKLVDSTDKADLRLIYLALAHMIKFRGHFLIEGDLNPDNSDVDKLFIQLVQTYNQLFEENPINASGVDAKAILSARLSKSRRLENLIAQLPGEKKNGLFGNLIALSLGLTPNFKSNFDLAEDAKLQLSKDTYDDDLDNLLAQIGDQYADLFLAAKNLSDAILLSDILRVNTEITKAPLSASMIKRYDEHHQDLTLLKALVRQQLPEKYKEIFFDQSKNGYAGYIDGGASQEEFYKFIKPILEKMDGTEELLVKLNREDLLRKQRTFDNGSIPHQIHLGELHAILRRQEDFYPFLKDNREKIEKILTFRIPYYVGPLARGNSRFAWMTRKSEETITPWNFEEVVDKGASAQSFIERMTNFDKNLPNEKVLPKHSLLYEYFTVYNELTKVKYVTEGMRKPAFLSGEQKKAIVDLLFKTNRKVTVKQLKEDYFKKIECFDSVEISGVEDRFNASLGTYHDLLKIIKDKDFLDNEENEDILEDIVLTLTLFEDREMIEERLKTYAHLFDDKVMKQLKRRRYTGWGRLSRKLINGIRDKQSGKTILDFLKSDGFANRNFMQLIHDDSLTFKEDIQKAQVSGQGDSLHEHIANLAGSPAIKKGILQTVKVVDELVKVMGRHKPENIVIEMARENQTTQKGQKNSRERMKRIEEGIKELGSQILKEHPVENTQLQNEKLYLYYLQNGRDMYVDQELDINRLSDYDVDHIVPQSFLKDDSIDNKVLTRSDKARGKSDNVPSEEVVKKMKNYWRQLLNAKLITQRKFDNLTKAERGGLSELDKAGFIKRQLVETRQITKHVAQILDSRMNTKYDENDKLIREVKVITLKSKLVSDFRKDFQFYKVREINNYHHAHDAYLNAVVGTALIKKYPKLESEFVYGDYKVYDVRKMIAKSEQEIGKATAKYFFYSNIMNFFKTEITLANGEIRKRPLIETNGETGEIVWDKGRDFATVRKVLSMPQVNIVKKTEVQTGGFSKESILPKRNSDKLIARKKDWDPKKYGGFDSPTVAYSVLVVAKVEKGKSKKLKSVKELLGITIMERSSFEKNPIDFLEAKGYKEVKKDLIIKLPKYSLFELENGRKRMLASAGELQKGNELALPSKYVNFLYLASHYEKLKGSPEDNEQKQLFVEQHKHYLDEIIEQISEFSKRVILADANLDKVLSAYNKHRDKPIREQAENIIHLFTLTNLGAPAAFKYFDTTIDRKRYTSTKEVLDATLIHQSITGLYETRIDLSQLGGDGGPAPGSSGGGGGTLNIEDEHRLHETSKEPDVSLGSTWLSDFPQAWAETGGMGLAVRQAPLIIPLKATSTPVSIKQYPMSQEARLGIKPHIQRLLDQGILVPCQSPWNTPLLPVKKPGTNDYRPVQDLREVNKRVEDIHPTVPNPYNLLSGLPPSHQWYTVLDLKDAFFCLRLHPTSQPLFAFEWRDPEMGISGQLTWTRLPQGFKNSPTLFNEALHRDLADFRIQHPDLILLQYVDDLLLAATSELDCQQGTRALLQTLGNLGYRASAKKAQICQKQVKYLGYLLKEGQRWLTEARKETVMGQPTPKTPRQLREFLGKAGFCRLFIPGFAEMAAPLYPLTKPGTLFNWGPDQQKAYQEIKQALLTAPALGLPDLTKPFELFVDEKQGYAKGVLTQKLGPWRRPVAYLSKKLDPVAAGWPPCLRMVAAIAVLTKDAGKLTMGQPLVILAPHAVEALVKQPPDRWLSNARMTHYQALLLDTDRVQFGPVVALNPATLLPLPEEGLQHNCLDILAEAHGTRPDLTDQPLPDADHTWYTDGSSLLQEGQRKAGAAVTTETEVIWAKALPAGTSAQRAELIALTQALKMAEGKKLNVYTDSRYAFATAHIHGEIYRRRGWLTSEGKEIKNKDEILALLKALFLPKRLSIIHCPGHQKGHSAEARGNRMADQAARKAAITETPDTSTLLAGKRTADGSEFEKRTADGSEFESPKKKAKVE

SEQ ID NO: 2848 - protein, 2094 aa, synthetic construct
MPAAKRVKLDGGDKKYSIGLDIGTNSVGWAVITDEYKVPSKKFKVLGNTDRHSIKKNLIGALLFDSGETAEATRLKRTARRRYTRRKNRICYLQEIFSNEMAKVDDSFFHRLEESFLVEEDKKHERHPIFGNIVDEVAYHEKYPTIYHLRKKLVDSTDKADLRLIYLALAHMIKFRGHFLIEGDLNPDNSDVDKLFIQLVQTYNQLFEENPINASGVDAKAILSARLSKSRRLENLIAQLPGEKKNGLFGNLIALSLGLTPNFKSNFDLAEDAKLQLSKDTYDDDLDNLLAQIGDQYADLFLAAKNLSDAILLSDILRVNTEITKAPLSASMIKRYDEHHQDLTLLKALVRQQLPEKYKEIFFDQSKNGYAGYIDGGASQEEFYKFIKPILEKMDGTEELLVKLNREDLLRKQRTFDNGSIPHQIHLGELHAILRRQEDFYPFLKDNREKIEKILTFRIPYYVGPLARGNSRFAWMTRKSEETITPWNFEEVVDKGASAQSFIERMTNFDKNLPNEKVLPKHSLLYEYFTVYNELTKVKYVTEGMRKPAFLSGEQKKAIVDLLFKTNRKVTVKQLKEDYFKKIECFDSVEISGVEDRFNASLGTYHDLLKIIKDKDFLDNEENEDILEDIVLTLTLFEDREMIEERLKTYAHLFDDKVMKQLKRRRYTGWGRLSRKLINGIRDKQSGKTILDFLKSDGFANRNFMQLIHDDSLTFKEDIQKAQVSGQGDSLHEHIANLAGSPAIKKGILQTVKVVDELVKVMGRHKPENIVIEMARENQTTQKGQKNSRERMKRIEEGIKELGSQILKEHPVENTQLQNEKLYLYYLQNGRDMYVDQELDINRLSDYDVDHIVPQSFLKDDSIDNKVLTRSDKARGKSDNVPSEEVVKKMKNYWRQLLNAKLITQRKFDNLTKAERGGLSELDKAGFIKRQLVETRQITKHVAQILDSRMNTKYDENDKLIREVKVITLKSKLVSDFRKDFQFYKVREINNYHHAHDAYLNAVVGTALIKKYPKLESEFVYGDYKVYDVRKMIAKSEQEIGKATAKYFFYSNIMNFFKTEITLANGEIRKRPLIETNGETGEIVWDKGRDFATVRKVLSMPQVNIVKKTEVQTGGFSKESILPKRNSDKLIARKKDWDPKKYGGFDSPTVAYSVLVVAKVEKGKSKKLKSVKELLGITIMERSSFEKNPIDFLEAKGYKEVKKDLIIKLPKYSLFELENGRKRMLASAGELQKGNELALPSKYVNFLYLASHYEKLKGSPEDNEQKQLFVEQHKHYLDEIIEQISEFSKRVILADANLDKVLSAYNKHRDKPIREQAENIIHLFTLTNLGAPAAFKYFDTTIDRKRYTSTKEVLDATLIHQSITGLYETRIDLSQLGGDGGGGGGSSPAPGGTLNIEDEHRLHETSKEPDVSLGSTWLSDFPQAWAETGGMGLAVRQAPLIIPLKATSTPVSIKQYPMSQEARLGIKPHIQRLLDQGILVPCQSPWNTPLLPVKKPGTNDYRPVQDLREVNKRVEDIHPTVPNPYNLLSGLPPSHQWYTVLDLKDAFFCLRLHPTSQPLFAFEWRDPEMGISGQLTWTRLPQGFKNSPTLFNEALHRDLADFRIQHPDLILLQYVDDLLLAATSELDCQQGTRALLQTLGNLGYRASAKKAQICQKQVKYLGYLLKEGQRWLTEARKETVMGQPTPKTPRQLREFLGKAGFCRLFIPGFAEMAAPLYPLTKPGTLFNWGPDQQKAYQEIKQALLTAPALGLPDLTKPFELFVDEKQGYAKGVLTQKLGPWRRPVAYLSKKLDPVAAGWPPCLRMVAAIAVLTKDAGKLTMGQPLVILAPHAVEALVKQPPDRWLSNARMTHYQALLLDTDRVQFGPVVALNPATLLPLPEEGLQHNCLDILAEAHGTRPDLTDQPLPDADHTWYTDGSSLLQEGQRKAGAAVTTETEVIWAKALPAGTSAQRAELIALTQALKMAEGKKLNVYTDSRYAFATAHIHGEIYRRRGWLTSEGKEIKNKDEILALLKALFLPKRLSIIHCPGHQKGHSAEARGNRMADQAARKAAITETPDTSTLLAGKRTADGSEFEKRTADGSEFESPKKKAKVE

SEQ ID NO: 2849 - protein, 2093 aa, synthetic construct
MPAAKRVKLDGGDKKYSIGLDIGTNSVGWAVITDEYKVPSKKFKVLGNTDRHSIKKNLIGALLFDSGETAEATRLKRTARRRYTRRKNRICYLQEIFSNEMAKVDDSFFHRLEESFLVEEDKKHERHPIFGNIVDEVAYHEKYPTIYHLRKKLVDSTDKADLRLIYLALAHMIKFRGHFLIEGDLNPDNSDVDKLFIQLVQTYNQLFEENPINASGVDAKAILSARLSKSRRLENLIAQLPGEKKNGLFGNLIALSLGLTPNFKSNFDLAEDAKLQLSKDTYDDDLDNLLAQIGDQYADLFLAAKNLSDAILLSDILRVNTEITKAPLSASMIKRYDEHHQDLTLLKALVRQQLPEKYKEIFFDQSKNGYAGYIDGGASQEEFYKFIKPILEKMDGTEELLVKLNREDLLRKQRTFDNGSIPHQIHLGELHAILRRQEDFYPFLKDNREKIEKILTFRIPYYVGPLARGNSRFAWMTRKSEETITPWNFEEVVDKGASAQSFIERMTNFDKNLPNEKVLPKHSLLYEYFTVYNELTKVKYVTEGMRKPAFLSGEQKKAIVDLLFKTNRKVTVKQLKEDYFKKIECFDSVEISGVEDRFNASLGTYHDLLKIIKDKDFLDNEENEDILEDIVLTLTLFEDREMIEERLKTYAHLFDDKVMKQLKRRRYTGWGRLSRKLINGIRDKQSGKTILDFLKSDGFANRNFMQLIHDDSLTFKEDIQKAQVSGQGDSLHEHIANLAGSPAIKKGILQTVKVVDELVKVMGRHKPENIVIEMARENQTTQKGQKNSRERMKRIEEGIKELGSQILKEHPVENTQLQNEKLYLYYLQNGRDMYVDQELDINRLSDYDVDHIVPQSFLKDDSIDNKVLTRSDKARGKSDNVPSEEVVKKMKNYWRQLLNAKLITQRKFDNLTKAERGGLSELDKAGFIKRQLVETRQITKHVAQILDSRMNTKYDENDKLIREVKVITLKSKLVSDFRKDFQFYKVREINNYHHAHDAYLNAVVGTALIKKYPKLESEFVYGDYKVYDVRKMIAKSEQEIGKATAKYFFYSNIMNFFKTEITLANGEIRKRPLIETNGETGEIVWDKGRDFATVRKVLSMPQVNIVKKTEVQTGGFSKESILPKRNSDKLIARKKDWDPKKYGGFDSPTVAYSVLVVAKVEKGKSKKLKSVKELLGITIMERSSFEKNPIDFLEAKGYKEVKKDLIIKLPKYSLFELENGRKRMLASAGELQKGNELALPSKYVNFLYLASHYEKLKGSPEDNEQKQLFVEQHKHYLDEIIEQISEFSKRVILADANLDKVLSAYNKHRDKPIREQAENIIHLFTLTNLGAPAAFKYFDTTIDRKRYTSTKEVLDATLIHQSITGLYETRIDLSQLGGDGGGGSEAAAKGGTLNIEDEHRLHETSKEPDVSLGSTWLSDFPQAWAETGGMGLAVRQAPLIIPLKATSTPVSIKQYPMSQEARLGIKPHIQRLLDQGILVPCQSPWNTPLLPVKKPGTNDYRPVQDLREVNKRVEDIHPTVPNPYNLLSGLPPSHQWYTVLDLKDAFFCLRLHPTSQPLFAFEWRDPEMGISGQLTWTRLPQGFKNSPTLFNEALHRDLADFRIQHPDLILLQYVDDLLLAATSELDCQQGTRALLQTLGNLGYRASAKKAQICQKQVKYLGYLLKEGQRWLTEARKETVMGQPTPKTPRQLREFLGKAGFCRLFIPGFAEMAAPLYPLTKPGTLFNWGPDQQKAYQEIKQALLTAPALGLPDLTKPFELFVDEKQGYAKGVLTQKLGPWRRPVAYLSKKLDPVAAGWPPCLRMVAAIAVLTKDAGKLTMGQPLVILAPHAVEALVKQPPDRWLSNARMTHYQALLLDTDRVQFGPVVALNPATLLPLPEEGLQHNCLDILAEAHGTRPDLTDQPLPDADHTWYTDGSSLLQEGQRKAGAAVTTETEVIWAKALPAGTSAQRAELIALTQALKMAEGKKLNVYTDSRYAFATAHIHGEIYRRRGWLTSEGKEIKNKDEILALLKALFLPKRLSIIHCPGHQKGHSAEARGNRMADQAARKAAITETPDTSTLLAGKRTADGSEFEKRTADGSEFESPKKKAKVE

SEQ ID NO: 2850 - protein, 2093 aa, synthetic construct
MPAAKRVKLDGGDKKYSIGLDIGTNSVGWAVITDEYKVPSKKFKVLGNTDRHSIKKNLIGALLFDSGETAEATRLKRTARRRYTRRKNRICYLQEIFSNEMAKVDDSFFHRLEESFLVEEDKKHERHPIFGNIVDEVAYHEKYPTIYHLRKKLVDSTDKADLRLIYLALAHMIKFRGHFLIEGDLNPDNSDVDKLFIQLVQTYNQLFEENPINASGVDAKAILSARLSKSRRLENLIAQLPGEKKNGLFGNLIALSLGLTPNFKSNFDLAEDAKLQLSKDTYDDDLDNLLAQIGDQYADLFLAAKNLSDAILLSDILRVNTEITKAPLSASMIKRYDEHHQDLTLLKALVRQQLPEKYKEIFFDQSKNGYAGYIDGGASQEEFYKFIKPILEKMDGTEELLVKLNREDLLRKQRTFDNGSIPHQIHLGELHAILRRQEDFYPFLKDNREKIEKILTFRIPYYVGPLARGNSRFAWMTRKSEETITPWNFEEVVDKGASAQSFIERMTNFDKNLPNEKVLPKHSLLYEYFTVYNELTKVKYVTEGMRKPAFLSGEQKKAIVDLLFKTNRKVTVKQLKEDYFKKIECFDSVEISGVEDRFNASLGTYHDLLKIIKDKDFLDNEENEDILEDIVLTLTLFEDREMIEERLKTYAHLFDDKVMKQLKRRRYTGWGRLSRKLINGIRDKQSGKTILDFLKSDGFANRNFMQLIHDDSLTFKEDIQKAQVSGQGDSLHEHIANLAGSPAIKKGILQTVKVVDELVKVMGRHKPENIVIEMARENQTTQKGQKNSRERMKRIEEGIKELGSQILKEHPVENTQLQNEKLYLYYLQNGRDMYVDQELDINRLSDYDVDHIVPQSFLKDDSIDNKVLTRSDKARGKSDNVPSEEVVKKMKNYWRQLLNAKLITQRKFDNLTKAERGGLSELDKAGFIKRQLVETRQITKHVAQILDSRMNTKYDENDKLIREVKVITLKSKLVSDFRKDFQFYKVREINNYHHAHDAYLNAVVGTALIKKYPKLESEFVYGDYKVYDVRKMIAKSEQEIGKATAKYFFYSNIMNFFKTEITLANGEIRKRPLIETNGETGEIVWDKGRDFATVRKVLSMPQVNIVKKTEVQTGGFSKESILPKRNSDKLIARKKDWDPKKYGGFDSPTVAYSVLVVAKVEKGKSKKLKSVKELLGITIMERSSFEKNPIDFLEAKGYKEVKKDLIIKLPKYSLFELENGRKRMLASAGELQKGNELALPSKYVNFLYLASHYEKLKGSPEDNEQKQLFVEQHKHYLDEIIEQISEFSKRVILADANLDKVLSAYNKHRDKPIREQAENIIHLFTLTNLGAPAAFKYFDTTIDRKRYTSTKEVLDATLIHQSITGLYETRIDLSQLGGDGGEAAAKPAPGGTLNIEDEHRLHETSKEPDVSLGSTWLSDFPQAWAETGGMGLAVRQAPLIIPLKATSTPVSIKQYPMSQEARLGIKPHIQRLLDQGILVPCQSPWNTPLLPVKKPGTNDYRPVQDLREVNKRVEDIHPTVPNPYNLLSGLPPSHQWYTVLDLKDAFFCLRLHPTSQPLFAFEWRDPEMGISGQLTWTRLPQGFKNSPTLFNEALHRDLADFRIQHPDLILLQYVDDLLLAATSELDCQQGTRALLQTLGNLGYRASAKKAQICQKQVKYLGYLLKEGQRWLTEARKETVMGQPTPKTPRQLREFLGKAGFCRLFIPGFAEMAAPLYPLTKPGTLFNWGPDQQKAYQEIKQALLTAPALGLPDLTKPFELFVDEKQGYAKGVLTQKLGPWRRPVAYLSKKLDPVAAGWPPCLRMVAAIAVLTKDAGKLTMGQPLVILAPHAVEALVKQPPDRWLSNARMTHYQALLLDTDRVQFGPVVALNPATLLPLPEEGLQHNCLDILAEAHGTRPDLTDQPLPDADHTWYTDGSSLLQEGQRKAGAAVTTETEVIWAKALPAGTSAQRAELIALTQALKMAEGKKLNVYTDSRYAFATAHIHGEIYRRRGWLTSEGKEIKNKDEILALLKALFLPKRLSIIHCPGHQKGHSAEARGNRMADQAARKAAITETPDTSTLLAGKRTADGSEFEKRTADGSEFESPKKKAKVE

SEQ ID NO: 2851 - protein, 2096 aa, synthetic construct
MPAAKRVKLDGGDKKYSIGLDIGTNSVGWAVITDEYKVPSKKFKVLGNTDRHSIKKNLIGALLFDSGETAEATRLKRTARRRYTRRKNRICYLQEIFSNEMAKVDDSFFHRLEESFLVEEDKKHERHPIFGNIVDEVAYHEKYPTIYHLRKKLVDSTDKADLRLIYLALAHMIKFRGHFLIEGDLNPDNSDVDKLFIQLVQTYNQLFEENPINASGVDAKAILSARLSKSRRLENLIAQLPGEKKNGLFGNLIALSLGLTPNFKSNFDLAEDAKLQLSKDTYDDDLDNLLAQIGDQYADLFLAAKNLSDAILLSDILRVNTEITKAPLSASMIKRYDEHHQDLTLLKALVRQQLPEKYKEIFFDQSKNGYAGYIDGGASQEEFYKFIKPILEKMDGTEELLVKLNREDLLRKQRTFDNGSIPHQIHLGELHAILRRQEDFYPFLKDNREKIEKILTFRIPYYVGPLARGNSRFAWMTRKSEETITPWNFEEVVDKGASAQSFIERMTNFDKNLPNEKVLPKHSLLYEYFTVYNELTKVKYVTEGMRKPAFLSGEQKKAIVDLLFKTNRKVTVKQLKEDYFKKIECFDSVEISGVEDRFNASLGTYHDLLKIIKDKDFLDNEENEDILEDIVLTLTLFEDREMIEERLKTYAHLFDDKVMKQLKRRRYTGWGRLSRKLINGIRDKQSGKTILDFLKSDGFANRNFMQLIHDDSLTFKEDIQKAQVSGQGDSLHEHIANLAGSPAIKKGILQTVKVVDELVKVMGRHKPENIVIEMARENQTTQKGQKNSRERMKRIEEGIKELGSQILKEHPVENTQLQNEKLYLYYLQNGRDMYVDQELDINRLSDYDVDHIVPQSFLKDDSIDNKVLTRSDKARGKSDNVPSEEVVKKMKNYWRQLLNAKLITQRKFDNLTKAERGGLSELDKAGFIKRQLVETRQITKHVAQILDSRMNTKYDENDKLIREVKVITLKSKLVSDFRKDFQFYKVREINNYHHAHDAYLNAVVGTALIKKYPKLESEFVYGDYKVYDVRKMIAKSEQEIGKATAKYFFYSNIMNFFKTEITLANGEIRKRPLIETNGETGEIVWDKGRDFATVRKVLSMPQVNIVKKTEVQTGGFSKESILPKRNSDKLIARKKDWDPKKYGGFDSPTVAYSVLVVAKVEKGKSKKLKSVKELLGITIMERSSFEKNPIDFLEAKGYKEVKKDLIIKLPKYSLFELENGRKRMLASAGELQKGNELALPSKYVNFLYLASHYEKLKGSPEDNEQKQLFVEQHKHYLDEIIEQISEFSKRVILADANLDKVLSAYNKHRDKPIREQAENIIHLFTLTNLGAPAAFKYFDTTIDRKRYTSTKEVLDATLIHQSITGLYETRIDLSQLGGDGGPAPAPAPAPAPGGTLNIEDEHRLHETSKEPDVSLGSTWLSDFPQAWAETGGMGLAVRQAPLIIPLKATSTPVSIKQYPMSQEARLGIKPHIQRLLDQGILVPCQSPWNTPLLPVKKPGTNDYRPVQDLREVNKRVEDIHPTVPNPYNLLSGLPPSHQWYTVLDLKDAFFCLRLHPTSQPLFAFEWRDPEMGISGQLTWTRLPQGFKNSPTLFNEALHRDLADFRIQHPDLILLQYVDDLLLAATSELDCQQGTRALLQTLGNLGYRASAKKAQICQKQVKYLGYLLKEGQRWLTEARKETVMGQPTPKTPRQLREFLGKAGFCRLFIPGFAEMAAPLYPLTKPGTLFNWGPDQQKAYQEIKQALLTAPALGLPDLTKPFELFVDEKQGYAKGVLTQKLGPWRRPVAYLSKKLDPVAAGWPPCLRMVAAIAVLTKDAGKLTMGQPLVILAPHAVEALVKQPPDRWLSNARMTHYQALLLDTDRVQFGPVVALNPATLLPLPEEGLQHNCLDILAEAHGTRPDLTDQPLPDADHTWYTDGSSLLQEGQRKAGAAVTTETEVIWAKALPAGTSAQRAELIALTQALKMAEGKKLNVYTDSRYAFATAHIHGEIYRRRGWLTSEGKEIKNKDEILALLKALFLPKRLSIIHCPGHQKGHSAEARGNRMADQAARKAAITETPDTSTLLAGKRTADGSEFEKRTADGSEFESPKKKAKVE

SEQ ID NO: 2852 - protein, 2094 aa, synthetic construct
MPAAKRVKLDGGDKKYSIGLDIGTNSVGWAVITDEYKVPSKKFKVLGNTDRHSIKKNLIGALLFDSGETAEATRLKRTARRRYTRRKNRICYLQEIFSNEMAKVDDSFFHRLEESFLVEEDKKHERHPIFGNIVDEVAYHEKYPTIYHLRKKLVDSTDKADLRLIYLALAHMIKFRGHFLIEGDLNPDNSDVDKLFIQLVQTYNQLFEENPINASGVDAKAILSARLSKSRRLENLIAQLPGEKKNGLFGNLIALSLGLTPNFKSNFDLAEDAKLQLSKDTYDDDLDNLLAQIGDQYADLFLAAKNLSDAILLSDILRVNTEITKAPLSASMIKRYDEHHQDLTLLKALVRQQLPEKYKEIFFDQSKNGYAGYIDGGASQEEFYKFIKPILEKMDGTEELLVKLNREDLLRKQRTFDNGSIPHQIHLGELHAILRRQEDFYPFLKDNREKIEKILTFRIPYYVGPLARGNSRFAWMTRKSEETITPWNFEEVVDKGASAQSFIERMTNFDKNLPNEKVLPKHSLLYEYFTVYNELTKVKYVTEGMRKPAFLSGEQKKAIVDLLFKTNRKVTVKQLKEDYFKKIECFDSVEISGVEDRFNASLGTYHDLLKIIKDKDFLDNEENEDILEDIVLTLTLFEDREMIEERLKTYAHLFDDKVMKQLKRRRYTGWGRLSRKLINGIRDKQSGKTILDFLKSDGFANRNFMQLIHDDSLTFKEDIQKAQVSGQGDSLHEHIANLAGSPAIKKGILQTVKVVDELVKVMGRHKPENIVIEMARENQTTQKGQKNSRERMKRIEEGIKELGSQILKEHPVENTQLQNEKLYLYYLQNGRDMYVDQELDINRLSDYDVDHIVPQSFLKDDSIDNKVLTRSDKARGKSDNVPSEEVVKKMKNYWRQLLNAKLITQRKFDNLTKAERGGLSELDKAGFIKRQLVETRQITKHVAQILDSRMNTKYDENDKLIREVKVITLKSKLVSDFRKDFQFYKVREINNYHHAHDAYLNAVVGTALIKKYPKLESEFVYGDYKVYDVRKMIAKSEQEIGKATAKYFFYSNIMNFFKTEITLANGEIRKRPLIETNGETGEIVWDKGRDFATVRKVLSMPQVNIVKKTEVQTGGFSKESILPKRNSDKLIARKKDWDPKKYGGFDSPTVAYSVLVVAKVEKGKSKKLKSVKELLGITIMERSSFEKNPIDFLEAKGYKEVKKDLIIKLPKYSLFELENGRKRMLASAGELQKGNELALPSKYVNFLYLASHYEKLKGSPEDNEQKQLFVEQHKHYLDEIIEQISEFSKRVILADANLDKVLSAYNKHRDKPIREQAENIIHLFTLTNLGAPAAFKYFDTTIDRKRYTSTKEVLDATLIHQSITGLYETRIDLSQLGGDGGGGSPAPGSSGGTLNIEDEHRLHETSKEPDVSLGSTWLSDFPQAWAETGGMGLAVRQAPLIIPLKATSTPVSIKQYPMSQEARLGIKPHIQRLLDQGILVPCQSPWNTPLLPVKKPGTNDYRPVQDLREVNKRVEDIHPTVPNPYNLLSGLPPSHQWYTVLDLKDAFFCLRLHPTSQPLFAFEWRDPEMGISGQLTWTRLPQGFKNSPTLFNEALHRDLADFRIQHPDLILLQYVDDLLLAATSELDCQQGTRALLQTLGNLGYRASAKKAQICQKQVKYLGYLLKEGQRWLTEARKETVMGQPTPKTPRQLREFLGKAGFCRLFIPGFAEMAAPLYPLTKPGTLFNWGPDQQKAYQEIKQALLTAPALGLPDLTKPFELFVDEKQGYAKGVLTQKLGPWRRPVAYLSKKLDPVAAGWPPCLRMVAAIAVLTKDAGKLTMGQPLVILAPHAVEALVKQPPDRWLSNARMTHYQALLLDTDRVQFGPVVALNPATLLPLPEEGLQHNCLDILAEAHGTRPDLTDQPLPDADHTWYTDGSSLLQEGQRKAGAAVTTETEVIWAKALPAGTSAQRAELIALTQALKMAEGKKLNVYTDSRYAFATAHIHGEIYRRRGWLTSEGKEIKNKDEILALLKALFLPKRLSIIHCPGHQKGHSAEARGNRMADQAARKAAITETPDTSTLLAGKRTADGSEFEKRTADGSEFESPKKKAKVE

SEQ ID NO: 2853 - protein, 2091 aa, synthetic construct
MPAAKRVKLDGGDKKYSIGLDIGTNSVGWAVITDEYKVPSKKFKVLGNTDRHSIKKNLIGALLFDSGETAEATRLKRTARRRYTRRKNRICYLQEIFSNEMAKVDDSFFHRLEESFLVEEDKKHERHPIFGNIVDEVAYHEKYPTIYHLRKKLVDSTDKADLRLIYLALAHMIKFRGHFLIEGDLNPDNSDVDKLFIQLVQTYNQLFEENPINASGVDAKAILSARLSKSRRLENLIAQLPGEKKNGLFGNLIALSLGLTPNFKSNFDLAEDAKLQLSKDTYDDDLDNLLAQIGDQYADLFLAAKNLSDAILLSDILRVNTEITKAPLSASMIKRYDEHHQDLTLLKALVRQQLPEKYKEIFFDQSKNGYAGYIDGGASQEEFYKFIKPILEKMDGTEELLVKLNREDLLRKQRTFDNGSIPHQIHLGELHAILRRQEDFYPFLKDNREKIEKILTFRIPYYVGPLARGNSRFAWMTRKSEETITPWNFEEVVDKGASAQSFIERMTNFDKNLPNEKVLPKHSLLYEYFTVYNELTKVKYVTEGMRKPAFLSGEQKKAIVDLLFKTNRKVTVKQLKEDYFKKIECFDSVEISGVEDRFNASLGTYHDLLKIIKDKDFLDNEENEDILEDIVLTLTLFEDREMIEERLKTYAHLFDDKVMKQLKRRRYTGWGRLSRKLINGIRDKQSGKTILDFLKSDGFANRNFMQLIHDDSLTFKEDIQKAQVSGQGDSLHEHIANLAGSPAIKKGILQTVKVVDELVKVMGRHKPENIVIEMARENQTTQKGQKNSRERMKRIEEGIKELGSQILKEHPVENTQLQNEKLYLYYLQNGRDMYVDQELDINRLSDYDVDHIVPQSFLKDDSIDNKVLTRSDKARGKSDNVPSEEVVKKMKNYWRQLLNAKLITQRKFDNLTKAERGGLSELDKAGFIKRQLVETRQITKHVAQILDSRMNTKYDENDKLIREVKVITLKSKLVSDFRKDFQFYKVREINNYHHAHDAYLNAVVGTALIKKYPKLESEFVYGDYKVYDVRKMIAKSEQEIGKATAKYFFYSNIMNFFKTEITLANGEIRKRPLIETNGETGEIVWDKGRDFATVRKVLSMPQVNIVKKTEVQTGGFSKESILPKRNSDKLIARKKDWDPKKYGGFDSPTVAYSVLVVAKVEKGKSKKLKSVKELLGITIMERSSFEKNPIDFLEAKGYKEVKKDLIIKLPKYSLFELENGRKRMLASAGELQKGNELALPSKYVNFLYLASHYEKLKGSPEDNEQKQLFVEQHKHYLDEIIEQISEFSKRVILADANLDKVLSAYNKHRDKPIREQAENIIHLFTLTNLGAPAAFKYFDTTIDRKRYTSTKEVLDATLIHQSITGLYETRIDLSQLGGDGGGGSGGSGGTLNIEDEHRLHETSKEPDVSLGSTWLSDFPQAWAETGGMGLAVRQAPLIIPLKATSTPVSIKQYPMSQEARLGIKPHIQRLLDQGILVPCQSPWNTPLLPVKKPGTNDYRPVQDLREVNKRVEDIHPTVPNPYNLLSGLPPSHQWYTVLDLKDAFFCLRLHPTSQPLFAFEWRDPEMGISGQLTWTRLPQGFKNSPTLFNEALHRDLADFRIQHPDLILLQYVDDLLLAATSELDCQQGTRALLQTLGNLGYRASAKKAQICQKQVKYLGYLLKEGQRWLTEARKETVMGQPTPKTPRQLREFLGKAGFCRLFIPGFAEMAAPLYPLTKPGTLFNWGPDQQKAYQEIKQALLTAPALGLPDLTKPFELFVDEKQGYAKGVLTQKLGPWRRPVAYLSKKLDPVAAGWPPCLRMVAAIAVLTKDAGKLTMGQPLVILAPHAVEALVKQPPDRWLSNARMTHYQALLLDTDRVQFGPVVALNPATLLPLPEEGLQHNCLDILAEAHGTRPDLTDQPLPDADHTWYTDGSSLLQEGQRKAGAAVTTETEVIWAKALPAGTSAQRAELIALTQALKMAEGKKLNVYTDSRYAFATAHIHGEIYRRRGWLTSEGKEIKNKDEILALLKALFLPKRLSIIHCPGHQKGHSAEARGNRMADQAARKAAITETPDTSTLLAGKRTADGSEFEKRTADGSEFESPKKKAKVE

SEQ ID NO: 2854 - protein, 2094 aa, synthetic construct
MPAAKRVKLDGGDKKYSIGLDIGTNSVGWAVITDEYKVPSKKFKVLGNTDRHSIKKNLIGALLFDSGETAEATRLKRTARRRYTRRKNRICYLQEIFSNEMAKVDDSFFHRLEESFLVEEDKKHERHPIFGNIVDEVAYHEKYPTIYHLRKKLVDSTDKADLRLIYLALAHMIKFRGHFLIEGDLNPDNSDVDKLFIQLVQTYNQLFEENPINASGVDAKAILSARLSKSRRLENLIAQLPGEKKNGLFGNLIALSLGLTPNFKSNFDLAEDAKLQLSKDTYDDDLDNLLAQIGDQYADLFLAAKNLSDAILLSDILRVNTEITKAPLSASMIKRYDEHHQDLTLLKALVRQQLPEKYKEIFFDQSKNGYAGYIDGGASQEEFYKFIKPILEKMDGTEELLVKLNREDLLRKQRTFDNGSIPHQIHLGELHAILRRQEDFYPFLKDNREKIEKILTFRIPYYVGPLARGNSRFAWMTRKSEETITPWNFEEVVDKGASAQSFIERMTNFDKNLPNEKVLPKHSLLYEYFTVYNELTKVKYVTEGMRKPAFLSGEQKKAIVDLLFKTNRKVTVKQLKEDYFKKIECFDSVEISGVEDRFNASLGTYHDLLKIIKDKDFLDNEENEDILEDIVLTLTLFEDREMIEERLKTYAHLFDDKVMKQLKRRRYTGWGRLSRKLINGIRDKQSGKTILDFLKSDGFANRNFMQLIHDDSLTFKEDIQKAQVSGQGDSLHEHIANLAGSPAIKKGILQTVKVVDELVKVMGRHKPENIVIEMARENQTTQKGQKNSRERMKRIEEGIKELGSQILKEHPVENTQLQNEKLYLYYLQNGRDMYVDQELDINRLSDYDVDHIVPQSFLKDDSIDNKVLTRSDKARGKSDNVPSEEVVKKMKNYWRQLLNAKLITQRKFDNLTKAERGGLSELDKAGFIKRQLVETRQITKHVAQILDSRMNTKYDENDKLIREVKVITLKSKLVSDFRKDFQFYKVREINNYHHAHDAYLNAVVGTALIKKYPKLESEFVYGDYKVYDVRKMIAKSEQEIGKATAKYFFYSNIMNFFKTEITLANGEIRKRPLIETNGETGEIVWDKGRDFATVRKVLSMPQVNIVKKTEVQTGGFSKESILPKRNSDKLIARKKDWDPKKYGGFDSPTVAYSVLVVAKVEKGKSKKLKSVKELLGITIMERSSFEKNPIDFLEAKGYKEVKKDLIIKLPKYSLFELENGRKRMLASAGELQKGNELALPSKYVNFLYLASHYEKLKGSPEDNEQKQLFVEQHKHYLDEIIEQISEFSKRVILADANLDKVLSAYNKHRDKPIREQAENIIHLFTLTNLGAPAAFKYFDTTIDRKRYTSTKEVLDATLIHQSITGLYETRIDLSQLGGDGGGGGGSSGGSGGTLNIEDEHRLHETSKEPDVSLGSTWLSDFPQAWAETGGMGLAVRQAPLIIPLKATSTPVSIKQYPMSQEARLGIKPHIQRLLDQGILVPCQSPWNTPLLPVKKPGTNDYRPVQDLREVNKRVEDIHPTVPNPYNLLSGLPPSHQWYTVLDLKDAFFCLRLHPTSQPLFAFEWRDPEMGISGQLTWTRLPQGFKNSPTLFNEALHRDLADFRIQHPDLILLQYVDDLLLAATSELDCQQGTRALLQTLGNLGYRASAKKAQICQKQVKYLGYLLKEGQRWLTEARKETVMGQPTPKTPRQLREFLGKAGFCRLFIPGFAEMAAPLYPLTKPGTLFNWGPDQQKAYQEIKQALLTAPALGLPDLTKPFELFVDEKQGYAKGVLTQKLGPWRRPVAYLSKKLDPVAAGWPPCLRMVAAIAVLTKDAGKLTMGQPLVILAPHAVEALVKQPPDRWLSNARMTHYQALLLDTDRVQFGPVVALNPATLLPLPEEGLQHNCLDILAEAHGTRPDLTDQPLPDADHTWYTDGSSLLQEGQRKAGAAVTTETEVIWAKALPAGTSAQRAELIALTQALKMAEGKKLNVYTDSRYAFATAHIHGEIYRRRGWLTSEGKEIKNKDEILALLKALFLPKRLSIIHCPGHQKGHSAEARGNRMADQAARKAAITETPDTSTLLAGKRTADGSEFEKRTADGSEFESPKKKAKVE

SEQ ID NO: 2855 - protein, 2091 aa, synthetic construct
MPAAKRVKLDGGDKKYSIGLDIGTNSVGWAVITDEYKVPSKKFKVLGNTDRHSIKKNLIGALLFDSGETAEATRLKRTARRRYTRRKNRICYLQEIFSNEMAKVDDSFFHRLEESFLVEEDKKHERHPIFGNIVDEVAYHEKYPTIYHLRKKLVDSTDKADLRLIYLALAHMIKFRGHFLIEGDLNPDNSDVDKLFIQLVQTYNQLFEENPINASGVDAKAILSARLSKSRRLENLIAQLPGEKKNGLFGNLIALSLGLTPNFKSNFDLAEDAKLQLSKDTYDDDLDNLLAQIGDQYADLFLAAKNLSDAILLSDILRVNTEITKAPLSASMIKRYDEHHQDLTLLKALVRQQLPEKYKEIFFDQSKNGYAGYIDGGASQEEFYKFIKPILEKMDGTEELLVKLNREDLLRKQRTFDNGSIPHQIHLGELHAILRRQEDFYPFLKDNREKIEKILTFRIPYYVGPLARGNSRFAWMTRKSEETITPWNFEEVVDKGASAQSFIERMTNFDKNLPNEKVLPKHSLLYEYFTVYNELTKVKYVTEGMRKPAFLSGEQKKAIVDLLFKTNRKVTVKQLKEDYFKKIECFDSVEISGVEDRFNASLGTYHDLLKIIKDKDFLDNEENEDILEDIVLTLTLFEDREMIEERLKTYAHLFDDKVMKQLKRRRYTGWGRLSRKLINGIRDKQSGKTILDFLKSDGFANRNFMQLIHDDSLTFKEDIQKAQVSGQGDSLHEHIANLAGSPAIKKGILQTVKVVDELVKVMGRHKPENIVIEMARENQTTQKGQKNSRERMKRIEEGIKELGSQILKEHPVENTQLQNEKLYLYYLQNGRDMYVDQELDINRLSDYDVDHIVPQSFLKDDSIDNKVLTRSDKARGKSDNVPSEEVVKKMKNYWRQLLNAKLITQRKFDNLTKAERGGLSELDKAGFIKRQLVETRQITKHVAQILDSRMNTKYDENDKLIREVKVITLKSKLVSDFRKDFQFYKVREINNYHHAHDAYLNAVVGTALIKKYPKLESEFVYGDYKVYDVRKMIAKSEQEIGKATAKYFFYSNIMNFFKTEITLANGEIRKRPLIETNGETGEIVWDKGRDFATVRKVLSMPQVNIVKKTEVQTGGFSKESILPKRNSDKLIARKKDWDPKKYGGFDSPTVAYSVLVVAKVEKGKSKKLKSVKELLGITIMERSSFEKNPIDFLEAKGYKEVKKDLIIKLPKYSLFELENGRKRMLASAGELQKGNELALPSKYVNFLYLASHYEKLKGSPEDNEQKQLFVEQHKHYLDEIIEQISEFSKRVILADANLDKVLSAYNKHRDKPIREQAENIIHLFTLTNLGAPAAFKYFDTTIDRKRYTSTKEVLDATLIHQSITGLYETRIDLSQLGGDGGGSSGGSGGTLNIEDEHRLHETSKEPDVSLGSTWLSDFPQAWAETGGMGLAVRQAPLIIPLKATSTPVSIKQYPMSQEARLGIKPHIQRLLDQGILVPCQSPWNTPLLPVKKPGTNDYRPVQDLREVNKRVEDIHPTVPNPYNLLSGLPPSHQWYTVLDLKDAFFCLRLHPTSQPLFAFEWRDPEMGISGQLTWTRLPQGFKNSPTLFNEALHRDLADFRIQHPDLILLQYVDDLLLAATSELDCQQGTRALLQTLGNLGYRASAKKAQICQKQVKYLGYLLKEGQRWLTEARKETVMGQPTPKTPRQLREFLGKAGFCRLFIPGFAEMAAPLYPLTKPGTLFNWGPDQQKAYQEIKQALLTAPALGLPDLTKPFELFVDEKQGYAKGVLTQKLGPWRRPVAYLSKKLDPVAAGWPPCLRMVAAIAVLTKDAGKLTMGQPLVILAPHAVEALVKQPPDRWLSNARMTHYQALLLDTDRVQFGPVVALNPATLLPLPEEGLQHNCLDILAEAHGTRPDLTDQPLPDADHTWYTDGSSLLQEGQRKAGAAVTTETEVIWAKALPAGTSAQRAELIALTQALKMAEGKKLNVYTDSRYAFATAHIHGEIYRRRGWLTSEGKEIKNKDEILALLKALFLPKRLSIIHCPGHQKGHSAEARGNRMADQAARKAAITETPDTSTLLAGKRTADGSEFEKRTADGSEFESPKKKAKVE

SEQ ID NO: 2856 - protein, 2093 aa, synthetic construct
MPAAKRVKLDGGDKKYSIGLDIGTNSVGWAVITDEYKVPSKKFKVLGNTDRHSIKKNLIGALLFDSGETAEATRLKRTARRRYTRRKNRICYLQEIFSNEMAKVDDSFFHRLEESFLVEEDKKHERHPIFGNIVDEVAYHEKYPTIYHLRKKLVDSTDKADLRLIYLALAHMIKFRGHFLIEGDLNPDNSDVDKLFIQLVQTYNQLFEENPINASGVDAKAILSARLSKSRRLENLIAQLPGEKKNGLFGNLIALSLGLTPNFKSNFDLAEDAKLQLSKDTYDDDLDNLLAQIGDQYADLFLAAKNLSDAILLSDILRVNTEITKAPLSASMIKRYDEHHQDLTLLKALVRQQLPEKYKEIFFDQSKNGYAGYIDGGASQEEFYKFIKPILEKMDGTEELLVKLNREDLLRKQRTFDNGSIPHQIHLGELHAILRRQEDFYPFLKDNREKIEKILTFRIPYYVGPLARGNSRFAWMTRKSEETITPWNFEEVVDKGASAQSFIERMTNFDKNLPNEKVLPKHSLLYEYFTVYNELTKVKYVTEGMRKPAFLSGEQKKAIVDLLFKTNRKVTVKQLKEDYFKKIECFDSVEISGVEDRFNASLGTYHDLLKIIKDKDFLDNEENEDILEDIVLTLTLFEDREMIEERLKTYAHLFDDKVMKQLKRRRYTGWGRLSRKLINGIRDKQSGKTILDFLKSDGFANRNFMQLIHDDSLTFKEDIQKAQVSGQGDSLHEHIANLAGSPAIKKGILQTVKVVDELVKVMGRHKPENIVIEMARENQTTQKGQKNSRERMKRIEEGIKELGSQILKEHPVENTQLQNEKLYLYYLQNGRDMYVDQELDINRLSDYDVDHIVPQSFLKDDSIDNKVLTRSDKARGKSDNVPSEEVVKKMKNYWRQLLNAKLITQRKFDNLTKAERGGLSELDKAGFIKRQLVETRQITKHVAQILDSRMNTKYDENDKLIREVKVITLKSKLVSDFRKDFQFYKVREINNYHHAHDAYLNAVVGTALIKKYPKLESEFVYGDYKVYDVRKMIAKSEQEIGKATAKYFFYSNIMNFFKTEITLANGEIRKRPLIETNGETGEIVWDKGRDFATVRKVLSMPQVNIVKKTEVQTGGFSKESILPKRNSDKLIARKKDWDPKKYGGFDSPTVAYSVLVVAKVEKGKSKKLKSVKELLGITIMERSSFEKNPIDFLEAKGYKEVKKDLIIKLPKYSLFELENGRKRMLASAGELQKGNELALPSKYVNFLYLASHYEKLKGSPEDNEQKQLFVEQHKHYLDEIIEQISEFSKRVILADANLDKVLSAYNKHRDKPIREQAENIIHLFTLTNLGAPAAFKYFDTTIDRKRYTSTKEVLDATLIHQSITGLYETRIDLSQLGGDGGGGGEAAAKGGTLNIEDEHRLHETSKEPDVSLGSTWLSDFPQAWAETGGMGLAVRQAPLIIPLKATSTPVSIKQYPMSQEARLGIKPHIQRLLDQGILVPCQSPWNTPLLPVKKPGTNDYRPVQDLREVNKRVEDIHPTVPNPYNLLSGLPPSHQWYTVLDLKDAFFCLRLHPTSQPLFAFEWRDPEMGISGQLTWTRLPQGFKNSPTLFNEALHRDLADFRIQHPDLILLQYVDDLLLAATSELDCQQGTRALLQTLGNLGYRASAKKAQICQKQVKYLGYLLKEGQRWLTEARKETVMGQPTPKTPRQLREFLGKAGFCRLFIPGFAEMAAPLYPLTKPGTLFNWGPDQQKAYQEIKQALLTAPALGLPDLTKPFELFVDEKQGYAKGVLTQKLGPWRRPVAYLSKKLDPVAAGWPPCLRMVAAIAVLTKDAGKLTMGQPLVILAPHAVEALVKQPPDRWLSNARMTHYQALLLDTDRVQFGPVVALNPATLLPLPEEGLQHNCLDILAEAHGTRPDLTDQPLPDADHTWYTDGSSLLQEGQRKAGAAVTTETEVIWAKALPAGTSAQRAELIALTQALKMAEGKKLNVYTDSRYAFATAHIHGEIYRRRGWLTSEGKEIKNKDEILALLKALFLPKRLSIIHCPGHQKGHSAEARGNRMADQAARKAAITETPDTSTLLAGKRTADGSEFEKRTADGSEFESPKKKAKVE

SEQ ID NO: 2857 - protein, 2096 aa, synthetic construct
MPAAKRVKLDGGDKKYSIGLDIGTNSVGWAVITDEYKVPSKKFKVLGNTDRHSIKKNLIGALLFDSGETAEATRLKRTARRRYTRRKNRICYLQEIFSNEMAKVDDSFFHRLEESFLVEEDKKHERHPIFGNIVDEVAYHEKYPTIYHLRKKLVDSTDKADLRLIYLALAHMIKFRGHFLIEGDLNPDNSDVDKLFIQLVQTYNQLFEENPINASGVDAKAILSARLSKSRRLENLIAQLPGEKKNGLFGNLIALSLGLTPNFKSNFDLAEDAKLQLSKDTYDDDLDNLLAQIGDQYADLFLAAKNLSDAILLSDILRVNTEITKAPLSASMIKRYDEHHQDLTLLKALVRQQLPEKYKEIFFDQSKNGYAGYIDGGASQEEFYKFIKPILEKMDGTEELLVKLNREDLLRKQRTFDNGSIPHQIHLGELHAILRRQEDFYPFLKDNREKIEKILTFRIPYYVGPLARGNSRFAWMTRKSEETITPWNFEEVVDKGASAQSFIERMTNFDKNLPNEKVLPKHSLLYEYFTVYNELTKVKYVTEGMRKPAFLSGEQKKAIVDLLFKTNRKVTVKQLKEDYFKKIECFDSVEISGVEDRFNASLGTYHDLLKIIKDKDFLDNEENEDILEDIVLTLTLFEDREMIEERLKTYAHLFDDKVMKQLKRRRYTGWGRLSRKLINGIRDKQSGKTILDFLKSDGFANRNFMQLIHDDSLTFKEDIQKAQVSGQGDSLHEHIANLAGSPAIKKGILQTVKVVDELVKVMGRHKPENIVIEMARENQTTQKGQKNSRERMKRIEEGIKELGSQILKEHPVENTQLQNEKLYLYYLQNGRDMYVDQELDINRLSDYDVDHIVPQSFLKDDSIDNKVLTRSDKARGKSDNVPSEEVVKKMKNYWRQLLNAKLITQRKFDNLTKAERGGLSELDKAGFIKRQLVETRQITKHVAQILDSRMNTKYDENDKLIREVKVITLKSKLVSDFRKDFQFYKVREINNYHHAHDAYLNAVVGTALIKKYPKLESEFVYGDYKVYDVRKMIAKSEQEIGKATAKYFFYSNIMNFFKTEITLANGEIRKRPLIETNGETGEIVWDKGRDFATVRKVLSMPQVNIVKKTEVQTGGFSKESILPKRNSDKLIARKKDWDPKKYGGFDSPTVAYSVLVVAKVEKGKSKKLKSVKELLGITIMERSSFEKNPIDFLEAKGYKEVKKDLIIKLPKYSLFELENGRKRMLASAGELQKGNELALPSKYVNFLYLASHYEKLKGSPEDNEQKQLFVEQHKHYLDEIIEQISEFSKRVILADANLDKVLSAYNKHRDKPIREQAENIIHLFTLTNLGAPAAFKYFDTTIDRKRYTSTKEVLDATLIHQSITGLYETRIDLSQLGGDGGGGSEAAAKPAPGGTLNIEDEHRLHETSKEPDVSLGSTWLSDFPQAWAETGGMGLAVRQAPLIIPLKATSTPVSIKQYPMSQEARLGIKPHIQRLLDQGILVPCQSPWNTPLLPVKKPGTNDYRPVQDLREVNKRVEDIHPTVPNPYNLLSGLPPSHQWYTVLDLKDAFFCLRLHPTSQPLFAFEWRDPEMGISGQLTWTRLPQGFKNSPTLFNEALHRDLADFRIQHPDLILLQYVDDLLLAATSELDCQQGTRALLQTLGNLGYRASAKKAQICQKQVKYLGYLLKEGQRWLTEARKETVMGQPTPKTPRQLREFLGKAGFCRLFIPGFAEMAAPLYPLTKPGTLFNWGPDQQKAYQEIKQALLTAPALGLPDLTKPFELFVDEKQGYAKGVLTQKLGPWRRPVAYLSKKLDPVAAGWPPCLRMVAAIAVLTKDAGKLTMGQPLVILAPHAVEALVKQPPDRWLSNARMTHYQALLLDTDRVQFGPVVALNPATLLPLPEEGLQHNCLDILAEAHGTRPDLTDQPLPDADHTWYTDGSSLLQEGQRKAGAAVTTETEVIWAKALPAGTSAQRAELIALTQALKMAEGKKLNVYTDSRYAFATAHIHGEIYRRRGWLTSEGKEIKNKDEILALLKALFLPKRLSIIHCPGHQKGHSAEARGNRMADQAARKAAITETPDTSTLLAGKRTADGSEFEKRTADGSEFESPKKKAKVE

SEQ ID NO: 2858 - protein, 2101 aa, synthetic construct
MPAAKRVKLDGGDKKYSIGLDIGTNSVGWAVITDEYKVPSKKFKVLGNTDRHSIKKNLIGALLFDSGETAEATRLKRTARRRYTRRKNRICYLQEIFSNEMAKVDDSFFHRLEESFLVEEDKKHERHPIFGNIVDEVAYHEKYPTIYHLRKKLVDSTDKADLRLIYLALAHMIKFRGHFLIEGDLNPDNSDVDKLFIQLVQTYNQLFEENPINASGVDAKAILSARLSKSRRLENLIAQLPGEKKNGLFGNLIALSLGLTPNFKSNFDLAEDAKLQLSKDTYDDDLDNLLAQIGDQYADLFLAAKNLSDAILLSDILRVNTEITKAPLSASMIKRYDEHHQDLTLLKALVRQQLPEKYKEIFFDQSKNGYAGYIDGGASQEEFYKFIKPILEKMDGTEELLVKLNREDLLRKQRTFDNGSIPHQIHLGELHAILRRQEDFYPFLKDNREKIEKILTFRIPYYVGPLARGNSRFAWMTRKSEETITPWNFEEVVDKGASAQSFIERMTNFDKNLPNEKVLPKHSLLYEYFTVYNELTKVKYVTEGMRKPAFLSGEQKKAIVDLLFKTNRKVTVKQLKEDYFKKIECFDSVEISGVEDRFNASLGTYHDLLKIIKDKDFLDNEENEDILEDIVLTLTLFEDREMIEERLKTYAHLFDDKVMKQLKRRRYTGWGRLSRKLINGIRDKQSGKTILDFLKSDGFANRNFMQLIHDDSLTFKEDIQKAQVSGQGDSLHEHIANLAGSPAIKKGILQTVKVVDELVKVMGRHKPENIVIEMARENQTTQKGQKNSRERMKRIEEGIKELGSQILKEHPVENTQLQNEKLYLYYLQNGRDMYVDQELDINRLSDYDVDHIVPQSFLKDDSIDNKVLTRSDKARGKSDNVPSEEVVKKMKNYWRQLLNAKLITQRKFDNLTKAERGGLSELDKAGFIKRQLVETRQITKHVAQILDSRMNTKYDENDKLIREVKVITLKSKLVSDFRKDFQFYKVREINNYHHAHDAYLNAVVGTALIKKYPKLESEFVYGDYKVYDVRKMIAKSEQEIGKATAKYFFYSNIMNFFKTEITLANGEIRKRPLIETNGETGEIVWDKGRDFATVRKVLSMPQVNIVKKTEVQTGGFSKESILPKRNSDKLIARKKDWDPKKYGGFDSPTVAYSVLVVAKVEKGKSKKLKSVKELLGITIMERSSFEKNPIDFLEAKGYKEVKKDLIIKLPKYSLFELENGRKRMLASAGELQKGNELALPSKYVNFLYLASHYEKLKGSPEDNEQKQLFVEQHKHYLDEIIEQISEFSKRVILADANLDKVLSAYNKHRDKPIREQAENIIHLFTLTNLGAPAAFKYFDTTIDRKRYTSTKEVLDATLIHQSITGLYETRIDLSQLGGDGGSGSETPGTSESATPESGGTLNIEDEHRLHETSKEPDVSLGSTWLSDFPQAWAETGGMGLAVRQAPLIIPLKATSTPVSIKQYPMSQEARLGIKPHIQRLLDQGILVPCQSPWNTPLLPVKKPGTNDYRPVQDLREVNKRVEDIHPTVPNPYNLLSGLPPSHQWYTVLDLKDAFFCLRLHPTSQPLFAFEWRDPEMGISGQLTWTRLPQGFKNSPTLFNEALHRDLADFRIQHPDLILLQYVDDLLLAATSELDCQQGTRALLQTLGNLGYRASAKKAQICQKQVKYLGYLLKEGQRWLTEARKETVMGQPTPKTPRQLREFLGKAGFCRLFIPGFAEMAAPLYPLTKPGTLFNWGPDQQKAYQEIKQALLTAPALGLPDLTKPFELFVDEKQGYAKGVLTQKLGPWRRPVAYLSKKLDPVAAGWPPCLRMVAAIAVLTKDAGKLTMGQPLVILAPHAVEALVKQPPDRWLSNARMTHYQALLLDTDRVQFGPVVALNPATLLPLPEEGLQHNCLDILAEAHGTRPDLTDQPLPDADHTWYTDGSSLLQEGQRKAGAAVTTETEVIWAKALPAGTSAQRAELIALTQALKMAEGKKLNVYTDSRYAFATAHIHGEIYRRRGWLTSEGKEIKNKDEILALLKALFLPKRLSIIHCPGHQKGHSAEARGNRMADQAARKAAITETPDTSTLLAGKRTADGSEFEKRTADGSEFESPKKKAKVE

SEQ ID NO: 2859 - protein, 2094 aa, synthetic construct
MPAAKRVKLDGGDKKYSIGLDIGTNSVGWAVITDEYKVPSKKFKVLGNTDRHSIKKNLIGALLFDSGETAEATRLKRTARRRYTRRKNRICYLQEIFSNEMAKVDDSFFHRLEESFLVEEDKKHERHPIFGNIVDEVAYHEKYPTIYHLRKKLVDSTDKADLRLIYLALAHMIKFRGHFLIEGDLNPDNSDVDKLFIQLVQTYNQLFEENPINASGVDAKAILSARLSKSRRLENLIAQLPGEKKNGLFGNLIALSLGLTPNFKSNFDLAEDAKLQLSKDTYDDDLDNLLAQIGDQYADLFLAAKNLSDAILLSDILRVNTEITKAPLSASMIKRYDEHHQDLTLLKALVRQQLPEKYKEIFFDQSKNGYAGYIDGGASQEEFYKFIKPILEKMDGTEELLVKLNREDLLRKQRTFDNGSIPHQIHLGELHAILRRQEDFYPFLKDNREKIEKILTFRIPYYVGPLARGNSRFAWMTRKSEETITPWNFEEVVDKGASAQSFIERMTNFDKNLPNEKVLPKHSLLYEYFTVYNELTKVKYVTEGMRKPAFLSGEQKKAIVDLLFKTNRKVTVKQLKEDYFKKIECFDSVEISGVEDRFNASLGTYHDLLKIIKDKDFLDNEENEDILEDIVLTLTLFEDREMIEERLKTYAHLFDDKVMKQLKRRRYTGWGRLSRKLINGIRDKQSGKTILDFLKSDGFANRNFMQLIHDDSLTFKEDIQKAQVSGQGDSLHEHIANLAGSPAIKKGILQTVKVVDELVKVMGRHKPENIVIEMARENQTTQKGQKNSRERMKRIEEGIKELGSQILKEHPVENTQLQNEKLYLYYLQNGRDMYVDQELDINRLSDYDVDHIVPQSFLKDDSIDNKVLTRSDKARGKSDNVPSEEVVKKMKNYWRQLLNAKLITQRKFDNLTKAERGGLSELDKAGFIKRQLVETRQITKHVAQILDSRMNTKYDENDKLIREVKVITLKSKLVSDFRKDFQFYKVREINNYHHAHDAYLNAVVGTALIKKYPKLESEFVYGDYKVYDVRKMIAKSEQEIGKATAKYFFYSNIMNFFKTEITLANGEIRKRPLIETNGETGEIVWDKGRDFATVRKVLSMPQVNIVKKTEVQTGGFSKESILPKRNSDKLIARKKDWDPKKYGGFDSPTVAYSVLVVAKVEKGKSKKLKSVKELLGITIMERSSFEKNPIDFLEAKGYKEVKKDLIIKLPKYSLFELENGRKRMLASAGELQKGNELALPSKYVNFLYLASHYEKLKGSPEDNEQKQLFVEQHKHYLDEIIEQISEFSKRVILADANLDKVLSAYNKHRDKPIREQAENIIHLFTLTNLGAPAAFKYFDTTIDRKRYTSTKEVLDATLIHQSITGLYETRIDLSQLGGDGGGSSGGSGGGGGTLNIEDEHRLHETSKEPDVSLGSTWLSDFPQAWAETGGMGLAVRQAPLIIPLKATSTPVSIKQYPMSQEARLGIKPHIQRLLDQGILVPCQSPWNTPLLPVKKPGTNDYRPVQDLREVNKRVEDIHPTVPNPYNLLSGLPPSHQWYTVLDLKDAFFCLRLHPTSQPLFAFEWRDPEMGISGQLTWTRLPQGFKNSPTLFNEALHRDLADFRIQHPDLILLQYVDDLLLAATSELDCQQGTRALLQTLGNLGYRASAKKAQICQKQVKYLGYLLKEGQRWLTEARKETVMGQPTPKTPRQLREFLGKAGFCRLFIPGFAEMAAPLYPLTKPGTLFNWGPDQQKAYQEIKQALLTAPALGLPDLTKPFELFVDEKQGYAKGVLTQKLGPWRRPVAYLSKKLDPVAAGWPPCLRMVAAIAVLTKDAGKLTMGQPLVILAPHAVEALVKQPPDRWLSNARMTHYQALLLDTDRVQFGPVVALNPATLLPLPEEGLQHNCLDILAEAHGTRPDLTDQPLPDADHTWYTDGSSLLQEGQRKAGAAVTTETEVIWAKALPAGTSAQRAELIALTQALKMAEGKKLNVYTDSRYAFATAHIHGEIYRRRGWLTSEGKEIKNKDEILALLKALFLPKRLSIIHCPGHQKGHSAEARGNRMADQAARKAAITETPDTSTLLAGKRTADGSEFEKRTADGSEFESPKKKAKVE

SEQ ID NO: 2860 - protein, 2096 aa, synthetic construct
MPAAKRVKLDGGDKKYSIGLDIGTNSVGWAVITDEYKVPSKKFKVLGNTDRHSIKKNLIGALLFDSGETAEATRLKRTARRRYTRRKNRICYLQEIFSNEMAKVDDSFFHRLEESFLVEEDKKHERHPIFGNIVDEVAYHEKYPTIYHLRKKLVDSTDKADLRLIYLALAHMIKFRGHFLIEGDLNPDNSDVDKLFIQLVQTYNQLFEENPINASGVDAKAILSARLSKSRRLENLIAQLPGEKKNGLFGNLIALSLGLTPNFKSNFDLAEDAKLQLSKDTYDDDLDNLLAQIGDQYADLFLAAKNLSDAILLSDILRVNTEITKAPLSASMIKRYDEHHQDLTLLKALVRQQLPEKYKEIFFDQSKNGYAGYIDGGASQEEFYKFIKPILEKMDGTEELLVKLNREDLLRKQRTFDNGSIPHQIHLGELHAILRRQEDFYPFLKDNREKIEKILTFRIPYYVGPLARGNSRFAWMTRKSEETITPWNFEEVVDKGASAQSFIERMTNFDKNLPNEKVLPKHSLLYEYFTVYNELTKVKYVTEGMRKPAFLSGEQKKAIVDLLFKTNRKVTVKQLKEDYFKKIECFDSVEISGVEDRFNASLGTYHDLLKIIKDKDFLDNEENEDILEDIVLTLTLFEDREMIEERLKTYAHLFDDKVMKQLKRRRYTGWGRLSRKLINGIRDKQSGKTILDFLKSDGFANRNFMQLIHDDSLTFKEDIQKAQVSGQGDSLHEHIANLAGSPAIKKGILQTVKVVDELVKVMGRHKPENIVIEMARENQTTQKGQKNSRERMKRIEEGIKELGSQILKEHPVENTQLQNEKLYLYYLQNGRDMYVDQELDINRLSDYDVDHIVPQSFLKDDSIDNKVLTRSDKARGKSDNVPSEEVVKKMKNYWRQLLNAKLITQRKFDNLTKAERGGLSELDKAGFIKRQLVETRQITKHVAQILDSRMNTKYDENDKLIREVKVITLKSKLVSDFRKDFQFYKVREINNYHHAHDAYLNAVVGTALIKKYPKLESEFVYGDYKVYDVRKMIAKSEQEIGKATAKYFFYSNIMNFFKTEITLANGEIRKRPLIETNGETGEIVWDKGRDFATVRKVLSMPQVNIVKKTEVQTGGFSKESILPKRNSDKLIARKKDWDPKKYGGFDSPTVAYSVLVVAKVEKGKSKKLKSVKELLGITIMERSSFEKNPIDFLEAKGYKEVKKDLIIKLPKYSLFELENGRKRMLASAGELQKGNELALPSKYVNFLYLASHYEKLKGSPEDNEQKQLFVEQHKHYLDEIIEQISEFSKRVILADANLDKVLSAYNKHRDKPIREQAENIIHLFTLTNLGAPAAFKYFDTTIDRKRYTSTKEVLDATLIHQSITGLYETRIDLSQLGGDGGGSSGGSEAAAKGGTLNIEDEHRLHETSKEPDVSLGSTWLSDFPQAWAETGGMGLAVRQAPLIIPLKATSTPVSIKQYPMSQEARLGIKPHIQRLLDQGILVPCQSPWNTPLLPVKKPGTNDYRPVQDLREVNKRVEDIHPTVPNPYNLLSGLPPSHQWYTVLDLKDAFFCLRLHPTSQPLFAFEWRDPEMGISGQLTWTRLPQGFKNSPTLFNEALHRDLADFRIQHPDLILLQYVDDLLLAATSELDCQQGTRALLQTLGNLGYRASAKKAQICQKQVKYLGYLLKEGQRWLTEARKETVMGQPTPKTPRQLREFLGKAGFCRLFIPGFAEMAAPLYPLTKPGTLFNWGPDQQKAYQEIKQALLTAPALGLPDLTKPFELFVDEKQGYAKGVLTQKLGPWRRPVAYLSKKLDPVAAGWPPCLRMVAAIAVLTKDAGKLTMGQPLVILAPHAVEALVKQPPDRWLSNARMTHYQALLLDTDRVQFGPVVALNPATLLPLPEEGLQHNCLDILAEAHGTRPDLTDQPLPDADHTWYTDGSSLLQEGQRKAGAAVTTETEVIWAKALPAGTSAQRAELIALTQALKMAEGKKLNVYTDSRYAFATAHIHGEIYRRRGWLTSEGKEIKNKDEILALLKALFLPKRLSIIHCPGHQKGHSAEARGNRMADQAARKAAITETPDTSTLLAGKRTADGSEFEKRTADGSEFESPKKKAKVE

SEQ ID NO: 2861 - protein, 2091 aa, synthetic construct
MPAAKRVKLDGGDKKYSIGLDIGTNSVGWAVITDEYKVPSKKFKVLGNTDRHSIKKNLIGALLFDSGETAEATRLKRTARRRYTRRKNRICYLQEIFSNEMAKVDDSFFHRLEESFLVEEDKKHERHPIFGNIVDEVAYHEKYPTIYHLRKKLVDSTDKADLRLIYLALAHMIKFRGHFLIEGDLNPDNSDVDKLFIQLVQTYNQLFEENPINASGVDAKAILSARLSKSRRLENLIAQLPGEKKNGLFGNLIALSLGLTPNFKSNFDLAEDAKLQLSKDTYDDDLDNLLAQIGDQYADLFLAAKNLSDAILLSDILRVNTEITKAPLSASMIKRYDEHHQDLTLLKALVRQQLPEKYKEIFFDQSKNGYAGYIDGGASQEEFYKFIKPILEKMDGTEELLVKLNREDLLRKQRTFDNGSIPHQIHLGELHAILRRQEDFYPFLKDNREKIEKILTFRIPYYVGPLARGNSRFAWMTRKSEETITPWNFEEVVDKGASAQSFIERMTNFDKNLPNEKVLPKHSLLYEYFTVYNELTKVKYVTEGMRKPAFLSGEQKKAIVDLLFKTNRKVTVKQLKEDYFKKIECFDSVEISGVEDRFNASLGTYHDLLKIIKDKDFLDNEENEDILEDIVLTLTLFEDREMIEERLKTYAHLFDDKVMKQLKRRRYTGWGRLSRKLINGIRDKQSGKTILDFLKSDGFANRNFMQLIHDDSLTFKEDIQKAQVSGQGDSLHEHIANLAGSPAIKKGILQTVKVVDELVKVMGRHKPENIVIEMARENQTTQKGQKNSRERMKRIEEGIKELGSQILKEHPVENTQLQNEKLYLYYLQNGRDMYVDQELDINRLSDYDVDHIVPQSFLKDDSIDNKVLTRSDKARGKSDNVPSEEVVKKMKNYWRQLLNAKLITQRKFDNLTKAERGGLSELDKAGFIKRQLVETRQITKHVAQILDSRMNTKYDENDKLIREVKVITLKSKLVSDFRKDFQFYKVREINNYHHAHDAYLNAVVGTALIKKYPKLESEFVYGDYKVYDVRKMIAKSEQEIGKATAKYFFYSNIMNFFKTEITLANGEIRKRPLIETNGETGEIVWDKGRDFATVRKVLSMPQVNIVKKTEVQTGGFSKESILPKRNSDKLIARKKDWDPKKYGGFDSPTVAYSVLVVAKVEKGKSKKLKSVKELLGITIMERSSFEKNPIDFLEAKGYKEVKKDLIIKLPKYSLFELENGRKRMLASAGELQKGNELALPSKYVNFLYLASHYEKLKGSPEDNEQKQLFVEQHKHYLDEIIEQISEFSKRVILADANLDKVLSAYNKHRDKPIREQAENIIHLFTLTNLGAPAAFKYFDTTIDRKRYTSTKEVLDATLIHQSITGLYETRIDLSQLGGDGGGGSGGGGGTLNIEDEHRLHETSKEPDVSLGSTWLSDFPQAWAETGGMGLAVRQAPLIIPLKATSTPVSIKQYPMSQEARLGIKPHIQRLLDQGILVPCQSPWNTPLLPVKKPGTNDYRPVQDLREVNKRVEDIHPTVPNPYNLLSGLPPSHQWYTVLDLKDAFFCLRLHPTSQPLFAFEWRDPEMGISGQLTWTRLPQGFKNSPTLFNEALHRDLADFRIQHPDLILLQYVDDLLLAATSELDCQQGTRALLQTLGNLGYRASAKKAQICQKQVKYLGYLLKEGQRWLTEARKETVMGQPTPKTPRQLREFLGKAGFCRLFIPGFAEMAAPLYPLTKPGTLFNWGPDQQKAYQEIKQALLTAPALGLPDLTKPFELFVDEKQGYAKGVLTQKLGPWRRPVAYLSKKLDPVAAGWPPCLRMVAAIAVLTKDAGKLTMGQPLVILAPHAVEALVKQPPDRWLSNARMTHYQALLLDTDRVQFGPVVALNPATLLPLPEEGLQHNCLDILAEAHGTRPDLTDQPLPDADHTWYTDGSSLLQEGQRKAGAAVTTETEVIWAKALPAGTSAQRAELIALTQALKMAEGKKLNVYTDSRYAFATAHIHGEIYRRRGWLTSEGKEIKNKDEILALLKALFLPKRLSIIHCPGHQKGHSAEARGNRMADQAARKAAITETPDTSTLLAGKRTADGSEFEKRTADGSEFESPKKKAKVE

SEQ ID NO: 2862 - protein, 2116 aa, synthetic construct; identical to SEQ ID NO: 2637

SEQ ID NO: 2863 - protein, 2116 aa, synthetic construct
MPAAKRVKLDGGDKKYSIGLDIGTNSVGWAVITDEYKVPSKKFKVLGNTDRHSIKKNLIGALLFDSGETAEATRLKRTARRRYTRRKNRICYLQEIFSNEMAKVDDSFFHRLEESFLVEEDKKHERHPIFGNIVDEVAYHEKYPTIYHLRKKLVDSTDKADLRLIYLALAHMIKFRGHFLIEGDLNPDNSDVDKLFIQLVQTYNQLFEENPINASGVDAKAILSARLSKSRRLENLIAQLPGEKKNGLFGNLIALSLGLTPNFKSNFDLAEDAKLQLSKDTYDDDLDNLLAQIGDQYADLFLAAKNLSDAILLSDILRVNTEITKAPLSASMIKRYDEHHQDLTLLKALVRQQLPEKYKEIFFDQSKNGYAGYIDGGASQEEFYKFIKPILEKMDGTEELLVKLNREDLLRKQRTFDNGSIPHQIHLGELHAILRRQEDFYPFLKDNREKIEKILTFRIPYYVGPLARGNSRFAWMTRKSEETITPWNFEEVVDKGASAQSFIERMTNFDKNLPNEKVLPKHSLLYEYFTVYNELTKVKYVTEGMRKPAFLSGEQKKAIVDLLFKTNRKVTVKQLKEDYFKKIECFDSVEISGVEDRFNASLGTYHDLLKIIKDKDFLDNEENEDILEDIVLTLTLFEDREMIEERLKTYAHLFDDKVMKQLKRRRYTGWGRLSRKLINGIRDKQSGKTILDFLKSDGFANRNFMQLIHDDSLTFKEDIQKAQVSGQGDSLHEHIANLAGSPAIKKGILQTVKVVDELVKVMGRHKPENIVIEMARENQTTQKGQKNSRERMKRIEEGIKELGSQILKEHPVENTQLQNEKLYLYYLQNGRDMYVDQELDINRLSDYDVDHIVPQSFLKDDSIDNKVLTRSDKARGKSDNVPSEEVVKKMKNYWRQLLNAKLITQRKFDNLTKAERGGLSELDKAGFIKRQLVETRQITKHVAQILDSRMNTKYDENDKLIREVKVITLKSKLVSDFRKDFQFYKVREINNYHHAHDAYLNAVVGTALIKKYPKLESEFVYGDYKVYDVRKMIAKSEQEIGKATAKYFFYSNIMNFFKTEITLANGEIRKRPLIETNGETGEIVWDKGRDFATVRKVLSMPQVNIVKKTEVQTGGFSKESILPKRNSDKLIARKKDWDPKKYGGFDSPTVAYSVLVVAKVEKGKSKKLKSVKELLGITIMERSSFEKNPIDFLEAKGYKEVKKDLIIKLPKYSLFELENGRKRMLASAGELQKGNELALPSKYVNFLYLASHYEKLKGSPEDNEQKQLFVEQHKHYLDEIIEQISEFSKRVILADANLDKVLSAYNKHRDKPIREQAENIIHLFTLTNLGAPAAFKYFDTTIDRKRYTSTKEVLDATLIHQSITGLYETRIDLSQLGGDGGEAAAKGGGGGSGGTLNIEDEYRLHETSKEPDVSLGSTWLSDFPQAWAETGGMGLAVRQAPLIIPLKATSTPVSIKQYPMSQEARLGIKPHIQRLLDQGILVPCQSPWNTPLLPVKKPGTNDYRPVQDLREVNKRVEDIHPTVPNPYNLLSGLPPSHQWYTVLDLKDAFFCLRLHPTSQPLFAFEWRDPEMGISGQLTWTRLPQGFKNSPTLFNEALHRDLADFRIQHPDLILLQYVDDLLLAATSELDCQQGTRALLQTLGNLGYRASAKKAQICQKQVKYLGYLLKEGQRWLTEARKETVMGQPTPKTPRQLREFLGKAGFCRLFIPGFAEMAAPLYPLTKPGTLFNWGPDQQKAYQEIKQALLTAPALGLPDLTKPFELFVDEKQGYAKGVLTQKLGPWRRPVAYLSKKLDPVAAGWPPCLRMVAAIAVLTKDAGKLTMGQPLVILAPHAVEALVKQPPDRWLSNARMTHYQALLLDTDRVQFGPVVALNPATLLPLPEEGLQHNCLDILAEAHGTRPDLTDQPLPDADHTWYTDGSSLLQEGQRKAGAAVTTETEVIWAKALPAGTSAQRAELIALTQALKMAEGKKLNVYTDSRYAFATAHIHGEIYRRRGWLTSEGKEIKNKDEILALLKALFLPKRLSIIHCPGHQKGHSAEARGNRMADQAARKAAITETPDTSTLLIENSSPSGGSKRTADGSEFEAGKRTADGSEFEKRTADGSEFESPKKKAKVE

SEQ ID NO: 2864 - protein, 2108 aa, synthetic construct; identical to SEQ ID NO: 2655

SEQ ID NO: 2865 - protein, 2108 aa, synthetic construct; identical to SEQ ID NO: 2624

SEQ ID NO: 2866 - protein, 2116 aa, synthetic construct; identical to SEQ ID NO: 2692

SEQ ID NO: 2867 - protein, 2117 aa, synthetic construct; identical to SEQ ID NO: 2665

SEQ ID NO: 2868 - protein, 2118 aa, synthetic construct
MPAAKRVKLDGGDKKYSIGLDIGTNSVGWAVITDEYKVPSKKFKVLGNTDRHSIKKNLIGALLFDSGETAEATRLKRTARRRYTRRKNRICYLQEIFSNEMAKVDDSFFHRLEESFLVEEDKKHERHPIFGNIVDEVAYHEKYPTIYHLRKKLVDSTDKADLRLIYLALAHMIKFRGHFLIEGDLNPDNSDVDKLFIQLVQTYNQLFEENPINASGVDAKAILSARLSKSRRLENLIAQLPGEKKNGLFGNLIALSLGLTPNFKSNFDLAEDAKLQLSKDTYDDDLDNLLAQIGDQYADLFLAAKNLSDAILLSDILRVNTEITKAPLSASMIKRYDEHHQDLTLLKALVRQQLPEKYKEIFFDQSKNGYAGYIDGGASQEEFYKFIKPILEKMDGTEELLVKLNREDLLRKQRTFDNGSIPHQIHLGELHAILRRQEDFYPFLKDNREKIEKILTFRIPYYVGPLARGNSRFAWMTRKSEETITPWNFEEVVDKGASAQSFIERMTNFDKNLPNEKVLPKHSLLYEYFTVYNELTKVKYVTEGMRKPAFLSGEQKKAIVDLLFKTNRKVTVKQLKEDYFKKIECFDSVEISGVEDRFNASLGTYHDLLKIIKDKDFLDNEENEDILEDIVLTLTLFEDREMIEERLKTYAHLFDDKVMKQLKRRRYTGWGRLSRKLINGIRDKQSGKTILDFLKSDGFANRNFMQLIHDDSLTFKEDIQKAQVSGQGDSLHEHIANLAGSPAIKKGILQTVKVVDELVKVMGRHKPENIVIEMARENQTTQKGQKNSRERMKRIEEGIKELGSQILKEHPVENTQLQNEKLYLYYLQNGRDMYVDQELDINRLSDYDVDHIVPQSFLKDDSIDNKVLTRSDKARGKSDNVPSEEVVKKMKNYWRQLLNAKLITQRKFDNLTKAERGGLSELDKAGFIKRQLVETRQITKHVAQILDSRMNTKYDENDKLIREVKVITLKSKLVSDFRKDFQFYKVREINNYHHAHDAYLNAVVGTALIKKYPKLESEFVYGDYKVYDVRKMIAKSEQEIGKATAKYFFYSNIMNFFKTEITLANGEIRKRPLIETNGETGEIVWDKGRDFATVRKVLSMPQVNIVKKTEVQTGGFSKESILPKRNSDKLIARKKDWDPKKYGGFDSPTVAYSVLVVAKVEKGKSKKLKSVKELLGITIMERSSFEKNPIDFLEAKGYKEVKKDLIIKLPKYSLFELENGRKRMLASAGELQKGNELALPSKYVNFLYLASHYEKLKGSPEDNEQKQLFVEQHKHYLDEIIEQISEFSKRVILADANLDKVLSAYNKHRDKPIREQAENIIHLFTLTNLGAPAAFKYFDTTIDRKRYTSTKEVLDATLIHQSITGLYETRIDLSQLGGDGGPAPAPAPAPAPAPGGTLNIEDEYRLHETSKEPDVSLGSTWLSDFPQAWAETGGMGLAVRQAPLIIPLKATSTPVSIKQYPMSQEARLGIKPHIQRLLDQGILVPCQSPWNTPLLPVKKPGTNDYRPVQDLREVNKRVEDIHPTVPNPYNLLSGLPPSHQWYTVLDLKDAFFCLRLHPTSQPLFAFEWRDPEMGISGQLTWTRLPQGFKNSPTLFNEALHRDLADFRIQHPDLILLQYVDDLLLAATSELDCQQGTRALLQTLGNLGYRASAKKAQICQKQVKYLGYLLKEGQRWLTEARKETVMGQPTPKTPRQLREFLGKAGFCRLFIPGFAEMAAPLYPLTKPGTLFNWGPDQQKAYQEIKQALLTAPALGLPDLTKPFELFVDEKQGYAKGVLTQKLGPWRRPVAYLSKKLDPVAAGWPPCLRMVAAIAVLTKDAGKLTMGQPLVILAPHAVEALVKQPPDRWLSNARMTHYQALLLDTDRVQFGPVVALNPATLLPLPEEGLQHNCLDILAEAHGTRPDLTDQPLPDADHTWYTDGSSLLQEGQRKAGAAVTTETEVIWAKALPAGTSAQRAELIALTQALKMAEGKKLNVYTDSRYAFATAHIHGEIYRRRGWLTSEGKEIKNKDEILALLKALFLPKRLSIIHCPGHQKGHSAEARGNRMADQAARKAAITETPDTSTLLIENSSPSGGSKRTADGSEFEAGKRTADGSEFEKRTADGSEFESPKKKAKVE

SEQ ID NO: 2869 - protein, 2114 aa, synthetic construct
MPAAKRVKLDGGDKKYSIGLDIGTNSVGWAVITDEYKVPSKKFKVLGNTDRHSIKKNLIGALLFDSGETAEATRLKRTARRRYTRRKNRICYLQEIFSNEMAKVDDSFFHRLEESFLVEEDKKHERHPIFGNIVDEVAYHEKYPTIYHLRKKLVDSTDKADLRLIYLALAHMIKFRGHFLIEGDLNPDNSDVDKLFIQLVQTYNQLFEENPINASGVDAKAILSARLSKSRRLENLIAQLPGEKKNGLFGNLIALSLGLTPNFKSNFDLAEDAKLQLSKDTYDDDLDNLLAQIGDQYADLFLAAKNLSDAILLSDILRVNTEITKAPLSASMIKRYDEHHQDLTLLKALVRQQLPEKYKEIFFDQSKNGYAGYIDGGASQEEFYKFIKPILEKMDGTEELLVKLNREDLLRKQRTFDNGSIPHQIHLGELHAILRRQEDFYPFLKDNREKIEKILTFRIPYYVGPLARGNSRFAWMTRKSEETITPWNFEEVVDKGASAQSFIERMTNFDKNLPNEKVLPKHSLLYEYFTVYNELTKVKYVTEGMRKPAFLSGEQKKAIVDLLFKTNRKVTVKQLKEDYFKKIECFDSVEISGVEDRFNASLGTYHDLLKIIKDKDFLDNEENEDILEDIVLTLTLFEDREMIEERLKTYAHLFDDKVMKQLKRRRYTGWGRLSRKLINGIRDKQSGKTILDFLKSDGFANRNFMQLIHDDSLTFKEDIQKAQVSGQGDSLHEHIANLAGSPAIKKGILQTVKVVDELVKVMGRHKPENIVIEMARENQTTQKGQKNSRERMKRIEEGIKELGSQILKEHPVENTQLQNEKLYLYYLQNGRDMYVDQELDINRLSDYDVDHIVPQSFLKDDSIDNKVLTRSDKARGKSDNVPSEEVVKKMKNYWRQLLNAKLITQRKFDNLTKAERGGLSELDKAGFIKRQLVETRQITKHVAQILDSRMNTKYDENDKLIREVKVITLKSKLVSDFRKDFQFYKVREINNYHHAHDAYLNAVVGTALIKKYPKLESEFVYGDYKVYDVRKMIAKSEQEIGKATAKYFFYSNIMNFFKTEITLANGEIRKRPLIETNGETGEIVWDKGRDFATVRKVLSMPQVNIVKKTEVQTGGFSKESILPKRNSDKLIARKKDWDPKKYGGFDSPTVAYSVLVVAKVEKGKSKKLKSVKELLGITIMERSSFEKNPIDFLEAKGYKEVKKDLIIKLPKYSLFELENGRKRMLASAGELQKGNELALPSKYVNFLYLASHYEKLKGSPEDNEQKQLFVEQHKHYLDEIIEQISEFSKRVILADANLDKVLSAYNKHRDKPIREQAENIIHLFTLTNLGAPAAFKYFDTTIDRKRYTSTKEVLDATLIHQSITGLYETRIDLSQLGGDGGPAPGGGGSSGGTLNIEDEYRLHETSKEPDVSLGSTWLSDFPQAWAETGGMGLAVRQAPLIIPLKATSTPVSIKQYPMSQEARLGIKPHIQRLLDQGILVPCQSPWNTPLLPVKKPGTNDYRPVQDLREVNKRVEDIHPTVPNPYNLLSGLPPSHQWYTVLDLKDAFFCLRLHPTSQPLFAFEWRDPEMGISGQLTWTRLPQGFKNSPTLFNEALHRDLADFRIQHPDLILLQYVDDLLLAATSELDCQQGTRALLQTLGNLGYRASAKKAQICQKQVKYLGYLLKEGQRWLTEARKETVMGQPTPKTPRQLREFLGKAGFCRLFIPGFAEMAAPLYPLTKPGTLFNWGPDQQKAYQEIKQALLTAPALGLPDLTKPFELFVDEKQGYAKGVLTQKLGPWRRPVAYLSKKLDPVAAGWPPCLRMVAAIAVLTKDAGKLTMGQPLVILAPHAVEALVKQPPDRWLSNARMTHYQALLLDTDRVQFGPVVALNPATLLPLPEEGLQHNCLDILAEAHGTRPDLTDQPLPDADHTWYTDGSSLLQEGQRKAGAAVTTETEVIWAKALPAGTSAQRAELIALTQALKMAEGKKLNVYTDSRYAFATAHIHGEIYRRRGWLTSEGKEIKNKDEILALLKALFLPKRLSIIHCPGHQKGHSAEARGNRMADQAARKAAITETPDTSTLLIENSSPSGGSKRTADGSEFEAGKRTADGSEFEKRTADGSEFESPKKKAKVE

SEQ ID NO: 2870 - protein, 2116 aa, synthetic construct; identical to SEQ ID NO: 2677

SEQ ID NO: 2871 - protein, 2111 aa, synthetic construct; identical to SEQ ID NO: 2676

SEQ ID NO: 2872 - protein, 2116 aa, synthetic construct
MPAAKRVKLDGGDKKYSIGLDIGTNSVGWAVITDEYKVPSKKFKVLGNTDRHSIKKNLIGALLFDSGETAEATRLKRTARRRYTRRKNRICYLQEIFSNEMAKVDDSFFHRLEESFLVEEDKKHERHPIFGNIVDEVAYHEKYPTIYHLRKKLVDSTDKADLRLIYLALAHMIKFRGHFLIEGDLNPDNSDVDKLFIQLVQTYNQLFEENPINASGVDAKAILSARLSKSRRLENLIAQLPGEKKNGLFGNLIALSLGLTPNFKSNFDLAEDAKLQLSKDTYDDDLDNLLAQIGDQYADLFLAAKNLSDAILLSDILRVNTEITKAPLSASMIKRYDEHHQDLTLLKALVRQQLPEKYKEIFFDQSKNGYAGYIDGGASQEEFYKFIKPILEKMDGTEELLVKLNREDLLRKQRTFDNGSIPHQIHLGELHAILRRQEDFYPFLKDNREKIEKILTFRIPYYVGPLARGNSRFAWMTRKSEETITPWNFEEVVDKGASAQSFIERMTNFDKNLPNEKVLPKHSLLYEYFTVYNELTKVKYVTEGMRKPAFLSGEQKKAIVDLLFKTNRKVTVKQLKEDYFKKIECFDSVEISGVEDRFNASLGTYHDLLKIIKDKDFLDNEENEDILEDIVLTLTLFEDREMIEERLKTYAHLFDDKVMKQLKRRRYTGWGRLSRKLINGIRDKQSGKTILDFLKSDGFANRNFMQLIHDDSLTFKEDIQKAQVSGQGDSLHEHIANLAGSPAIKKGILQTVKVVDELVKVMGRHKPENIVIEMARENQTTQKGQKNSRERMKRIEEGIKELGSQILKEHPVENTQLQNEKLYLYYLQNGRDMYVDQELDINRLSDYDVDHIVPQSFLKDDSIDNKVLTRSDKARGKSDNVPSEEVVKKMKNYWRQLLNAKLITQRKFDNLTKAERGGLSELDKAGFIKRQLVETRQITKHVAQILDSRMNTKYDENDKLIREVKVITLKSKLVSDFRKDFQFYKVREINNYHHAHDAYLNAVVGTALIKKYPKLESEFVYGDYKVYDVRKMIAKSEQEIGKATAKYFFYSNIMNFFKTEITLANGEIRKRPLIETNGETGEIVWDKGRDFATVRKVLSMPQVNIVKKTEVQTGGFSKESILPKRNSDKLIARKKDWDPKKYGGFDSPTVAYSVLVVAKVEKGKSKKLKSVKELLGITIMERSSFEKNPIDFLEAKGYKEVKKDLIIKLPKYSLFELENGRKRMLASAGELQKGNELALPSKYVNFLYLASHYEKLKGSPEDNEQKQLFVEQHKHYLDEIIEQISEFSKRVILADANLDKVLSAYNKHRDKPIREQAENIIHLFTLTNLGAPAAFKYFDTTIDRKRYTSTKEVLDATLIHQSITGLYETRIDLSQLGGDGGPAPGGGEAAAKGGTLNIEDEYRLHETSKEPDVSLGSTWLSDFPQAWAETGGMGLAVRQAPLIIPLKATSTPVSIKQYPMSQEARLGIKPHIQRLLDQGILVPCQSPWNTPLLPVKKPGTNDYRPVQDLREVNKRVEDIHPTVPNPYNLLSGLPPSHQWYTVLDLKDAFFCLRLHPTSQPLFAFEWRDPEMGISGQLTWTRLPQGFKNSPTLFNEALHRDLADFRIQHPDLILLQYVDDLLLAATSELDCQQGTRALLQTLGNLGYRASAKKAQICQKQVKYLGYLLKEGQRWLTEARKETVMGQPTPKTPRQLREFLGKAGFCRLFIPGFAEMAAPLYPLTKPGTLFNWGPDQQKAYQEIKQALLTAPALGLPDLTKPFELFVDEKQGYAKGVLTQKLGPWRRPVAYLSKKLDPVAAGWPPCLRMVAAIAVLTKDAGKLTMGQPLVILAPHAVEALVKQPPDRWLSNARMTHYQALLLDTDRVQFGPVVALNPATLLPLPEEGLQHNCLDILAEAHGTRPDLTDQPLPDADHTWYTDGSSLLQEGQRKAGAAVTTETEVIWAKALPAGTSAQRAELIALTQALKMAEGKKLNVYTDSRYAFATAHIHGEIYRRRGWLTSEGKEIKNKDEILALLKALFLPKRLSIIHCPGHQKGHSAEARGNRMADQAARKAAITETPDTSTLLIENSSPSGGSKRTADGSEFEAGKRTADGSEFEKRTADGSEFESPKKKAKVE

SEQ ID NO: 2873 - protein, 2116 aa, synthetic construct; identical to SEQ ID NO: 2651

SEQ ID NO: 2874 - protein, 2116 aa, synthetic construct; identical to SEQ ID NO: 2638

SEQ ID NO: 2875 - protein, 2114 aa, synthetic construct; identical to SEQ ID NO: 2685

SEQ ID NO: 2876 - protein, 2114 aa, synthetic construct; identical to SEQ ID NO: 2698

SEQ ID NO: 2877 - protein, 2120 aa, synthetic construct; identical to SEQ ID NO: 2627

SEQ ID NO: 2878 - protein, 2114 aa, synthetic construct; identical to SEQ ID NO: 2649

SEQ ID NO: 2879 - protein, 2116 aa, synthetic construct
MPAAKRVKLDGGDKKYSIGLDIGTNSVGWAVITDEYKVPSKKFKVLGNTDRHSIKKNLIGALLFDSGETAEATRLKRTARRRYTRRKNRICYLQEIFSNEMAKVDDSFFHRLEESFLVEEDKKHERHPIFGNIVDEVAYHEKYPTIYHLRKKLVDSTDKADLRLIYLALAHMIKFRGHFLIEGDLNPDNSDVDKLFIQLVQTYNQLFEENPINASGVDAKAILSARLSKSRRLENLIAQLPGEKKNGLFGNLIALSLGLTPNFKSNFDLAEDAKLQLSKDTYDDDLDNLLAQIGDQYADLFLAAKNLSDAILLSDILRVNTEITKAPLSASMIKRYDEHHQDLTLLKALVRQQLPEKYKEIFFDQSKNGYAGYIDGGASQEEFYKFIKPILEKMDGTEELLVKLNREDLLRKQRTFDNGSIPHQIHLGELHAILRRQEDFYPFLKDNREKIEKILTFRIPYYVGPLARGNSRFAWMTRKSEETITPWNFEEVVDKGASAQSFIERMTNFDKNLPNEKVLPKHSLLYEYFTVYNELTKVKYVTEGMRKPAFLSGEQKKAIVDLLFKTNRKVTVKQLKEDYFKKIECFDSVEISGVEDRFNASLGTYHDLLKIIKDKDFLDNEENEDILEDIVLTLTLFEDREMIEERLKTYAHLFDDKVMKQLKRRRYTGWGRLSRKLINGIRDKQSGKTILDFLKSDGFANRNFMQLIHDDSLTFKEDIQKAQVSGQGDSLHEHIANLAGSPAIKKGILQTVKVVDELVKVMGRHKPENIVIEMARENQTTQKGQKNSRERMKRIEEGIKELGSQILKEHPVENTQLQNEKLYLYYLQNGRDMYVDQELDINRLSDYDVDHIVPQSFLKDDSIDNKVLTRSDKARGKSDNVPSEEVVKKMKNYWRQLLNAKLITQRKFDNLTKAERGGLSELDKAGFIKRQLVETRQITKHVAQILDSRMNTKYDENDKLIREVKVITLKSKLVSDFRKDFQFYKVREINNYHHAHDAYLNAVVGTALIKKYPKLESEFVYGDYKVYDVRKMIAKSEQEIGKATAKYFFYSNIMNFFKTEITLANGEIRKRPLIETNGETGEIVWDKGRDFATVRKVLSMPQVNIVKKTEVQTGGFSKESILPKRNSDKLIARKKDWDPKKYGGFDSPTVAYSVLVVAKVEKGKSKKLKSVKELLGITIMERSSFEKNPIDFLEAKGYKEVKKDLIIKLPKYSLFELENGRKRMLASAGELQKGNELALPSKYVNFLYLASHYEKLKGSPEDNEQKQLFVEQHKHYLDEIIEQISEFSKRVILADANLDKVLSAYNKHRDKPIREQAENIIHLFTLTNLGAPAAFKYFDTTIDRKRYTSTKEVLDATLIHQSITGLYETRIDLSQLGGDGGGGGEAAAKPAPGGTLNIEDEYRLHETSKEPDVSLGSTWLSDFPQAWAETGGMGLAVRQAPLIIPLKATSTPVSIKQYPMSQEARLGIKPHIQRLLDQGILVPCQSPWNTPLLPVKKPGTNDYRPVQDLREVNKRVEDIHPTVPNPYNLLSGLPPSHQWYTVLDLKDAFFCLRLHPTSQPLFAFEWRDPEMGISGQLTWTRLPQGFKNSPTLFNEALHRDLADFRIQHPDLILLQYVDDLLLAATSELDCQQGTRALLQTLGNLGYRASAKKAQICQKQVKYLGYLLKEGQRWLTEARKETVMGQPTPKTPRQLREFLGKAGFCRLFIPGFAEMAAPLYPLTKPGTLFNWGPDQQKAYQEIKQALLTAPALGLPDLTKPFELFVDEKQGYAKGVLTQKLGPWRRPVAYLSKKLDPVAAGWPPCLRMVAAIAVLTKDAGKLTMGQPLVILAPHAVEALVKQPPDRWLSNARMTHYQALLLDTDRVQFGPVVALNPATLLPLPEEGLQHNCLDILAEAHGTRPDLTDQPLPDADHTWYTDGSSLLQEGQRKAGAAVTTETEVIWAKALPAGTSAQRAELIALTQALKMAEGKKLNVYTDSRYAFATAHIHGEIYRRRGWLTSEGKEIKNKDEILALLKALFLPKRLSIIHCPGHQKGHSAEARGNRMADQAARKAAITETPDTSTLLIENSSPSGGSKRTADGSEFEAGKRTADGSEFEKRTADGSEFESPKKKAKVE

SEQ ID NO: 2880 - protein, 2130 aa, synthetic construct; identical to SEQ ID NO: 2678

SEQ ID NO: 2881 - protein, 2110 aa, synthetic construct; identical to SEQ ID NO: 2620

SEQ ID NO: 2882 - protein, 2117 aa, synthetic construct; identical to SEQ ID NO: 2687

SEQ ID NO: 2883 - protein, 2113 aa, synthetic construct
MPAAKRVKLDGGDKKYSIGLDIGTNSVGWAVITDEYKVPSKKFKVLGNTDRHSIKKNLIGALLFDSGETAEATRLKRTARRRYTRRKNRICYLQEIFSNEMAKVDDSFFHRLEESFLVEEDKKHERHPIFGNIVDEVAYHEKYPTIYHLRKKLVDSTDKADLRLIYLALAHMIKFRGHFLIEGDLNPDNSDVDKLFIQLVQTYNQLFEENPINASGVDAKAILSARLSKSRRLENLIAQLPGEKKNGLFGNLIALSLGLTPNFKSNFDLAEDAKLQLSKDTYDDDLDNLLAQIGDQYADLFLAAKNLSDAILLSDILRVNTEITKAPLSASMIKRYDEHHQDLTLLKALVRQQLPEKYKEIFFDQSKNGYAGYIDGGASQEEFYKFIKPILEKMDGTEELLVKLNREDLLRKQRTFDNGSIPHQIHLGELHAILRRQEDFYPFLKDNREKIEKILTFRIPYYVGPLARGNSRFAWMTRKSEETITPWNFEEVVDKGASAQSFIERMTNFDKNLPNEKVLPKHSLLYEYFTVYNELTKVKYVTEGMRKPAFLSGEQKKAIVDLLFKTNRKVTVKQLKEDYFKKIECFDSVEISGVEDRFNASLGTYHDLLKIIKDKDFLDNEENEDILEDIVLTLTLFEDREMIEERLKTYAHLFDDKVMKQLKRRRYTGWGRLSRKLINGIRDKQSGKTILDFLKSDGFANRNFMQLIHDDSLTFKEDIQKAQVSGQGDSLHEHIANLAGSPAIKKGILQTVKVVDELVKVMGRHKPENIVIEMARENQTTQKGQKNSRERMKRIEEGIKELGSQILKEHPVENTQLQNEKLYLYYLQNGRDMYVDQELDINRLSDYDVDHIVPQSFLKDDSIDNKVLTRSDKARGKSDNVPSEEVVKKMKNYWRQLLNAKLITQRKFDNLTKAERGGLSELDKAGFIKRQLVETRQITKHVAQILDSRMNTKYDENDKLIREVKVITLKSKLVSDFRKDFQFYKVREINNYHHAHDAYLNAVVGTALIKKYPKLESEFVYGDYKVYDVRKMIAKSEQEIGKATAKYFFYSNIMNFFKTEITLANGEIRKRPLIETNGETGEIVWDKGRDFATVRKVLSMPQVNIVKKTEVQTGGFSKESILPKRNSDKLIARKKDWDPKKYGGFDSPTVAYSVLVVAKVEKGKSKKLKSVKELLGITIMERSSFEKNPIDFLEAKGYKEVKKDLIIKLPKYSLFELENGRKRMLASAGELQKGNELALPSKYVNFLYLASHYEKLKGSPEDNEQKQLFVEQHKHYLDEIIEQISEFSKRVILADANLDKVLSAYNKHRDKPIREQAENIIHLFTLTNLGAPAAFKYFDTTIDRKRYTSTKEVLDATLIHQSITGLYETRIDLSQLGGDGGPAPEAAAKGGTLNIEDEYRLHETSKEPDVSLGSTWLSDFPQAWAETGGMGLAVRQAPLIIPLKATSTPVSIKQYPMSQEARLGIKPHIQRLLDQGILVPCQSPWNTPLLPVKKPGTNDYRPVQDLREVNKRVEDIHPTVPNPYNLLSGLPPSHQWYTVLDLKDAFFCLRLHPTSQPLFAFEWRDPEMGISGQLTWTRLPQGFKNSPTLFNEALHRDLADFRIQHPDLILLQYVDDLLLAATSELDCQQGTRALLQTLGNLGYRASAKKAQICQKQVKYLGYLLKEGQRWLTEARKETVMGQPTPKTPRQLREFLGKAGFCRLFIPGFAEMAAPLYPLTKPGTLFNWGPDQQKAYQEIKQALLTAPALGLPDLTKPFELFVDEKQGYAKGVLTQKLGPWRRPVAYLSKKLDPVAAGWPPCLRMVAAIAVLTKDAGKLTMGQPLVILAPHAVEALVKQPPDRWLSNARMTHYQALLLDTDRVQFGPVVALNPATLLPLPEEGLQHNCLDILAEAHGTRPDLTDQPLPDADHTWYTDGSSLLQEGQRKAGAAVTTETEVIWAKALPAGTSAQRAELIALTQALKMAEGKKLNVYTDSRYAFATAHIHGEIYRRRGWLTSEGKEIKNKDEILALLKALFLPKRLSIIHCPGHQKGHSAEARGNRMADQAARKAAITETPDTSTLLIENSSPSGGSKRTADGSEFEAGKRTADGSEFEKRTADGSEFESPKKKAKVE

SEQ ID NO: 2884 - protein, 2116 aa, synthetic construct; identical to SEQ ID NO: 2674

SEQ ID NO: 2885 - protein, 2116 aa, synthetic construct; identical to SEQ ID NO: 2688

SEQ ID NO: 2886 - protein, 2111 aa, synthetic construct; identical to SEQ ID NO: 2653

SEQ ID NO: 2887 - protein, 2115 aa, synthetic construct; identical to SEQ ID NO: 2647

SEQ ID NO: 2888 - protein, 2125 aa, synthetic construct; identical to SEQ ID NO: 2610

SEQ ID NO: 2889 - protein, 2116 aa, synthetic construct; identical to SEQ ID NO: 2683

SEQ ID NO: 2890 - protein, 2114 aa, synthetic construct; identical to SEQ ID NO: 2633

SEQ ID NO: 2891 - protein, 2116 aa, synthetic construct; identical to SEQ ID NO: 2641

SEQ ID NO: 2892 - protein, 2138 aa, synthetic construct
MPAAKRVKLDGGDKKYSIGLDIGTNSVGWAVITDEYKVPSKKFKVLGNTDRHSIKKNLIGALLFDSGETAEATRLKRTARRRYTRRKNRICYLQEIFSNEMAKVDDSFFHRLEESFLVEEDKKHERHPIFGNIVDEVAYHEKYPTIYHLRKKLVDSTDKADLRLIYLALAHMIKFRGHFLIEGDLNPDNSDVDKLFIQLVQTYNQLFEENPINASGVDAKAILSARLSKSRRLENLIAQLPGEKKNGLFGNLIALSLGLTPNFKSNFDLAEDAKLQLSKDTYDDDLDNLLAQIGDQYADLFLAAKNLSDAILLSDILRVNTEITKAPLSASMIKRYDEHHQDLTLLKALVRQQLPEKYKEIFFDQSKNGYAGYIDGGASQEEFYKFIKPILEKMDGTEELLVKLNREDLLRKQRTFDNGSIPHQIHLGELHAILRRQEDFYPFLKDNREKIEKILTFRIPYYVGPLARGNSRFAWMTRKSEETITPWNFEEVVDKGASAQSFIERMTNFDKNLPNEKVLPKHSLLYEYFTVYNELTKVKYVTEGMRKPAFLSGEQKKAIVDLLFKTNRKVTVKQLKEDYFKKIECFDSVEISGVEDRFNASLGTYHDLLKIIKDKDFLDNEENEDILEDIVLTLTLFEDREMIEERLKTYAHLFDDKVMKQLKRRRYTGWGRLSRKLINGIRDKQSGKTILDFLKSDGFANRNFMQLIHDDSLTFKEDIQKAQVSGQGDSLHEHIANLAGSPAIKKGILQTVKVVDELVKVMGRHKPENIVIEMARENQTTQKGQKNSRERMKRIEEGIKELGSQILKEHPVENTQLQNEKLYLYYLQNGRDMYVDQELDINRLSDYDVDHIVPQSFLKDDSIDNKVLTRSDKARGKSDNVPSEEVVKKMKNYWRQLLNAKLITQRKFDNLTKAERGGLSELDKAGFIKRQLVETRQITKHVAQILDSRMNTKYDENDKLIREVKVITLKSKLVSDFRKDFQFYKVREINNYHHAHDAYLNAVVGTALIKKYPKLESEFVYGDYKVYDVRKMIAKSEQEIGKATAKYFFYSNIMNFFKTEITLANGEIRKRPLIETNGETGEIVWDKGRDFATVRKVLSMPQVNIVKKTEVQTGGFSKESILPKRNSDKLIARKKDWDPKKYGGFDSPTVAYSVLVVAKVEKGKSKKLKSVKELLGITIMERSSFEKNPIDFLEAKGYKEVKKDLIIKLPKYSLFELENGRKRMLASAGELQKGNELALPSKYVNFLYLASHYEKLKGSPEDNEQKQLFVEQHKHYLDEIIEQISEFSKRVILADANLDKVLSAYNKHRDKPIREQAENIIHLFTLTNLGAPAAFKYFDTTIDRKRYTSTKEVLDATLIHQSITGLYETRIDLSQLGGDGGSGGSSGGSSGSETPGTSESATPESSGGSSGGSSGGTLNIEDEYRLHETSKEPDVSLGSTWLSDFPQAWAETGGMGLAVRQAPLIIPLKATSTPVSIKQYPMSQEARLGIKPHIQRLLDQGILVPCQSPWNTPLLPVKKPGTNDYRPVQDLREVNKRVEDIHPTVPNPYNLLSGLPPSHQWYTVLDLKDAFFCLRLHPTSQPLFAFEWRDPEMGISGQLTWTRLPQGFKNSPTLFNEALHRDLADFRIQHPDLILLQYVDDLLLAATSELDCQQGTRALLQTLGNLGYRASAKKAQICQKQVKYLGYLLKEGQRWLTEARKETVMGQPTPKTPRQLREFLGKAGFCRLFIPGFAEMAAPLYPLTKPGTLFNWGPDQQKAYQEIKQALLTAPALGLPDLTKPFELFVDEKQGYAKGVLTQKLGPWRRPVAYLSKKLDPVAAGWPPCLRMVAAIAVLTKDAGKLTMGQPLVILAPHAVEALVKQPPDRWLSNARMTHYQALLLDTDRVQFGPVVALNPATLLPLPEEGLQHNCLDILAEAHGTRPDLTDQPLPDADHTWYTDGSSLLQEGQRKAGAAVTTETEVIWAKALPAGTSAQRAELIALTQALKMAEGKKLNVYTDSRYAFATAHIHGEIYRRRGWLTSEGKEIKNKDEILALLKALFLPKRLSIIHCPGHQKGHSAEARGNRMADQAARKAAITETPDTSTLLIENSSPSGGSKRTADGSEFEAGKRTADGSEFEKRTADGSEFESPKKKAKVE

SEQ ID NO: 2893 - protein, 2116 aa, synthetic construct; identical to SEQ ID NO: 2701

SEQ ID NO: 2894 - protein, 2114 aa, synthetic construct; identical to SEQ ID NO: 2684

SEQ ID NO: 2895 - protein, 2114 aa, synthetic construct; identical to SEQ ID NO: 2622

SEQ ID NO: 2896 - protein, 2116 aa, synthetic construct; identical to SEQ ID NO: 2645

SEQ ID NO: 2897 - protein, 2116 aa, synthetic construct; identical to SEQ ID NO: 2658

SEQ ID NO: 2898 - protein, 2114 aa, synthetic construct; identical to SEQ ID NO: 2670

SEQ ID NO: 2899 - protein, 2110 aa, synthetic construct
MPAAKRVKLDGGDKKYSIGLDIGTNSVGWAVITDEYKVPSKKFKVLGNTDRHSIKKNLIGALLFDSGETAEATRLKRTARRRYTRRKNRICYLQEIFSNEMAKVDDSFFHRLEESFLVEEDKKHERHPIFGNIVDEVAYHEKYPTIYHLRKKLVDSTDKADLRLIYLALAHMIKFRGHFLIEGDLNPDNSDVDKLFIQLVQTYNQLFEENPINASGVDAKAILSARLSKSRRLENLIAQLPGEKKNGLFGNLIALSLGLTPNFKSNFDLAEDAKLQLSKDTYDDDLDNLLAQIGDQYADLFLAAKNLSDAILLSDILRVNTEITKAPLSASMIKRYDEHHQDLTLLKALVRQQLPEKYKEIFFDQSKNGYAGYIDGGASQEEFYKFIKPILEKMDGTEELLVKLNREDLLRKQRTFDNGSIPHQIHLGELHAILRRQEDFYPFLKDNREKIEKILTFRIPYYVGPLARGNSRFAWMTRKSEETITPWNFEEVVDKGASAQSFIERMTNFDKNLPNEKVLPKHSLLYEYFTVYNELTKVKYVTEGMRKPAFLSGEQKKAIVDLLFKTNRKVTVKQLKEDYFKKIECFDSVEISGVEDRFNASLGTYHDLLKIIKDKDFLDNEENEDILEDIVLTLTLFEDREMIEERLKTYAHLFDDKVMKQLKRRRYTGWGRLSRKLINGIRDKQSGKTILDFLKSDGFANRNFMQLIHDDSLTFKEDIQKAQVSGQGDSLHEHIANLAGSPAIKKGILQTVKVVDELVKVMGRHKPENIVIEMARENQTTQKGQKNSRERMKRIEEGIKELGSQILKEHPVENTQLQNEKLYLYYLQNGRDMYVDQELDINRLSDYDVDHIVPQSFLKDDSIDNKVLTRSDKARGKSDNVPSEEVVKKMKNYWRQLLNAKLITQRKFDNLTKAERGGLSELDKAGFIKRQLVETRQITKHVAQILDSRMNTKYDENDKLIREVKVITLKSKLVSDFRKDFQFYKVREINNYHHAHDAYLNAVVGTALIKKYPKLESEFVYGDYKVYDVRKMIAKSEQEIGKATAKYFFYSNIMNFFKTEITLANGEIRKRPLIETNGETGEIVWDKGRDFATVRKVLSMPQVNIVKKTEVQTGGFSKESILPKRNSDKLIARKKDWDPKKYGGFDSPTVAYSVLVVAKVEKGKSKKLKSVKELLGITIMERSSFEKNPIDFLEAKGYKEVKKDLIIKLPKYSLFELENGRKRMLASAGELQKGNELALPSKYVNFLYLASHYEKLKGSPEDNEQKQLFVEQHKHYLDEIIEQISEFSKRVILADANLDKVLSAYNKHRDKPIREQAENIIHLFTLTNLGAPAAFKYFDTTIDRKRYTSTKEVLDATLIHQSITGLYETRIDLSQLGGDGGGGGGGGGTLNIEDEYRLHETSKEPDVSLGSTWLSDFPQAWAETGGMGLAVRQAPLIIPLKATSTPVSIKQYPMSQEARLGIKPHIQRLLDQGILVPCQSPWNTPLLPVKKPGTNDYRPVQDLREVNKRVEDIHPTVPNPYNLLSGLPPSHQWYTVLDLKDAFFCLRLHPTSQPLFAFEWRDPEMGISGQLTWTRLPQGFKNSPTLFNEALHRDLADFRIQHPDLILLQYVDDLLLAATSELDCQQGTRALLQTLGNLGYRASAKKAQICQKQVKYLGYLLKEGQRWLTEARKETVMGQPTPKTPRQLREFLGKAGFCRLFIPGFAEMAAPLYPLTKPGTLFNWGPDQQKAYQEIKQALLTAPALGLPDLTKPFELFVDEKQGYAKGVLTQKLGPWRRPVAYLSKKLDPVAAGWPPCLRMVAAIAVLTKDAGKLTMGQPLVILAPHAVEALVKQPPDRWLSNARMTHYQALLLDTDRVQFGPVVALNPATLLPLPEEGLQHNCLDILAEAHGTRPDLTDQPLPDADHTWYTDGSSLLQEGQRKAGAAVTTETEVIWAKALPAGTSAQRAELIALTQALKMAEGKKLNVYTDSRYAFATAHIHGEIYRRRGWLTSEGKEIKNKDEILALLKALFLPKRLSIIHCPGHQKGHSAEARGNRMADQAARKAAITETPDTSTLLIENSSPSGGSKRTADGSEFEAGKRTADGSEFEKRTADGSEFESPKKKAKVE

SEQ ID NO: 2900 - protein, 2120 aa, synthetic construct; identical to SEQ ID NO: 2662

SEQ ID NO: 2901 - protein, 2116 aa, synthetic construct; identical to SEQ ID NO: 2629

SEQ ID NO: 2902 - protein, 2117 aa, synthetic construct; identical to SEQ ID NO: 2696

SEQ ID NO: 2903 - protein, 2114 aa, synthetic construct; identical to SEQ ID NO: 2634

SEQ ID NO: 2904 - protein, 2114 aa, synthetic construct; identical to SEQ ID NO: 2618

SEQ ID NO: 2905 - protein, 2111 aa, synthetic construct
MPAAKRVKLDGGDKKYSIGLDIGTNSVGWAVITDEYKVPSKKFKVLGNTDRHSIKKNLIGALLFDSGETAEATRLKRTARRRYTRRKNRICYLQEIFSNEMAKVDDSFFHRLEESFLVEEDKKHERHPIFGNIVDEVAYHEKYPTIYHLRKKLVDSTDKADLRLIYLALAHMIKFRGHFLIEGDLNPDNSDVDKLFIQLVQTYNQLFEENPINASGVDAKAILSARLSKSRRLENLIAQLPGEKKNGLFGNLIALSLGLTPNFKSNFDLAEDAKLQLSKDTYDDDLDNLLAQIGDQYADLFLAAKNLSDAILLSDILRVNTEITKAPLSASMIKRYDEHHQDLTLLKALVRQQLPEKYKEIFFDQSKNGYAGYIDGGASQEEFYKFIKPILEKMDGTEELLVKLNREDLLRKQRTFDNGSIPHQIHLGELHAILRRQEDFYPFLKDNREKIEKILTFRIPYYVGPLARGNSRFAWMTRKSEETITPWNFEEVVDKGASAQSFIERMTNFDKNLPNEKVLPKHSLLYEYFTVYNELTKVKYVTEGMRKPAFLSGEQKKAIVDLLFKTNRKVTVKQLKEDYFKKIECFDSVEISGVEDRFNASLGTYHDLLKIIKDKDFLDNEENEDILEDIVLTLTLFEDREMIEERLKTYAHLFDDKVMKQLKRRRYTGWGRLSRKLINGIRDKQSGKTILDFLKSDGFANRNFMQLIHDDSLTFKEDIQKAQVSGQGDSLHEHIANLAGSPAIKKGILQTVKVVDELVKVMGRHKPENIVIEMARENQTTQKGQKNSRERMKRIEEGIKELGSQILKEHPVENTQLQNEKLYLYYLQNGRDMYVDQELDINRLSDYDVDHIVPQSFLKDDSIDNKVLTRSDKARGKSDNVPSEEVVKKMKNYWRQLLNAKLITQRKFDNLTKAERGGLSELDKAGFIKRQLVETRQITKHVAQILDSRMNTKYDENDKLIREVKVITLKSKLVSDFRKDFQFYKVREINNYHHAHDAYLNAVVGTALIKKYPKLESEFVYGDYKVYDVRKMIAKSEQEIGKATAKYFFYSNIMNFFKTEITLANGEIRKRPLIETNGETGEIVWDKGRDFATVRKVLSMPQVNIVKKTEVQTGGFSKESILPKRNSDKLIARKKDWDPKKYGGFDSPTVAYSVLVVAKVEKGKSKKLKSVKELLGITIMERSSFEKNPIDFLEAKGYKEVKKDLIIKLPKYSLFELENGRKRMLASAGELQKGNELALPSKYVNFLYLASHYEKLKGSPEDNEQKQLFVEQHKHYLDEIIEQISEFSKRVILADANLDKVLSAYNKHRDKPIREQAENIIHLFTLTNLGAPAAFKYFDTTIDRKRYTSTKEVLDATLIHQSITGLYETRIDLSQLGGDGGGSSGSSGGTLNIEDEYRLHETSKEPDVSLGSTWLSDFPQAWAETGGMGLAVRQAPLIIPLKATSTPVSIKQYPMSQEARLGIKPHIQRLLDQGILVPCQSPWNTPLLPVKKPGTNDYRPVQDLREVNKRVEDIHPTVPNPYNLLSGLPPSHQWYTVLDLKDAFFCLRLHPTSQPLFAFEWRDPEMGISGQLTWTRLPQGFKNSPTLFNEALHRDLADFRIQHPDLILLQYVDDLLLAATSELDCQQGTRALLQTLGNLGYRASAKKAQICQKQVKYLGYLLKEGQRWLTEARKETVMGQPTPKTPRQLREFLGKAGFCRLFIPGFAEMAAPLYPLTKPGTLFNWGPDQQKAYQEIKQALLTAPALGLPDLTKPFELFVDEKQGYAKGVLTQKLGPWRRPVAYLSKKLDPVAAGWPPCLRMVAAIAVLTKDAGKLTMGQPLVILAPHAVEALVKQPPDRWLSNARMTHYQALLLDTDRVQFGPVVALNPATLLPLPEEGLQHNCLDILAEAHGTRPDLTDQPLPDADHTWYTDGSSLLQEGQRKAGAAVTTETEVIWAKALPAGTSAQRAELIALTQALKMAEGKKLNVYTDSRYAFATAHIHGEIYRRRGWLTSEGKEIKNKDEILALLKALFLPKRLSIIHCPGHQKGHSAEARGNRMADQAARKAAITETPDTSTLLIENSSPSGGSKRTADGSEFEAGKRTADGSEFEKRTADGSEFESPKKKAKVE

SEQ ID NO: 2906 - protein, 2111 aa, synthetic construct; identical to SEQ ID NO: 2643

SEQ ID NO: 2907 - protein, 2121 aa, synthetic construct; identical to SEQ ID NO: 2663

SEQ ID NO: 2908 - protein, 2113 aa, synthetic construct; identical to SEQ ID NO: 2626

SEQ ID NO: 2909 - protein, 2115 aa, synthetic construct; identical to SEQ ID NO: 2639

SEQ ID NO: 2910 - protein, 2111 aa, synthetic construct; identical to SEQ ID NO: 2671

SEQ ID NO: 2911 - protein, 2111 aa, synthetic construct; identical to SEQ ID NO: 2672

SEQ ID NO: 2912 - protein, 2116 aa, synthetic construct; identical to SEQ ID NO: 2703

SEQ ID NO: 2913 - protein, 2116 aa, synthetic construct; identical to SEQ ID NO: 2660

SEQ ID NO: 2914 - protein, 2111 aa, synthetic construct
MPAAKRVKLDGGDKKYSIGLDIGTNSVGWAVITDEYKVPSKKFKVLGNTDRHSIKKNLIGALLFDSGETAEATRLKRTARRRYTRRKNRICYLQEIFSNEMAKVDDSFFHRLEESFLVEEDKKHERHPIFGNIVDEVAYHEKYPTIYHLRKKLVDSTDKADLRLIYLALAHMIKFRGHFLIEGDLNPDNSDVDKLFIQLVQTYNQLFEENPINASGVDAKAILSARLSKSRRLENLIAQLPGEKKNGLFGNLIALSLGLTPNFKSNFDLAEDAKLQLSKDTYDDDLDNLLAQIGDQYADLFLAAKNLSDAILLSDILRVNTEITKAPLSASMIKRYDEHHQDLTLLKALVRQQLPEKYKEIFFDQSKNGYAGYIDGGASQEEFYKFIKPILEKMDGTEELLVKLNREDLLRKQRTFDNGSIPHQIHLGELHAILRRQEDFYPFLKDNREKIEKILTFRIPYYVGPLARGNSRFAWMTRKSEETITPWNFEEVVDKGASAQSFIERMTNFDKNLPNEKVLPKHSLLYEYFTVYNELTKVKYVTEGMRKPAFLSGEQKKAIVDLLFKTNRKVTVKQLKEDYFKKIECFDSVEISGVEDRFNASLGTYHDLLKIIKDKDFLDNEENEDILEDIVLTLTLFEDREMIEERLKTYAHLFDDKVMKQLKRRRYTGWGRLSRKLINGIRDKQSGKTILDFLKSDGFANRNFMQLIHDDSLTFKEDIQKAQVSGQGDSLHEHIANLAGSPAIKKGILQTVKVVDELVKVMGRHKPENIVIEMARENQTTQKGQKNSRERMKRIEEGIKELGSQILKEHPVENTQLQNEKLYLYYLQNGRDMYVDQELDINRLSDYDVDHIVPQSFLKDDSIDNKVLTRSDKARGKSDNVPSEEVVKKMKNYWRQLLNAKLITQRKFDNLTKAERGGLSELDKAGFIKRQLVETRQITKHVAQILDSRMNTKYDENDKLIREVKVITLKSKLVSDFRKDFQFYKVREINNYHHAHDAYLNAVVGTALIKKYPKLESEFVYGDYKVYDVRKMIAKSEQEIGKATAKYFFYSNIMNFFKTEITLANGEIRKRPLIETNGETGEIVWDKGRDFATVRKVLSMPQVNIVKKTEVQTGGFSKESILPKRNSDKLIARKKDWDPKKYGGFDSPTVAYSVLVVAKVEKGKSKKLKSVKELLGITIMERSSFEKNPIDFLEAKGYKEVKKDLIIKLPKYSLFELENGRKRMLASAGELQKGNELALPSKYVNFLYLASHYEKLKGSPEDNEQKQLFVEQHKHYLDEIIEQISEFSKRVILADANLDKVLSAYNKHRDKPIREQAENIIHLFTLTNLGAPAAFKYFDTTIDRKRYTSTKEVLDATLIHQSITGLYETRIDLSQLGGDGGGGSGSSGGTLNIEDEYRLHETSKEPDVSLGSTWLSDFPQAWAETGGMGLAVRQAPLIIPLKATSTPVSIKQYPMSQEARLGIKPHIQRLLDQGILVPCQSPWNTPLLPVKKPGTNDYRPVQDLREVNKRVEDIHPTVPNPYNLLSGLPPSHQWYTVLDLKDAFFCLRLHPTSQPLFAFEWRDPEMGISGQLTWTRLPQGFKNSPTLFNEALHRDLADFRIQHPDLILLQYVDDLLLAATSELDCQQGTRALLQTLGNLGYRASAKKAQICQKQVKYLGYLLKEGQRWLTEARKETVMGQPTPKTPRQLREFLGKAGFCRLFIPGFAEMAAPLYPLTKPGTLFNWGPDQQKAYQEIKQALLTAPALGLPDLTKPFELFVDEKQGYAKGVLTQKLGPWRRPVAYLSKKLDPVAAGWPPCLRMVAAIAVLTKDAGKLTMGQPLVILAPHAVEALVKQPPDRWLSNARMTHYQALLLDTDRVQFGPVVALNPATLLPLPEEGLQHNCLDILAEAHGTRPDLTDQPLPDADHTWYTDGSSLLQEGQRKAGAAVTTETEVIWAKALPAGTSAQRAELIALTQALKMAEGKKLNVYTDSRYAFATAHIHGEIYRRRGWLTSEGKEIKNKDEILALLKALFLPKRLSIIHCPGHQKGHSAEARGNRMADQAARKAAITETPDTSTLLIENSSPSGGSKRTADGSEFEAGKRTADGSEFEKRTADGSEFESPKKKAKVE

SEQ ID NO: 2915 - protein, 2116 aa, synthetic construct; identical to SEQ ID NO: 2668

SEQ ID NO: 2916 - protein, 2113 aa, synthetic construct
MPAAKRVKLDGGDKKYSIGLDIGTNSVGWAVITDEYKVPSKKFKVLGNTDRHSIKKNLIGALLFDSGETAEATRLKRTARRRYTRRKNRICYLQEIFSNEMAKVDDSFFHRLEESFLVEEDKKHERHPIFGNIVDEVAYHEKYPTIYHLRKKLVDSTDKADLRLIYLALAHMIKFRGHFLIEGDLNPDNSDVDKLFIQLVQTYNQLFEENPINASGVDAKAILSARLSKSRRLENLIAQLPGEKKNGLFGNLIALSLGLTPNFKSNFDLAEDAKLQLSKDTYDDDLDNLLAQIGDQYADLFLAAKNLSDAILLSDILRVNTEITKAPLSASMIKRYDEHHQDLTLLKALVRQQLPEKYKEIFFDQSKNGYAGYIDGGASQEEFYKFIKPILEKMDGTEELLVKLNREDLLRKQRTFDNGSIPHQIHLGELHAILRRQEDFYPFLKDNREKIEKILTFRIPYYVGPLARGNSRFAWMTRKSEETITPWNFEEVVDKGASAQSFIERMTNFDKNLPNEKVLPKHSLLYEYFTVYNELTKVKYVTEGMRKPAFLSGEQKKAIVDLLFKTNRKVTVKQLKEDYFKKIECFDSVEISGVEDRFNASLGTYHDLLKIIKDKDFLDNEENEDILEDIVLTLTLFEDREMIEERLKTYAHLFDDKVMKQLKRRRYTGWGRLSRKLINGIRDKQSGKTILDFLKSDGFANRNFMQLIHDDSLTFKEDIQKAQVSGQGDSLHEHIANLAGSPAIKKGILQTVKVVDELVKVMGRHKPENIVIEMARENQTTQKGQKNSRERMKRIEEGIKELGSQILKEHPVENTQLQNEKLYLYYLQNGRDMYVDQELDINRLSDYDVDHIVPQSFLKDDSIDNKVLTRSDKARGKSDNVPSEEVVKKMKNYWRQLLNAKLITQRKFDNLTKAERGGLSELDKAGFIKRQLVETRQITKHVAQILDSRMNTKYDENDKLIREVKVITLKSKLVSDFRKDFQFYKVREINNYHHAHDAYLNAVVGTALIKKYPKLESEFVYGDYKVYDVRKMIAKSEQEIGKATAKYFFYSNIMNFFKTEITLANGEIRKRPLIETNGETGEIVWDKGRDFATVRKVLSMPQVNIVKKTEVQTGGFSKESILPKRNSDKLIARKKDWDPKKYGGFDSPTVAYSVLVVAKVEKGKSKKLKSVKELLGITIMERSSFEKNPIDFLEAKGYKEVKKDLIIKLPKYSLFELENGRKRMLASAGELQKGNELALPSKYVNFLYLASHYEKLKGSPEDNEQKQLFVEQHKHYLDEIIEQISEFSKRVILADANLDKVLSAYNKHRDKPIREQAENIIHLFTLTNLGAPAAFKYFDTTIDRKRYTSTKEVLDATLIHQSITGLYETRIDLSQLGGDGGGSSEAAAKGGTLNIEDEYRLHETSKEPDVSLGSTWLSDFPQAWAETGGMGLAVRQAPLIIPLKATSTPVSIKQYPMSQEARLGIKPHIQRLLDQGILVPCQSPWNTPLLPVKKPGTNDYRPVQDLREVNKRVEDIHPTVPNPYNLLSGLPPSHQWYTVLDLKDAFFCLRLHPTSQPLFAFEWRDPEMGISGQLTWTRLPQGFKNSPTLFNEALHRDLADFRIQHPDLILLQYVDDLLLAATSELDCQQGTRALLQTLGNLGYRASAKKAQICQKQVKYLGYLLKEGQRWLTEARKETVMGQPTPKTPRQLREFLGKAGFCRLFIPGFAEMAAPLYPLTKPGTLFNWGPDQQKAYQEIKQALLTAPALGLPDLTKPFELFVDEKQGYAKGVLTQKLGPWRRPVAYLSKKLDPVAAGWPPCLRMVAAIAVLTKDAGKLTMGQPLVILAPHAVEALVKQPPDRWLSNARMTHYQALLLDTDRVQFGPVVALNPATLLPLPEEGLQHNCLDILAEAHGTRPDLTDQPLPDADHTWYTDGSSLLQEGQRKAGAAVTTETEVIWAKALPAGTSAQRAELIALTQALKMAEGKKLNVYTDSRYAFATAHIHGEIYRRRGWLTSEGKEIKNKDEILALLKALFLPKRLSIIHCPGHQKGHSAEARGNRMADQAARKAAITETPDTSTLLIENSSPSGGSKRTADGSEFEAGKRTADGSEFEKRTADGSEFESPKKKAKVE

SEQ ID NO: 2917 - protein, 2123 aa, synthetic construct
MPAAKRVKLDGGDKKYSIGLDIGTNSVGWAVITDEYKVPSKKFKVLGNTDRHSIKKNLIGALLFDSGETAEATRLKRTARRRYTRRKNRICYLQEIFSNEMAKVDDSFFHRLEESFLVEEDKKHERHPIFGNIVDEVAYHEKYPTIYHLRKKLVDSTDKADLRLIYLALAHMIKFRGHFLIEGDLNPDNSDVDKLFIQLVQTYNQLFEENPINASGVDAKAILSARLSKSRRLENLIAQLPGEKKNGLFGNLIALSLGLTPNFKSNFDLAEDAKLQLSKDTYDDDLDNLLAQIGDQYADLFLAAKNLSDAILLSDILRVNTEITKAPLSASMIKRYDEHHQDLTLLKALVRQQLPEKYKEIFFDQSKNGYAGYIDGGASQEEFYKFIKPILEKMDGTEELLVKLNREDLLRKQRTFDNGSIPHQIHLGELHAILRRQEDFYPFLKDNREKIEKILTFRIPYYVGPLARGNSRFAWMTRKSEETITPWNFEEVVDKGASAQSFIERMTNFDKNLPNEKVLPKHSLLYEYFTVYNELTKVKYVTEGMRKPAFLSGEQKKAIVDLLFKTNRKVTVKQLKEDYFKKIECFDSVEISGVEDRFNASLGTYHDLLKIIKDKDFLDNEENEDILEDIVLTLTLFEDREMIEERLKTYAHLFDDKVMKQLKRRRYTGWGRLSRKLINGIRDKQSGKTILDFLKSDGFANRNFMQLIHDDSLTFKEDIQKAQVSGQGDSLHEHIANLAGSPAIKKGILQTVKVVDELVKVMGRHKPENIVIEMARENQTTQKGQKNSRERMKRIEEGIKELGSQILKEHPVENTQLQNEKLYLYYLQNGRDMYVDQELDINRLSDYDVDHIVPQSFLKDDSIDNKVLTRSDKARGKSDNVPSEEVVKKMKNYWRQLLNAKLITQRKFDNLTKAERGGLSELDKAGFIKRQLVETRQITKHVAQILDSRMNTKYDENDKLIREVKVITLKSKLVSDFRKDFQFYKVREINNYHHAHDAYLNAVVGTALIKKYPKLESEFVYGDYKVYDVRKMIAKSEQEIGKATAKYFFYSNIMNFFKTEITLANGEIRKRPLIETNGETGEIVWDKGRDFATVRKVLSMPQVNIVKKTEVQTGGFSKESILPKRNSDKLIARKKDWDPKKYGGFDSPTVAYSVLVVAKVEKGKSKKLKSVKELLGITIMERSSFEKNPIDFLEAKGYKEVKKDLIIKLPKYSLFELENGRKRMLASAGELQKGNELALPSKYVNFLYLASHYEKLKGSPEDNEQKQLFVEQHKHYLDEIIEQISEFSKRVILADANLDKVLSAYNKHRDKPIREQAENIIHLFTLTNLGAPAAFKYFDTTIDRKRYTSTKEVLDATLIHQSITGLYETRIDLSQLGGDGGGGSGGSGGSGGSGGSGGSGGTLNIEDEYRLHETSKEPDVSLGSTWLSDFPQAWAETGGMGLAVRQAPLIIPLKATSTPVSIKQYPMSQEARLGIKPHIQRLLDQGILVPCQSPWNTPLLPVKKPGTNDYRPVQDLREVNKRVEDIHPTVPNPYNLLSGLPPSHQWYTVLDLKDAFFCLRLHPTSQPLFAFEWRDPEMGISGQLTWTRLPQGFKNSPTLFNEALHRDLADFRIQHPDLILLQYVDDLLLAATSELDCQQGTRALLQTLGNLGYRASAKKAQICQKQVKYLGYLLKEGQRWLTEARKETVMGQPTPKTPRQLREFLGKAGFCRLFIPGFAEMAAPLYPLTKPGTLFNWGPDQQKAYQEIKQALLTAPALGLPDLTKPFELFVDEKQGYAKGVLTQKLGPWRRPVAYLSKKLDPVAAGWPPCLRMVAAIAVLTKDAGKLTMGQPLVILAPHAVEALVKQPPDRWLSNARMTHYQALLLDTDRVQFGPVVALNPATLLPLPEEGLQHNCLDILAEAHGTRPDLTDQPLPDADHTWYTDGSSLLQEGQRKAGAAVTTETEVIWAKALPAGTSAQRAELIALTQALKMAEGKKLNVYTDSRYAFATAHIHGEIYRRRGWLTSEGKEIKNKDEILALLKALFLPKRLSIIHCPGHQKGHSAEARGNRMADQAARKAAITETPDTSTLLIENSSPSGGSKRTADGSEFEAGKRTADGSEFEKRTADGSEFESPKKKAKVE

SEQ ID NO: 2918 - protein, 2114 aa, synthetic construct
MPAAKRVKLDGGDKKYSIGLDIGTNSVGWAVITDEYKVPSKKFKVLGNTDRHSIKKNLIGALLFDSGETAEATRLKRTARRRYTRRKNRICYLQEIFSNEMAKVDDSFFHRLEESFLVEEDKKHERHPIFGNIVDEVAYHEKYPTIYHLRKKLVDSTDKADLRLIYLALAHMIKFRGHFLIEGDLNPDNSDVDKLFIQLVQTYNQLFEENPINASGVDAKAILSARLSKSRRLENLIAQLPGEKKNGLFGNLIALSLGLTPNFKSNFDLAEDAKLQLSKDTYDDDLDNLLAQIGDQYADLFLAAKNLSDAILLSDILRVNTEITKAPLSASMIKRYDEHHQDLTLLKALVRQQLPEKYKEIFFDQSKNGYAGYIDGGASQEEFYKFIKPILEKMDGTEELLVKLNREDLLRKQRTFDNGSIPHQIHLGELHAILRRQEDFYPFLKDNREKIEKILTFRIPYYVGPLARGNSRFAWMTRKSEETITPWNFEEVVDKGASAQSFIERMTNFDKNLPNEKVLPKHSLLYEYFTVYNELTKVKYVTEGMRKPAFLSGEQKKAIVDLLFKTNRKVTVKQLKEDYFKKIECFDSVEISGVEDRFNASLGTYHDLLKIIKDKDFLDNEENEDILEDIVLTLTLFEDREMIEERLKTYAHLFDDKVMKQLKRRRYTGWGRLSRKLINGIRDKQSGKTILDFLKSDGFANRNFMQLIHDDSLTFKEDIQKAQVSGQGDSLHEHIANLAGSPAIKKGILQTVKVVDELVKVMGRHKPENIVIEMARENQTTQKGQKNSRERMKRIEEGIKELGSQILKEHPVENTQLQNEKLYLYYLQNGRDMYVDQELDINRLSDYDVDHIVPQSFLKDDSIDNKVLTRSDKARGKSDNVPSEEVVKKMKNYWRQLLNAKLITQRKFDNLTKAERGGLSELDKAGFIKRQLVETRQITKHVAQILDSRMNTKYDENDKLIREVKVITLKSKLVSDFRKDFQFYKVREINNYHHAHDAYLNAVVGTALIKKYPKLESEFVYGDYKVYDVRKMIAKSEQEIGKATAKYFFYSNIMNFFKTEITLANGEIRKRPLIETNGETGEIVWDKGRDFATVRKVLSMPQVNIVKKTEVQTGGFSKESILPKRNSDKLIARKKDWDPKKYGGFDSPTVAYSVLVVAKVEKGKSKKLKSVKELLGITIMERSSFEKNPIDFLEAKGYKEVKKDLIIKLPKYSLFELENGRKRMLASAGELQKGNELALPSKYVNFLYLASHYEKLKGSPEDNEQKQLFVEQHKHYLDEIIEQISEFSKRVILADANLDKVLSAYNKHRDKPIREQAENIIHLFTLTNLGAPAAFKYFDTTIDRKRYTSTKEVLDATLIHQSITGLYETRIDLSQLGGDGGGGGGGSPAPGGTLNIEDEYRLHETSKEPDVSLGSTWLSDFPQAWAETGGMGLAVRQAPLIIPLKATSTPVSIKQYPMSQEARLGIKPHIQRLLDQGILVPCQSPWNTPLLPVKKPGTNDYRPVQDLREVNKRVEDIHPTVPNPYNLLSGLPPSHQWYTVLDLKDAFFCLRLHPTSQPLFAFEWRDPEMGISGQLTWTRLPQGFKNSPTLFNEALHRDLADFRIQHPDLILLQYVDDLLLAATSELDCQQGTRALLQTLGNLGYRASAKKAQICQKQVKYLGYLLKEGQRWLTEARKETVMGQPTPKTPRQLREFLGKAGFCRLFIPGFAEMAAPLYPLTKPGTLFNWGPDQQKAYQEIKQALLTAPALGLPDLTKPFELFVDEKQGYAKGVLTQKLGPWRRPVAYLSKKLDPVAAGWPPCLRMVAAIAVLTKDAGKLTMGQPLVILAPHAVEALVKQPPDRWLSNARMTHYQALLLDTDRVQFGPVVALNPATLLPLPEEGLQHNCLDILAEAHGTRPDLTDQPLPDADHTWYTDGSSLLQEGQRKAGAAVTTETEVIWAKALPAGTSAQRAELIALTQALKMAEGKKLNVYTDSRYAFATAHIHGEIYRRRGWLTSEGKEIKNKDEILALLKALFLPKRLSIIHCPGHQKGHSAEARGNRMADQAARKAAITETPDTSTLLIENSSPSGGSKRTADGSEFEAGKRTADGSEFEKRTADGSEFESPKKKAKVE

SEQ ID NO: 2919 - protein, 2116 aa, synthetic construct; identical to SEQ ID NO: 2690

SEQ ID NO: 2920 - protein, 2116 aa, synthetic construct; identical to SEQ ID NO: 2648

SEQ ID NO: 2921 - protein, 2114 aa, synthetic construct; identical to SEQ ID NO: 2616

SEQ ID NO: 2922 - protein, 2116 aa, synthetic construct; identical to SEQ ID NO: 2666

SEQ ID NO: 2923 - protein, 2111 aa, synthetic construct
MPAAKRVKLDGGDKKYSIGLDIGTNSVGWAVITDEYKVPSKKFKVLGNTDRHSIKKNLIGALLFDSGETAEATRLKRTARRRYTRRKNRICYLQEIFSNEMAKVDDSFFHRLEESFLVEEDKKHERHPIFGNIVDEVAYHEKYPTIYHLRKKLVDSTDKADLRLIYLALAHMIKFRGHFLIEGDLNPDNSDVDKLFIQLVQTYNQLFEENPINASGVDAKAILSARLSKSRRLENLIAQLPGEKKNGLFGNLIALSLGLTPNFKSNFDLAEDAKLQLSKDTYDDDLDNLLAQIGDQYADLFLAAKNLSDAILLSDILRVNTEITKAPLSASMIKRYDEHHQDLTLLKALVRQQLPEKYKEIFFDQSKNGYAGYIDGGASQEEFYKFIKPILEKMDGTEELLVKLNREDLLRKQRTFDNGSIPHQIHLGELHAILRRQEDFYPFLKDNREKIEKILTFRIPYYVGPLARGNSRFAWMTRKSEETITPWNFEEVVDKGASAQSFIERMTNFDKNLPNEKVLPKHSLLYEYFTVYNELTKVKYVTEGMRKPAFLSGEQKKAIVDLLFKTNRKVTVKQLKEDYFKKIECFDSVEISGVEDRFNASLGTYHDLLKIIKDKDFLDNEENEDILEDIVLTLTLFEDREMIEERLKTYAHLFDDKVMKQLKRRRYTGWGRLSRKLINGIRDKQSGKTILDFLKSDGFANRNFMQLIHDDSLTFKEDIQKAQVSGQGDSLHEHIANLAGSPAIKKGILQTVKVVDELVKVMGRHKPENIVIEMARENQTTQKGQKNSRERMKRIEEGIKELGSQILKEHPVENTQLQNEKLYLYYLQNGRDMYVDQELDINRLSDYDVDHIVPQSFLKDDSIDNKVLTRSDKARGKSDNVPSEEVVKKMKNYWRQLLNAKLITQRKFDNLTKAERGGLSELDKAGFIKRQLVETRQITKHVAQILDSRMNTKYDENDKLIREVKVITLKSKLVSDFRKDFQFYKVREINNYHHAHDAYLNAVVGTALIKKYPKLESEFVYGDYKVYDVRKMIAKSEQEIGKATAKYFFYSNIMNFFKTEITLANGEIRKRPLIETNGETGEIVWDKGRDFATVRKVLSMPQVNIVKKTEVQTGGFSKESILPKRNSDKLIARKKDWDPKKYGGFDSPTVAYSVLVVAKVEKGKSKKLKSVKELLGITIMERSSFEKNPIDFLEAKGYKEVKKDLIIKLPKYSLFELENGRKRMLASAGELQKGNELALPSKYVNFLYLASHYEKLKGSPEDNEQKQLFVEQHKHYLDEIIEQISEFSKRVILADANLDKVLSAYNKHRDKPIREQAENIIHLFTLTNLGAPAAFKYFDTTIDRKRYTSTKEVLDATLIHQSITGLYETRIDLSQLGGDGGPAPGGGGGTLNIEDEYRLHETSKEPDVSLGSTWLSDFPQAWAETGGMGLAVRQAPLIIPLKATSTPVSIKQYPMSQEARLGIKPHIQRLLDQGILVPCQSPWNTPLLPVKKPGTNDYRPVQDLREVNKRVEDIHPTVPNPYNLLSGLPPSHQWYTVLDLKDAFFCLRLHPTSQPLFAFEWRDPEMGISGQLTWTRLPQGFKNSPTLFNEALHRDLADFRIQHPDLILLQYVDDLLLAATSELDCQQGTRALLQTLGNLGYRASAKKAQICQKQVKYLGYLLKEGQRWLTEARKETVMGQPTPKTPRQLREFLGKAGFCRLFIPGFAEMAAPLYPLTKPGTLFNWGPDQQKAYQEIKQALLTAPALGLPDLTKPFELFVDEKQGYAKGVLTQKLGPWRRPVAYLSKKLDPVAAGWPPCLRMVAAIAVLTKDAGKLTMGQPLVILAPHAVEALVKQPPDRWLSNARMTHYQALLLDTDRVQFGPVVALNPATLLPLPEEGLQHNCLDILAEAHGTRPDLTDQPLPDADHTWYTDGSSLLQEGQRKAGAAVTTETEVIWAKALPAGTSAQRAELIALTQALKMAEGKKLNVYTDSRYAFATAHIHGEIYRRRGWLTSEGKEIKNKDEILALLKALFLPKRLSIIHCPGHQKGHSAEARGNRMADQAARKAAITETPDTSTLLIENSSPSGGSKRTADGSEFEAGKRTADGSEFEKRTADGSEFESPKKKAKVE

SEQ ID NO: 2924 - protein, 2116 aa, synthetic construct
MPAAKRVKLDGGDKKYSIGLDIGTNSVGWAVITDEYKVPSKKFKVLGNTDRHSIKKNLIGALLFDSGETAEATRLKRTARRRYTRRKNRICYLQEIFSNEMAKVDDSFFHRLEESFLVEEDKKHERHPIFGNIVDEVAYHEKYPTIYHLRKKLVDSTDKADLRLIYLALAHMIKFRGHFLIEGDLNPDNSDVDKLFIQLVQTYNQLFEENPINASGVDAKAILSARLSKSRRLENLIAQLPGEKKNGLFGNLIALSLGLTPNFKSNFDLAEDAKLQLSKDTYDDDLDNLLAQIGDQYADLFLAAKNLSDAILLSDILRVNTEITKAPLSASMIKRYDEHHQDLTLLKALVRQQLPEKYKEIFFDQSKNGYAGYIDGGASQEEFYKFIKPILEKMDGTEELLVKLNREDLLRKQRTFDNGSIPHQIHLGELHAILRRQEDFYPFLKDNREKIEKILTFRIPYYVGPLARGNSRFAWMTRKSEETITPWNFEEVVDKGASAQSFIERMTNFDKNLPNEKVLPKHSLLYEYFTVYNELTKVKYVTEGMRKPAFLSGEQKKAIVDLLFKTNRKVTVKQLKEDYFKKIECFDSVEISGVEDRFNASLGTYHDLLKIIKDKDFLDNEENEDILEDIVLTLTLFEDREMIEERLKTYAHLFDDKVMKQLKRRRYTGWGRLSRKLINGIRDKQSGKTILDFLKSDGFANRNFMQLIHDDSLTFKEDIQKAQVSGQGDSLHEHIANLAGSPAIKKGILQTVKVVDELVKVMGRHKPENIVIEMARENQTTQKGQKNSRERMKRIEEGIKELGSQILKEHPVENTQLQNEKLYLYYLQNGRDMYVDQELDINRLSDYDVDHIVPQSFLKDDSIDNKVLTRSDKARGKSDNVPSEEVVKKMKNYWRQLLNAKLITQRKFDNLTKAERGGLSELDKAGFIKRQLVETRQITKHVAQILDSRMNTKYDENDKLIREVKVITLKSKLVSDFRKDFQFYKVREINNYHHAHDAYLNAVVGTALIKKYPKLESEFVYGDYKVYDVRKMIAKSEQEIGKATAKYFFYSNIMNFFKTEITLANGEIRKRPLIETNGETGEIVWDKGRDFATVRKVLSMPQVNIVKKTEVQTGGFSKESILPKRNSDKLIARKKDWDPKKYGGFDSPTVAYSVLVVAKVEKGKSKKLKSVKELLGITIMERSSFEKNPIDFLEAKGYKEVKKDLIIKLPKYSLFELENGRKRMLASAGELQKGNELALPSKYVNFLYLASHYEKLKGSPEDNEQKQLFVEQHKHYLDEIIEQISEFSKRVILADANLDKVLSAYNKHRDKPIREQAENIIHLFTLTNLGAPAAFKYFDTTIDRKRYTSTKEVLDATLIHQSITGLYETRIDLSQLGGDGGPAPEAAAKGGSGGTLNIEDEYRLHETSKEPDVSLGSTWLSDFPQAWAETGGMGLAVRQAPLIIPLKATSTPVSIKQYPMSQEARLGIKPHIQRLLDQGILVPCQSPWNTPLLPVKKPGTNDYRPVQDLREVNKRVEDIHPTVPNPYNLLSGLPPSHQWYTVLDLKDAFFCLRLHPTSQPLFAFEWRDPEMGISGQLTWTRLPQGFKNSPTLFNEALHRDLADFRIQHPDLILLQYVDDLLLAATSELDCQQGTRALLQTLGNLGYRASAKKAQICQKQVKYLGYLLKEGQRWLTEARKETVMGQPTPKTPRQLREFLGKAGFCRLFIPGFAEMAAPLYPLTKPGTLFNWGPDQQKAYQEIKQALLTAPALGLPDLTKPFELFVDEKQGYAKGVLTQKLGPWRRPVAYLSKKLDPVAAGWPPCLRMVAAIAVLTKDAGKLTMGQPLVILAPHAVEALVKQPPDRWLSNARMTHYQALLLDTDRVQFGPVVALNPATLLPLPEEGLQHNCLDILAEAHGTRPDLTDQPLPDADHTWYTDGSSLLQEGQRKAGAAVTTETEVIWAKALPAGTSAQRAELIALTQALKMAEGKKLNVYTDSRYAFATAHIHGEIYRRRGWLTSEGKEIKNKDEILALLKALFLPKRLSIIHCPGHQKGHSAEARGNRMADQAARKAAITETPDTSTLLIENSSPSGGSKRTADGSEFEAGKRTADGSEFEKRTADGSEFESPKKKAKVE

SEQ ID NO: 2925 - protein, 2116 aa, synthetic construct; identical to SEQ ID NO: 2628

SEQ ID NO: 2926 - protein, 2116 aa, synthetic construct; identical to SEQ ID NO: 2640

SEQ ID NO: 2927 - protein, 2109 aa, synthetic construct
MPAAKRVKLDGGDKKYSIGLDIGTNSVGWAVITDEYKVPSKKFKVLGNTDRHSIKKNLIGALLFDSGETAEATRLKRTARRRYTRRKNRICYLQEIFSNEMAKVDDSFFHRLEESFLVEEDKKHERHPIFGNIVDEVAYHEKYPTIYHLRKKLVDSTDKADLRLIYLALAHMIKFRGHFLIEGDLNPDNSDVDKLFIQLVQTYNQLFEENPINASGVDAKAILSARLSKSRRLENLIAQLPGEKKNGLFGNLIALSLGLTPNFKSNFDLAEDAKLQLSKDTYDDDLDNLLAQIGDQYADLFLAAKNLSDAILLSDILRVNTEITKAPLSASMIKRYDEHHQDLTLLKALVRQQLPEKYKEIFFDQSKNGYAGYIDGGASQEEFYKFIKPILEKMDGTEELLVKLNREDLLRKQRTFDNGSIPHQIHLGELHAILRRQEDFYPFLKDNREKIEKILTFRIPYYVGPLARGNSRFAWMTRKSEETITPWNFEEVVDKGASAQSFIERMTNFDKNLPNEKVLPKHSLLYEYFTVYNELTKVKYVTEGMRKPAFLSGEQKKAIVDLLFKTNRKVTVKQLKEDYFKKIECFDSVEISGVEDRFNASLGTYHDLLKIIKDKDFLDNEENEDILEDIVLTLTLFEDREMIEERLKTYAHLFDDKVMKQLKRRRYTGWGRLSRKLINGIRDKQSGKTILDFLKSDGFANRNFMQLIHDDSLTFKEDIQKAQVSGQGDSLHEHIANLAGSPAIKKGILQTVKVVDELVKVMGRHKPENIVIEMARENQTTQKGQKNSRERMKRIEEGIKELGSQILKEHPVENTQLQNEKLYLYYLQNGRDMYVDQELDINRLSDYDVDHIVPQSFLKDDSIDNKVLTRSDKARGKSDNVPSEEVVKKMKNYWRQLLNAKLITQRKFDNLTKAERGGLSELDKAGFIKRQLVETRQITKHVAQILDSRMNTKYDENDKLIREVKVITLKSKLVSDFRKDFQFYKVREINNYHHAHDAYLNAVVGTALIKKYPKLESEFVYGDYKVYDVRKMIAKSEQEIGKATAKYFFYSNIMNFFKTEITLANGEIRKRPLIETNGETGEIVWDKGRDFATVRKVLSMPQVNIVKKTEVQTGGFSKESILPKRNSDKLIARKKDWDPKKYGGFDSPTVAYSVLVVAKVEKGKSKKLKSVKELLGITIMERSSFEKNPIDFLEAKGYKEVKKDLIIKLPKYSLFELENGRKRMLASAGELQKGNELALPSKYVNFLYLASHYEKLKGSPEDNEQKQLFVEQHKHYLDEIIEQISEFSKRVILADANLDKVLSAYNKHRDKPIREQAENIIHLFTLTNLGAPAAFKYFDTTIDRKRYTSTKEVLDATLIHQSITGLYETRIDLSQLGGDGGGGGGGGTLNIEDEYRLHETSKEPDVSLGSTWLSDFPQAWAETGGMGLAVRQAPLIIPLKATSTPVSIKQYPMSQEARLGIKPHIQRLLDQGILVPCQSPWNTPLLPVKKPGTNDYRPVQDLREVNKRVEDIHPTVPNPYNLLSGLPPSHQWYTVLDLKDAFFCLRLHPTSQPLFAFEWRDPEMGISGQLTWTRLPQGFKNSPTLFNEALHRDLADFRIQHPDLILLQYVDDLLLAATSELDCQQGTRALLQTLGNLGYRASAKKAQICQKQVKYLGYLLKEGQRWLTEARKETVMGQPTPKTPRQLREFLGKAGFCRLFIPGFAEMAAPLYPLTKPGTLFNWGPDQQKAYQEIKQALLTAPALGLPDLTKPFELFVDEKQGYAKGVLTQKLGPWRRPVAYLSKKLDPVAAGWPPCLRMVAAIAVLTKDAGKLTMGQPLVILAPHAVEALVKQPPDRWLSNARMTHYQALLLDTDRVQFGPVVALNPATLLPLPEEGLQHNCLDILAEAHGTRPDLTDQPLPDADHTWYTDGSSLLQEGQRKAGAAVTTETEVIWAKALPAGTSAQRAELIALTQALKMAEGKKLNVYTDSRYAFATAHIHGEIYRRRGWLTSEGKEIKNKDEILALLKALFLPKRLSIIHCPGHQKGHSAEARGNRMADQAARKAAITETPDTSTLLIENSSPSGGSKRTADGSEFEAGKRTADGSEFEKRTADGSEFESPKKKAKVE

SEQ ID NO: 2928 - protein, 2116 aa, synthetic construct
MPAAKRVKLDGGDKKYSIGLDIGTNSVGWAVITDEYKVPSKKFKVLGNTDRHSIKKNLIGALLFDSGETAEATRLKRTARRRYTRRKNRICYLQEIFSNEMAKVDDSFFHRLEESFLVEEDKKHERHPIFGNIVDEVAYHEKYPTIYHLRKKLVDSTDKADLRLIYLALAHMIKFRGHFLIEGDLNPDNSDVDKLFIQLVQTYNQLFEENPINASGVDAKAILSARLSKSRRLENLIAQLPGEKKNGLFGNLIALSLGLTPNFKSNFDLAEDAKLQLSKDTYDDDLDNLLAQIGDQYADLFLAAKNLSDAILLSDILRVNTEITKAPLSASMIKRYDEHHQDLTLLKALVRQQLPEKYKEIFFDQSKNGYAGYIDGGASQEEFYKFIKPILEKMDGTEELLVKLNREDLLRKQRTFDNGSIPHQIHLGELHAILRRQEDFYPFLKDNREKIEKILTFRIPYYVGPLARGNSRFAWMTRKSEETITPWNFEEVVDKGASAQSFIERMTNFDKNLPNEKVLPKHSLLYEYFTVYNELTKVKYVTEGMRKPAFLSGEQKKAIVDLLFKTNRKVTVKQLKEDYFKKIECFDSVEISGVEDRFNASLGTYHDLLKIIKDKDFLDNEENEDILEDIVLTLTLFEDREMIEERLKTYAHLFDDKVMKQLKRRRYTGWGRLSRKLINGIRDKQSGKTILDFLKSDGFANRNFMQLIHDDSLTFKEDIQKAQVSGQGDSLHEHIANLAGSPAIKKGILQTVKVVDELVKVMGRHKPENIVIEMARENQTTQKGQKNSRERMKRIEEGIKELGSQILKEHPVENTQLQNEKLYLYYLQNGRDMYVDQELDINRLSDYDVDHIVPQSFLKDDSIDNKVLTRSDKARGKSDNVPSEEVVKKMKNYWRQLLNAKLITQRKFDNLTKAERGGLSELDKAGFIKRQLVETRQITKHVAQILDSRMNTKYDENDKLIREVKVITLKSKLVSDFRKDFQFYKVREINNYHHAHDAYLNAVVGTALIKKYPKLESEFVYGDYKVYDVRKMIAKSEQEIGKATAKYFFYSNIMNFFKTEITLANGEIRKRPLIETNGETGEIVWDKGRDFATVRKVLSMPQVNIVKKTEVQTGGFSKESILPKRNSDKLIARKKDWDPKKYGGFDSPTVAYSVLVVAKVEKGKSKKLKSVKELLGITIMERSSFEKNPIDFLEAKGYKEVKKDLIIKLPKYSLFELENGRKRMLASAGELQKGNELALPSKYVNFLYLASHYEKLKGSPEDNEQKQLFVEQHKHYLDEIIEQISEFSKRVILADANLDKVLSAYNKHRDKPIREQAENIIHLFTLTNLGAPAAFKYFDTTIDRKRYTSTKEVLDATLIHQSITGLYETRIDLSQLGGDGGGGGGGSEAAAKGGTLNIEDEYRLHETSKEPDVSLGSTWLSDFPQAWAETGGMGLAVRQAPLIIPLKATSTPVSIKQYPMSQEARLGIKPHIQRLLDQGILVPCQSPWNTPLLPVKKPGTNDYRPVQDLREVNKRVEDIHPTVPNPYNLLSGLPPSHQWYTVLDLKDAFFCLRLHPTSQPLFAFEWRDPEMGISGQLTWTRLPQGFKNSPTLFNEALHRDLADFRIQHPDLILLQYVDDLLLAATSELDCQQGTRALLQTLGNLGYRASAKKAQICQKQVKYLGYLLKEGQRWLTEARKETVMGQPTPKTPRQLREFLGKAGFCRLFIPGFAEMAAPLYPLTKPGTLFNWGPDQQKAYQEIKQALLTAPALGLPDLTKPFELFVDEKQGYAKGVLTQKLGPWRRPVAYLSKKLDPVAAGWPPCLRMVAAIAVLTKDAGKLTMGQPLVILAPHAVEALVKQPPDRWLSNARMTHYQALLLDTDRVQFGPVVALNPATLLPLPEEGLQHNCLDILAEAHGTRPDLTDQPLPDADHTWYTDGSSLLQEGQRKAGAAVTTETEVIWAKALPAGTSAQRAELIALTQALKMAEGKKLNVYTDSRYAFATAHIHGEIYRRRGWLTSEGKEIKNKDEILALLKALFLPKRLSIIHCPGHQKGHSAEARGNRMADQAARKAAITETPDTSTLLIENSSPSGGSKRTADGSEFEAGKRTADGSEFEKRTADGSEFESPKKKAKVE

SEQ ID NO: 2929 - protein, 2113 aa, synthetic construct; identical to SEQ ID NO: 2700

SEQ ID NO: 2930 - protein, 2114 aa, synthetic construct; identical to SEQ ID NO: 2656

SEQ ID NO: 2931 - protein, 2116 aa, synthetic construct; identical to SEQ ID NO: 2652

SEQ ID NO: 2932 - protein, 2120 aa, synthetic construct; identical to SEQ ID NO: 2623

SEQ ID NO: 2933 - protein, 2113 aa, synthetic construct; identical to SEQ ID NO: 2657

SEQ ID NO: 2934 - protein, 2111 aa, synthetic construct; identical to SEQ ID NO: 2693

SEQ ID NO: 2935 - protein, 2108 aa, synthetic construct; identical to SEQ ID NO: 2646

SEQ ID NO: 2936 - protein, 2111 aa, synthetic construct
MPAAKRVKLDGGDKKYSIGLDIGTNSVGWAVITDEYKVPSKKFKVLGNTDRHSIKKNLIGALLFDSGETAEATRLKRTARRRYTRRKNRICYLQEIFSNEMAKVDDSFFHRLEESFLVEEDKKHERHPIFGNIVDEVAYHEKYPTIYHLRKKLVDSTDKADLRLIYLALAHMIKFRGHFLIEGDLNPDNSDVDKLFIQLVQTYNQLFEENPINASGVDAKAILSARLSKSRRLENLIAQLPGEKKNGLFGNLIALSLGLTPNFKSNFDLAEDAKLQLSKDTYDDDLDNLLAQIGDQYADLFLAAKNLSDAILLSDILRVNTEITKAPLSASMIKRYDEHHQDLTLLKALVRQQLPEKYKEIFFDQSKNGYAGYIDGGASQEEFYKFIKPILEKMDGTEELLVKLNREDLLRKQRTFDNGSIPHQIHLGELHAILRRQEDFYPFLKDNREKIEKILTFRIPYYVGPLARGNSRFAWMTRKSEETITPWNFEEVVDKGASAQSFIERMTNFDKNLPNEKVLPKHSLLYEYFTVYNELTKVKYVTEGMRKPAFLSGEQKKAIVDLLFKTNRKVTVKQLKEDYFKKIECFDSVEISGVEDRFNASLGTYHDLLKIIKDKDFLDNEENEDILEDIVLTLTLFEDREMIEERLKTYAHLFDDKVMKQLKRRRYTGWGRLSRKLINGIRDKQSGKTILDFLKSDGFANRNFMQLIHDDSLTFKEDIQKAQVSGQGDSLHEHIANLAGSPAIKKGILQTVKVVDELVKVMGRHKPENIVIEMARENQTTQKGQKNSRERMKRIEEGIKELGSQILKEHPVENTQLQNEKLYLYYLQNGRDMYVDQELDINRLSDYDVDHIVPQSFLKDDSIDNKVLTRSDKARGKSDNVPSEEVVKKMKNYWRQLLNAKLITQRKFDNLTKAERGGLSELDKAGFIKRQLVETRQITKHVAQILDSRMNTKYDENDKLIREVKVITLKSKLVSDFRKDFQFYKVREINNYHHAHDAYLNAVVGTALIKKYPKLESEFVYGDYKVYDVRKMIAKSEQEIGKATAKYFFYSNIMNFFKTEITLANGEIRKRPLIETNGETGEIVWDKGRDFATVRKVLSMPQVNIVKKTEVQTGGFSKESILPKRNSDKLIARKKDWDPKKYGGFDSPTVAYSVLVVAKVEKGKSKKLKSVKELLGITIMERSSFEKNPIDFLEAKGYKEVKKDLIIKLPKYSLFELENGRKRMLASAGELQKGNELALPSKYVNFLYLASHYEKLKGSPEDNEQKQLFVEQHKHYLDEIIEQISEFSKRVILADANLDKVLSAYNKHRDKPIREQAENIIHLFTLTNLGAPAAFKYFDTTIDRKRYTSTKEVLDATLIHQSITGLYETRIDLSQLGGDGGPAPGSSGGTLNIEDEYRLHETSKEPDVSLGSTWLSDFPQAWAETGGMGLAVRQAPLIIPLKATSTPVSIKQYPMSQEARLGIKPHIQRLLDQGILVPCQSPWNTPLLPVKKPGTNDYRPVQDLREVNKRVEDIHPTVPNPYNLLSGLPPSHQWYTVLDLKDAFFCLRLHPTSQPLFAFEWRDPEMGISGQLTWTRLPQGFKNSPTLFNEALHRDLADFRIQHPDLILLQYVDDLLLAATSELDCQQGTRALLQTLGNLGYRASAKKAQICQKQVKYLGYLLKEGQRWLTEARKETVMGQPTPKTPRQLREFLGKAGFCRLFIPGFAEMAAPLYPLTKPGTLFNWGPDQQKAYQEIKQALLTAPALGLPDLTKPFELFVDEKQGYAKGVLTQKLGPWRRPVAYLSKKLDPVAAGWPPCLRMVAAIAVLTKDAGKLTMGQPLVILAPHAVEALVKQPPDRWLSNARMTHYQALLLDTDRVQFGPVVALNPATLLPLPEEGLQHNCLDILAEAHGTRPDLTDQPLPDADHTWYTDGSSLLQEGQRKAGAAVTTETEVIWAKALPAGTSAQRAELIALTQALKMAEGKKLNVYTDSRYAFATAHIHGEIYRRRGWLTSEGKEIKNKDEILALLKALFLPKRLSIIHCPGHQKGHSAEARGNRMADQAARKAAITETPDTSTLLIENSSPSGGSKRTADGSEFEAGKRTADGSEFEKRTADGSEFESPKKKAKVE

SEQ ID NO: 2937 - protein, 2120 aa, synthetic construct; identical to SEQ ID NO: 2636

SEQ ID NO: 2938 - protein, 2116 aa, synthetic construct; identical to SEQ ID NO: 2661

SEQ ID NO: 2939 - protein, 2120 aa, synthetic construct; identical to SEQ ID NO: 2680

SEQ ID NO: 2940 - protein, 2116 aa, synthetic construct
MPAAKRVKLDGGDKKYSIGLDIGTNSVGWAVITDEYKVPSKKFKVLGNTDRHSIKKNLIGALLFDSGETAEATRLKRTARRRYTRRKNRICYLQEIFSNEMAKVDDSFFHRLEESFLVEEDKKHERHPIFGNIVDEVAYHEKYPTIYHLRKKLVDSTDKADLRLIYLALAHMIKFRGHFLIEGDLNPDNSDVDKLFIQLVQTYNQLFEENPINASGVDAKAILSARLSKSRRLENLIAQLPGEKKNGLFGNLIALSLGLTPNFKSNFDLAEDAKLQLSKDTYDDDLDNLLAQIGDQYADLFLAAKNLSDAILLSDILRVNTEITKAPLSASMIKRYDEHHQDLTLLKALVRQQLPEKYKEIFFDQSKNGYAGYIDGGASQEEFYKFIKPILEKMDGTEELLVKLNREDLLRKQRTFDNGSIPHQIHLGELHAILRRQEDFYPFLKDNREKIEKILTFRIPYYVGPLARGNSRFAWMTRKSEETITPWNFEEVVDKGASAQSFIERMTNFDKNLPNEKVLPKHSLLYEYFTVYNELTKVKYVTEGMRKPAFLSGEQKKAIVDLLFKTNRKVTVKQLKEDYFKKIECFDSVEISGVEDRFNASLGTYHDLLKIIKDKDFLDNEENEDILEDIVLTLTLFEDREMIEERLKTYAHLFDDKVMKQLKRRRYTGWGRLSRKLINGIRDKQSGKTILDFLKSDGFANRNFMQLIHDDSLTFKEDIQKAQVSGQGDSLHEHIANLAGSPAIKKGILQTVKVVDELVKVMGRHKPENIVIEMARENQTTQKGQKNSRERMKRIEEGIKELGSQILKEHPVENTQLQNEKLYLYYLQNGRDMYVDQELDINRLSDYDVDHIVPQSFLKDDSIDNKVLTRSDKARGKSDNVPSEEVVKKMKNYWRQLLNAKLITQRKFDNLTKAERGGLSELDKAGFIKRQLVETRQITKHVAQILDSRMNTKYDENDKLIREVKVITLKSKLVSDFRKDFQFYKVREINNYHHAHDAYLNAVVGTALIKKYPKLESEFVYGDYKVYDVRKMIAKSEQEIGKATAKYFFYSNIMNFFKTEITLANGEIRKRPLIETNGETGEIVWDKGRDFATVRKVLSMPQVNIVKKTEVQTGGFSKESILPKRNSDKLIARKKDWDPKKYGGFDSPTVAYSVLVVAKVEKGKSKKLKSVKELLGITIMERSSFEKNPIDFLEAKGYKEVKKDLIIKLPKYSLFELENGRKRMLASAGELQKGNELALPSKYVNFLYLASHYEKLKGSPEDNEQKQLFVEQHKHYLDEIIEQISEFSKRVILADANLDKVLSAYNKHRDKPIREQAENIIHLFTLTNLGAPAAFKYFDTTIDRKRYTSTKEVLDATLIHQSITGLYETRIDLSQLGGDGGGGGPAPEAAAKGGTLNIEDEYRLHETSKEPDVSLGSTWLSDFPQAWAETGGMGLAVRQAPLIIPLKATSTPVSIKQYPMSQEARLGIKPHIQRLLDQGILVPCQSPWNTPLLPVKKPGTNDYRPVQDLREVNKRVEDIHPTVPNPYNLLSGLPPSHQWYTVLDLKDAFFCLRLHPTSQPLFAFEWRDPEMGISGQLTWTRLPQGFKNSPTLFNEALHRDLADFRIQHPDLILLQYVDDLLLAATSELDCQQGTRALLQTLGNLGYRASAKKAQICQKQVKYLGYLLKEGQRWLTEARKETVMGQPTPKTPRQLREFLGKAGFCRLFIPGFAEMAAPLYPLTKPGTLFNWGPDQQKAYQEIKQALLTAPALGLPDLTKPFELFVDEKQGYAKGVLTQKLGPWRRPVAYLSKKLDPVAAGWPPCLRMVAAIAVLTKDAGKLTMGQPLVILAPHAVEALVKQPPDRWLSNARMTHYQALLLDTDRVQFGPVVALNPATLLPLPEEGLQHNCLDILAEAHGTRPDLTDQPLPDADHTWYTDGSSLLQEGQRKAGAAVTTETEVIWAKALPAGTSAQRAELIALTQALKMAEGKKLNVYTDSRYAFATAHIHGEIYRRRGWLTSEGKEIKNKDEILALLKALFLPKRLSIIHCPGHQKGHSAEARGNRMADQAARKAAITETPDTSTLLIENSSPSGGSKRTADGSEFEAGKRTADGSEFEKRTADGSEFESPKKKAKVE

SEQ ID NO: 2941 - protein, 2120 aa, synthetic construct; identical to SEQ ID NO: 2669

SEQ ID NO: 2942 - protein, 2116 aa, synthetic construct; identical to SEQ ID NO: 2695

SEQ ID NO: 2943 - protein, 2123 aa, synthetic construct; identical to SEQ ID NO: 2612

SEQ ID NO: 2944 - protein, 2110 aa, synthetic construct; identical to SEQ ID NO: 2691

SEQ ID NO: 2945 - protein, 2113 aa, synthetic construct; identical to SEQ ID NO: 2659

SEQ ID NO: 2946 - protein, 2114 aa, synthetic construct; identical to SEQ ID NO: 2694

SEQ ID NO: 2947 - protein, 2111 aa, synthetic construct; identical to SEQ ID NO: 2682

SEQ ID NO: 2948 - protein, 2114 aa, synthetic construct; identical to SEQ ID NO: 2675

SEQ ID NO: 2949 - protein, 2116 aa, synthetic construct; identical to SEQ ID NO: 2686

SEQ ID NO: 2950 - protein, 2114 aa, synthetic construct; identical to SEQ ID NO: 2632

SEQ ID NO: 2951 - protein, 2113 aa, synthetic construct; identical to SEQ ID NO: 2625

SEQ ID NO: 2952 - protein, 2114 aa, synthetic construct; identical to SEQ ID NO: 2699

SEQ ID NO: 2953 - protein, 2113 aa, synthetic construct
MPAAKRVKLDGGDKKYSIGLDIGTNSVGWAVITDEYKVPSKKFKVLGNTDRHSIKKNLIGALLFDSGETAEATRLKRTARRRYTRRKNRICYLQEIFSNEMAKVDDSFFHRLEESFLVEEDKKHERHPIFGNIVDEVAYHEKYPTIYHLRKKLVDSTDKADLRLIYLALAHMIKFRGHFLIEGDLNPDNSDVDKLFIQLVQTYNQLFEENPINASGVDAKAILSARLSKSRRLENLIAQLPGEKKNGLFGNLIALSLGLTPNFKSNFDLAEDAKLQLSKDTYDDDLDNLLAQIGDQYADLFLAAKNLSDAILLSDILRVNTEITKAPLSASMIKRYDEHHQDLTLLKALVRQQLPEKYKEIFFDQSKNGYAGYIDGGASQEEFYKFIKPILEKMDGTEELLVKLNREDLLRKQRTFDNGSIPHQIHLGELHAILRRQEDFYPFLKDNREKIEKILTFRIPYYVGPLARGNSRFAWMTRKSEETITPWNFEEVVDKGASAQSFIERMTNFDKNLPNEKVLPKHSLLYEYFTVYNELTKVKYVTEGMRKPAFLSGEQKKAIVDLLFKTNRKVTVKQLKEDYFKKIECFDSVEISGVEDRFNASLGTYHDLLKIIKDKDFLDNEENEDILEDIVLTLTLFEDREMIEERLKTYAHLFDDKVMKQLKRRRYTGWGRLSRKLINGIRDKQSGKTILDFLKSDGFANRNFMQLIHDDSLTFKEDIQKAQVSGQGDSLHEHIANLAGSPAIKKGILQTVKVVDELVKVMGRHKPENIVIEMARENQTTQKGQKNSRERMKRIEEGIKELGSQILKEHPVENTQLQNEKLYLYYLQNGRDMYVDQELDINRLSDYDVDHIVPQSFLKDDSIDNKVLTRSDKARGKSDNVPSEEVVKKMKNYWRQLLNAKLITQRKFDNLTKAERGGLSELDKAGFIKRQLVETRQITKHVAQILDSRMNTKYDENDKLIREVKVITLKSKLVSDFRKDFQFYKVREINNYHHAHDAYLNAVVGTALIKKYPKLESEFVYGDYKVYDVRKMIAKSEQEIGKATAKYFFYSNIMNFFKTEITLANGEIRKRPLIETNGETGEIVWDKGRDFATVRKVLSMPQVNIVKKTEVQTGGFSKESILPKRNSDKLIARKKDWDPKKYGGFDSPTVAYSVLVVAKVEKGKSKKLKSVKELLGITIMERSSFEKNPIDFLEAKGYKEVKKDLIIKLPKYSLFELENGRKRMLASAGELQKGNELALPSKYVNFLYLASHYEKLKGSPEDNEQKQLFVEQHKHYLDEIIEQISEFSKRVILADANLDKVLSAYNKHRDKPIREQAENIIHLFTLTNLGAPAAFKYFDTTIDRKRYTSTKEVLDATLIHQSITGLYETRIDLSQLGGDGGGGGEAAAKGGTLNIEDEYRLHETSKEPDVSLGSTWLSDFPQAWAETGGMGLAVRQAPLIIPLKATSTPVSIKQYPMSQEARLGIKPHIQRLLDQGILVPCQSPWNTPLLPVKKPGTNDYRPVQDLREVNKRVEDIHPTVPNPYNLLSGLPPSHQWYTVLDLKDAFFCLRLHPTSQPLFAFEWRDPEMGISGQLTWTRLPQGFKNSPTLFNEALHRDLADFRIQHPDLILLQYVDDLLLAATSELDCQQGTRALLQTLGNLGYRASAKKAQICQKQVKYLGYLLKEGQRWLTEARKETVMGQPTPKTPRQLREFLGKAGFCRLFIPGFAEMAAPLYPLTKPGTLFNWGPDQQKAYQEIKQALLTAPALGLPDLTKPFELFVDEKQGYAKGVLTQKLGPWRRPVAYLSKKLDPVAAGWPPCLRMVAAIAVLTKDAGKLTMGQPLVILAPHAVEALVKQPPDRWLSNARMTHYQALLLDTDRVQFGPVVALNPATLLPLPEEGLQHNCLDILAEAHGTRPDLTDQPLPDADHTWYTDGSSLLQEGQRKAGAAVTTETEVIWAKALPAGTSAQRAELIALTQALKMAEGKKLNVYTDSRYAFATAHIHGEIYRRRGWLTSEGKEIKNKDEILALLKALFLPKRLSIIHCPGHQKGHSAEARGNRMADQAARKAAITETPDTSTLLIENSSPSGGSKRTADGSEFEAGKRTADGSEFEKRTADGSEFESPKKKAKVE

SEQ ID NO: 2954 - protein, 2114 aa, synthetic construct
MPAAKRVKLDGGDKKYSIGLDIGTNSVGWAVITDEYKVPSKKFKVLGNTDRHSIKKNLIGALLFDSGETAEATRLKRTARRRYTRRKNRICYLQEIFSNEMAKVDDSFFHRLEESFLVEEDKKHERHPIFGNIVDEVAYHEKYPTIYHLRKKLVDSTDKADLRLIYLALAHMIKFRGHFLIEGDLNPDNSDVDKLFIQLVQTYNQLFEENPINASGVDAKAILSARLSKSRRLENLIAQLPGEKKNGLFGNLIALSLGLTPNFKSNFDLAEDAKLQLSKDTYDDDLDNLLAQIGDQYADLFLAAKNLSDAILLSDILRVNTEITKAPLSASMIKRYDEHHQDLTLLKALVRQQLPEKYKEIFFDQSKNGYAGYIDGGASQEEFYKFIKPILEKMDGTEELLVKLNREDLLRKQRTFDNGSIPHQIHLGELHAILRRQEDFYPFLKDNREKIEKILTFRIPYYVGPLARGNSRFAWMTRKSEETITPWNFEEVVDKGASAQSFIERMTNFDKNLPNEKVLPKHSLLYEYFTVYNELTKVKYVTEGMRKPAFLSGEQKKAIVDLLFKTNRKVTVKQLKEDYFKKIECFDSVEISGVEDRFNASLGTYHDLLKIIKDKDFLDNEENEDILEDIVLTLTLFEDREMIEERLKTYAHLFDDKVMKQLKRRRYTGWGRLSRKLINGIRDKQSGKTILDFLKSDGFANRNFMQLIHDDSLTFKEDIQKAQVSGQGDSLHEHIANLAGSPAIKKGILQTVKVVDELVKVMGRHKPENIVIEMARENQTTQKGQKNSRERMKRIEEGIKELGSQILKEHPVENTQLQNEKLYLYYLQNGRDMYVDQELDINRLSDYDVDHIVPQSFLKDDSIDNKVLTRSDKARGKSDNVPSEEVVKKMKNYWRQLLNAKLITQRKFDNLTKAERGGLSELDKAGFIKRQLVETRQITKHVAQILDSRMNTKYDENDKLIREVKVITLKSKLVSDFRKDFQFYKVREINNYHHAHDAYLNAVVGTALIKKYPKLESEFVYGDYKVYDVRKMIAKSEQEIGKATAKYFFYSNIMNFFKTEITLANGEIRKRPLIETNGETGEIVWDKGRDFATVRKVLSMPQVNIVKKTEVQTGGFSKESILPKRNSDKLIARKKDWDPKKYGGFDSPTVAYSVLVVAKVEKGKSKKLKSVKELLGITIMERSSFEKNPIDFLEAKGYKEVKKDLIIKLPKYSLFELENGRKRMLASAGELQKGNELALPSKYVNFLYLASHYEKLKGSPEDNEQKQLFVEQHKHYLDEIIEQISEFSKRVILADANLDKVLSAYNKHRDKPIREQAENIIHLFTLTNLGAPAAFKYFDTTIDRKRYTSTKEVLDATLIHQSITGLYETRIDLSQLGGDGGGSSGGGPAPGGTLNIEDEYRLHETSKEPDVSLGSTWLSDFPQAWAETGGMGLAVRQAPLIIPLKATSTPVSIKQYPMSQEARLGIKPHIQRLLDQGILVPCQSPWNTPLLPVKKPGTNDYRPVQDLREVNKRVEDIHPTVPNPYNLLSGLPPSHQWYTVLDLKDAFFCLRLHPTSQPLFAFEWRDPEMGISGQLTWTRLPQGFKNSPTLFNEALHRDLADFRIQHPDLILLQYVDDLLLAATSELDCQQGTRALLQTLGNLGYRASAKKAQICQKQVKYLGYLLKEGQRWLTEARKETVMGQPTPKTPRQLREFLGKAGFCRLFIPGFAEMAAPLYPLTKPGTLFNWGPDQQKAYQEIKQALLTAPALGLPDLTKPFELFVDEKQGYAKGVLTQKLGPWRRPVAYLSKKLDPVAAGWPPCLRMVAAIAVLTKDAGKLTMGQPLVILAPHAVEALVKQPPDRWLSNARMTHYQALLLDTDRVQFGPVVALNPATLLPLPEEGLQHNCLDILAEAHGTRPDLTDQPLPDADHTWYTDGSSLLQEGQRKAGAAVTTETEVIWAKALPAGTSAQRAELIALTQALKMAEGKKLNVYTDSRYAFATAHIHGEIYRRRGWLTSEGKEIKNKDEILALLKALFLPKRLSIIHCPGHQKGHSAEARGNRMADQAARKAAITETPDTSTLLIENSSPSGGSKRTADGSEFEAGKRTADGSEFEKRTADGSEFESPKKKAKVE

SEQ ID NO: 2955 - protein, 2114 aa, synthetic construct; identical to SEQ ID NO: 2689

SEQ ID NO: 2956 - protein, 1999 aa, synthetic construct
MPAAKRVKLDGGDKKYSIGLDIGTNSVGWAVITDEYKVPSKKFKVLGNTDRHSIKKNLIGALLFDSGETAEATRLKRTARRRYTRRKNRICYLQEIFSNEMAKVDDSFFHRLEESFLVEEDKKHERHPIFGNIVDEVAYHEKYPTIYHLRKKLVDSTDKADLRLIYLALAHMIKFRGHFLIEGDLNPDNSDVDKLFIQLVQTYNQLFEENPINASGVDAKAILSARLSKSRRLENLIAQLPGEKKNGLFGNLIALSLGLTPNFKSNFDLAEDAKLQLSKDTYDDDLDNLLAQIGDQYADLFLAAKNLSDAILLSDILRVNTEITKAPLSASMIKRYDEHHQDLTLLKALVRQQLPEKYKEIFFDQSKNGYAGYIDGGASQEEFYKFIKPILEKMDGTEELLVKLNREDLLRKQRTFDNGSIPHQIHLGELHAILRRQEDFYPFLKDNREKIEKILTFRIPYYVGPLARGNSRFAWMTRKSEETITPWNFEEVVDKGASAQSFIERMTNFDKNLPNEKVLPKHSLLYEYFTVYNELTKVKYVTEGMRKPAFLSGEQKKAIVDLLFKTNRKVTVKQLKEDYFKKIECFDSVEISGVEDRFNASLGTYHDLLKIIKDKDFLDNEENEDILEDIVLTLTLFEDREMIEERLKTYAHLFDDKVMKQLKRRRYTGWGRLSRKLINGIRDKQSGKTILDFLKSDGFANRNFMQLIHDDSLTFKEDIQKAQVSGQGDSLHEHIANLAGSPAIKKGILQTVKVVDELVKVMGRHKPENIVIEMARENQTTQKGQKNSRERMKRIEEGIKELGSQILKEHPVENTQLQNEKLYLYYLQNGRDMYVDQELDINRLSDYDVDHIVPQSFLKDDSIDNKVLTRSDKARGKSDNVPSEEVVKKMKNYWRQLLNAKLITQRKFDNLTKAERGGLSELDKAGFIKRQLVETRQITKHVAQILDSRMNTKYDENDKLIREVKVITLKSKLVSDFRKDFQFYKVREINNYHHAHDAYLNAVVGTALIKKYPKLESEFVYGDYKVYDVRKMIAKSEQEIGKATAKYFFYSNIMNFFKTEITLANGEIRKRPLIETNGETGEIVWDKGRDFATVRKVLSMPQVNIVKKTEVQTGGFSKESILPKRNSDKLIARKKDWDPKKYGGFDSPTVAYSVLVVAKVEKGKSKKLKSVKELLGITIMERSSFEKNPIDFLEAKGYKEVKKDLIIKLPKYSLFELENGRKRMLASAGELQKGNELALPSKYVNFLYLASHYEKLKGSPEDNEQKQLFVEQHKHYLDEIIEQISEFSKRVILADANLDKVLSAYNKHRDKPIREQAENIIHLFTLTNLGAPAAFKYFDTTIDRKRYTSTKEVLDATLIHQSITGLYETRIDLSQLGGDGGGGGGSSGGSGGGVLDAPPSHIGLEHLPPPPEVPQFPLNLERLQALQDLVHRSLEAGYISPWDGPGNNPVFPVRKPNGAWRFVHDLRVTNALTKPIPALSPGPPDLTAIPTHLPHIICLDLKDAFFQIPVEDRFRSYFAFTLPTPGGLQPHRRFAWRVLPQGFINSPALFQRALQEPLRQVSAAFSQSLLVSYMDDILYVSPTEEQRLQCYQTMAAHLRDLGFQVASEKTRQTPSPVPFLGQMVHERMVTYQSLPTLQISSPISLHQLQTVLGDLQWVSRGTPTTRRPLQLLYSSLKPIDDPRAIIHLSPEQQQGIAELRQALSHNARSRYNEQEPLLAYVHLTRAGSTLVLFQKGAQFPLAYFQTPLTDNQASPWGLLLLLGCQYLQAQALSSYAKTILKYYHNLPKTSLDNWIQSSEDPRVQELLQLWPQISSQGIQPPGPWKTLVTRAEVFLTPQFSPEPIPAALCLFSDGAARRGAYCLWKDHLLDFQAVPAPESAQKGELAGLLAGLAAAPPEPLNIWVDSKYLYSLLRTLVLGAWLQPDPVPSYALLYKSLLRHPAIFVGHVRSHSSASHPIASLNNYVDQLAGKRTADGSEFEKRTADGSEFESPKKKAKVE

SEQ ID NO: 2957 - protein, 2131 aa, synthetic construct
MPAAKRVKLDGGDKKYSIGLDIGTNSVGWAVITDEYKVPSKKFKVLGNTDRHSIKKNLIGALLFDSGETAEATRLKRTARRRYTRRKNRICYLQEIFSNEMAKVDDSFFHRLEESFLVEEDKKHERHPIFGNIVDEVAYHEKYPTIYHLRKKLVDSTDKADLRLIYLALAHMIKFRGHFLIEGDLNPDNSDVDKLFIQLVQTYNQLFEENPINASGVDAKAILSARLSKSRRLENLIAQLPGEKKNGLFGNLIALSLGLTPNFKSNFDLAEDAKLQLSKDTYDDDLDNLLAQIGDQYADLFLAAKNLSDAILLSDILRVNTEITKAPLSASMIKRYDEHHQDLTLLKALVRQQLPEKYKEIFFDQSKNGYAGYIDGGASQEEFYKFIKPILEKMDGTEELLVKLNREDLLRKQRTFDNGSIPHQIHLGELHAILRRQEDFYPFLKDNREKIEKILTFRIPYYVGPLARGNSRFAWMTRKSEETITPWNFEEVVDKGASAQSFIERMTNFDKNLPNEKVLPKHSLLYEYFTVYNELTKVKYVTEGMRKPAFLSGEQKKAIVDLLFKTNRKVTVKQLKEDYFKKIECFDSVEISGVEDRFNASLGTYHDLLKIIKDKDFLDNEENEDILEDIVLTLTLFEDREMIEERLKTYAHLFDDKVMKQLKRRRYTGWGRLSRKLINGIRDKQSGKTILDFLKSDGFANRNFMQLIHDDSLTFKEDIQKAQVSGQGDSLHEHIANLAGSPAIKKGILQTVKVVDELVKVMGRHKPENIVIEMARENQTTQKGQKNSRERMKRIEEGIKELGSQILKEHPVENTQLQNEKLYLYYLQNGRDMYVDQELDINRLSDYDVDHIVPQSFLKDDSIDNKVLTRSDKARGKSDNVPSEEVVKKMKNYWRQLLNAKLITQRKFDNLTKAERGGLSELDKAGFIKRQLVETRQITKHVAQILDSRMNTKYDENDKLIREVKVITLKSKLVSDFRKDFQFYKVREINNYHHAHDAYLNAVVGTALIKKYPKLESEFVYGDYKVYDVRKMIAKSEQEIGKATAKYFFYSNIMNFFKTEITLANGEIRKRPLIETNGETGEIVWDKGRDFATVRKVLSMPQVNIVKKTEVQTGGFSKESILPKRNSDKLIARKKDWDPKKYGGFDSPTVAYSVLVVAKVEKGKSKKLKSVKELLGITIMERSSFEKNPIDFLEAKGYKEVKKDLIIKLPKYSLFELENGRKRMLASAGELQKGNELALPSKYVNFLYLASHYEKLKGSPEDNEQKQLFVEQHKHYLDEIIEQISEFSKRVILADANLDKVLSAYNKHRDKPIREQAENIIHLFTLTNLGAPAAFKYFDTTIDRKRYTSTKEVLDATLIHQSITGLYETRIDLSQLGGDGGAEAAAKEAAAKEAAAKEAAAKALEAEAAAKEAAAKEAAAKEAAAKAGGTLNIEDEHRLHETSKEPDVSLGSTWLSDFPQAWAETGGMGLAVRQAPLIIPLKATSTPVSIKQYPMSQEARLGIKPHIQRLLDQGILVPCQSPWNTPLLPVKKPGTNDYRPVQDLREVNKRVEDIHPTVPNPYNLLSGLPPSHQWYTVLDLKDAFFCLRLHPTSQPLFAFEWRDPEMGISGQLTWTRLPQGFKNSPTLFDEALHRDLADFRIQHPDLILLQYVDDLLLAATSELDCQQGTRALLQTLGNLGYRASAKKAQICQKQVKYLGYLLKEGQRWLTEARKETVMGQPTPKTPRQLREFLGTAGFCRLWIPGFAEMAAPLYPLTKTGTLFNWGPDQQKAYQEIKQALLTAPALGLPDLTKPFELFVDEKQGYAKGVLTQKLGPWRRPVAYLSKKLDPVAAGWPPCLRMVAAIAVLTKDAGKLTMGQPLVILAPHAVEALVKQPPDRWLSNARMTHYQALLLDTDRVQFGPVVALNPATLLPLPEEGLQHNCLDILAEAHGTRPDLTDQPLPDADHTWYTDGSSLLQEGQRKAGAAVTTETEVIWAKALPAGTSAQRAELIALTQALKMAEGKKLNVYTDSRYAFATAHIHGEIYRRRGLLTSEGKEIKNKDEILALLKALFLPKRLSIIHCPGHQKGHSAEARGNRMADQAARKAAITETPDTSTLLAGKRTADGSEFEKRTADGSEFESPKKKAKVE

SEQ ID NO: 2958 - protein, 2101 aa, synthetic construct
MPAAKRVKLDGGDKKYSIGLDIGTNSVGWAVITDEYKVPSKKFKVLGNTDRHSIKKNLIGALLFDSGETAEATRLKRTARRRYTRRKNRICYLQEIFSNEMAKVDDSFFHRLEESFLVEEDKKHERHPIFGNIVDEVAYHEKYPTIYHLRKKLVDSTDKADLRLIYLALAHMIKFRGHFLIEGDLNPDNSDVDKLFIQLVQTYNQLFEENPINASGVDAKAILSARLSKSRRLENLIAQLPGEKKNGLFGNLIALSLGLTPNFKSNFDLAEDAKLQLSKDTYDDDLDNLLAQIGDQYADLFLAAKNLSDAILLSDILRVNTEITKAPLSASMIKRYDEHHQDLTLLKALVRQQLPEKYKEIFFDQSKNGYAGYIDGGASQEEFYKFIKPILEKMDGTEELLVKLNREDLLRKQRTFDNGSIPHQIHLGELHAILRRQEDFYPFLKDNREKIEKILTFRIPYYVGPLARGNSRFAWMTRKSEETITPWNFEEVVDKGASAQSFIERMTNFDKNLPNEKVLPKHSLLYEYFTVYNELTKVKYVTEGMRKPAFLSGEQKKAIVDLLFKTNRKVTVKQLKEDYFKKIECFDSVEISGVEDRFNASLGTYHDLLKIIKDKDFLDNEENEDILEDIVLTLTLFEDREMIEERLKTYAHLFDDKVMKQLKRRRYTGWGRLSRKLINGIRDKQSGKTILDFLKSDGFANRNFMQLIHDDSLTFKEDIQKAQVSGQGDSLHEHIANLAGSPAIKKGILQTVKVVDELVKVMGRHKPENIVIEMARENQTTQKGQKNSRERMKRIEEGIKELGSQILKEHPVENTQLQNEKLYLYYLQNGRDMYVDQELDINRLSDYDVDHIVPQSFLKDDSIDNKVLTRSDKARGKSDNVPSEEVVKKMKNYWRQLLNAKLITQRKFDNLTKAERGGLSELDKAGFIKRQLVETRQITKHVAQILDSRMNTKYDENDKLIREVKVITLKSKLVSDFRKDFQFYKVREINNYHHAHDAYLNAVVGTALIKKYPKLESEFVYGDYKVYDVRKMIAKSEQEIGKATAKYFFYSNIMNFFKTEITLANGEIRKRPLIETNGETGEIVWDKGRDFATVRKVLSMPQVNIVKKTEVQTGGFSKESILPKRNSDKLIARKKDWDPKKYGGFDSPTVAYSVLVVAKVEKGKSKKLKSVKELLGITIMERSSFEKNPIDFLEAKGYKEVKKDLIIKLPKYSLFELENGRKRMLASAGELQKGNELALPSKYVNFLYLASHYEKLKGSPEDNEQKQLFVEQHKHYLDEIIEQISEFSKRVILADANLDKVLSAYNKHRDKPIREQAENIIHLFTLTNLGAPAAFKYFDTTIDRKRYTSTKEVLDATLIHQSITGLYETRIDLSQLGGDGGSGSETPGTSESATPESGGTLNIEDEHRLHETSKEPDVSLGSTWLSDFPQAWAETGGMGLAVRQAPLIIPLKATSTPVSIKQYPMSQEARLGIKPHIQRLLDQGILVPCQSPWNTPLLPVKKPGTNDYRPVQDLREVNKRVEDIHPTVPNPYNLLSGLPPSHQWYTVLDLKDAFFCLRLHPTSQPLFAFEWRDPEMGISGQLTWTRLPQGFKNSPTLFDEALHRDLADFRIQHPDLILLQYVDDLLLAATSELDCQQGTRALLQTLGNLGYRASAKKAQICQKQVKYLGYLLKEGQRWLTEARKETVMGQPTPKTPRQLREFLGTAGFCRLWIPGFAEMAAPLYPLTKTGTLFNWGPDQQKAYQEIKQALLTAPALGLPDLTKPFELFVDEKQGYAKGVLTQKLGPWRRPVAYLSKKLDPVAAGWPPCLRMVAAIAVLTKDAGKLTMGQPLVILAPHAVEALVKQPPDRWLSNARMTHYQALLLDTDRVQFGPVVALNPATLLPLPEEGLQHNCLDILAEAHGTRPDLTDQPLPDADHTWYTDGSSLLQEGQRKAGAAVTTETEVIWAKALPAGTSAQRAELIALTQALKMAEGKKLNVYTDSRYAFATAHIHGEIYRRRGLLTSEGKEIKNKDEILALLKALFLPKRLSIIHCPGHQKGHSAEARGNRMADQAARKAAITETPDTSTLLAGKRTADGSEFEKRTADGSEFESPKKKAKVE

SEQ ID NO: 2959 - protein, 2096 aa, synthetic construct
MPAAKRVKLDGGDKKYSIGLDIGTNSVGWAVITDEYKVPSKKFKVLGNTDRHSIKKNLIGALLFDSGETAEATRLKRTARRRYTRRKNRICYLQEIFSNEMAKVDDSFFHRLEESFLVEEDKKHERHPIFGNIVDEVAYHEKYPTIYHLRKKLVDSTDKADLRLIYLALAHMIKFRGHFLIEGDLNPDNSDVDKLFIQLVQTYNQLFEENPINASGVDAKAILSARLSKSRRLENLIAQLPGEKKNGLFGNLIALSLGLTPNFKSNFDLAEDAKLQLSKDTYDDDLDNLLAQIGDQYADLFLAAKNLSDAILLSDILRVNTEITKAPLSASMIKRYDEHHQDLTLLKALVRQQLPEKYKEIFFDQSKNGYAGYIDGGASQEEFYKFIKPILEKMDGTEELLVKLNREDLLRKQRTFDNGSIPHQIHLGELHAILRRQEDFYPFLKDNREKIEKILTFRIPYYVGPLARGNSRFAWMTRKSEETITPWNFEEVVDKGASAQSFIERMTNFDKNLPNEKVLPKHSLLYEYFTVYNELTKVKYVTEGMRKPAFLSGEQKKAIVDLLFKTNRKVTVKQLKEDYFKKIECFDSVEISGVEDRFNASLGTYHDLLKIIKDKDFLDNEENEDILEDIVLTLTLFEDREMIEERLKTYAHLFDDKVMKQLKRRRYTGWGRLSRKLINGIRDKQSGKTILDFLKSDGFANRNFMQLIHDDSLTFKEDIQKAQVSGQGDSLHEHIANLAGSPAIKKGILQTVKVVDELVKVMGRHKPENIVIEMARENQTTQKGQKNSRERMKRIEEGIKELGSQILKEHPVENTQLQNEKLYLYYLQNGRDMYVDQELDINRLSDYDVDHIVPQSFLKDDSIDNKVLTRSDKARGKSDNVPSEEVVKKMKNYWRQLLNAKLITQRKFDNLTKAERGGLSELDKAGFIKRQLVETRQITKHVAQILDSRMNTKYDENDKLIREVKVITLKSKLVSDFRKDFQFYKVREINNYHHAHDAYLNAVVGTALIKKYPKLESEFVYGDYKVYDVRKMIAKSEQEIGKATAKYFFYSNIMNFFKTEITLANGEIRKRPLIETNGETGEIVWDKGRDFATVRKVLSMPQVNIVKKTEVQTGGFSKESILPKRNSDKLIARKKDWDPKKYGGFDSPTVAYSVLVVAKVEKGKSKKLKSVKELLGITIMERSSFEKNPIDFLEAKGYKEVKKDLIIKLPKYSLFELENGRKRMLASAGELQKGNELALPSKYVNFLYLASHYEKLKGSPEDNEQKQLFVEQHKHYLDEIIEQISEFSKRVILADANLDKVLSAYNKHRDKPIREQAENIIHLFTLTNLGAPAAFKYFDTTIDRKRYTSTKEVLDATLIHQSITGLYETRIDLSQLGGDGGEAAAKGGSGGGGGTLNIEDEHRLHETSKEPDVSLGSTWLSDFPQAWAETGGMGLAVRQAPLIIPLKATSTPVSIKQYPMSQEARLGIKPHIQRLLDQGILVPCQSPWNTPLLPVKKPGTNDYRPVQDLREVNKRVEDIHPTVPNPYNLLSGLPPSHQWYTVLDLKDAFFCLRLHPTSQPLFAFEWRDPEMGISGQLTWTRLPQGFKNSPTLFDEALHRDLADFRIQHPDLILLQYVDDLLLAATSELDCQQGTRALLQTLGNLGYRASAKKAQICQKQVKYLGYLLKEGQRWLTEARKETVMGQPTPKTPRQLREFLGTAGFCRLWIPGFAEMAAPLYPLTKTGTLFNWGPDQQKAYQEIKQALLTAPALGLPDLTKPFELFVDEKQGYAKGVLTQKLGPWRRPVAYLSKKLDPVAAGWPPCLRMVAAIAVLTKDAGKLTMGQPLVILAPHAVEALVKQPPDRWLSNARMTHYQALLLDTDRVQFGPVVALNPATLLPLPEEGLQHNCLDILAEAHGTRPDLTDQPLPDADHTWYTDGSSLLQEGQRKAGAAVTTETEVIWAKALPAGTSAQRAELIALTQALKMAEGKKLNVYTDSRYAFATAHIHGEIYRRRGLLTSEGKEIKNKDEILALLKALFLPKRLSIIHCPGHQKGHSAEARGNRMADQAARKAAITETPDTSTLLAGKRTADGSEFEKRTADGSEFESPKKKAKVE

SEQ ID NO: 2960 - protein, 2096 aa, synthetic construct
MPAAKRVKLDGGDKKYSIGLDIGTNSVGWAVITDEYKVPSKKFKVLGNTDRHSIKKNLIGALLFDSGETAEATRLKRTARRRYTRRKNRICYLQEIFSNEMAKVDDSFFHRLEESFLVEEDKKHERHPIFGNIVDEVAYHEKYPTIYHLRKKLVDSTDKADLRLIYLALAHMIKFRGHFLIEGDLNPDNSDVDKLFIQLVQTYNQLFEENPINASGVDAKAILSARLSKSRRLENLIAQLPGEKKNGLFGNLIALSLGLTPNFKSNFDLAEDAKLQLSKDTYDDDLDNLLAQIGDQYADLFLAAKNLSDAILLSDILRVNTEITKAPLSASMIKRYDEHHQDLTLLKALVRQQLPEKYKEIFFDQSKNGYAGYIDGGASQEEFYKFIKPILEKMDGTEELLVKLNREDLLRKQRTFDNGSIPHQIHLGELHAILRRQEDFYPFLKDNREKIEKILTFRIPYYVGPLARGNSRFAWMTRKSEETITPWNFEEVVDKGASAQSFIERMTNFDKNLPNEKVLPKHSLLYEYFTVYNELTKVKYVTEGMRKPAFLSGEQKKAIVDLLFKTNRKVTVKQLKEDYFKKIECFDSVEISGVEDRFNASLGTYHDLLKIIKDKDFLDNEENEDILEDIVLTLTLFEDREMIEERLKTYAHLFDDKVMKQLKRRRYTGWGRLSRKLINGIRDKQSGKTILDFLKSDGFANRNFMQLIHDDSLTFKEDIQKAQVSGQGDSLHEHIANLAGSPAIKKGILQTVKVVDELVKVMGRHKPENIVIEMARENQTTQKGQKNSRERMKRIEEGIKELGSQILKEHPVENTQLQNEKLYLYYLQNGRDMYVDQELDINRLSDYDVDHIVPQSFLKDDSIDNKVLTRSDKARGKSDNVPSEEVVKKMKNYWRQLLNAKLITQRKFDNLTKAERGGLSELDKAGFIKRQLVETRQITKHVAQILDSRMNTKYDENDKLIREVKVITLKSKLVSDFRKDFQFYKVREINNYHHAHDAYLNAVVGTALIKKYPKLESEFVYGDYKVYDVRKMIAKSEQEIGKATAKYFFYSNIMNFFKTEITLANGEIRKRPLIETNGETGEIVWDKGRDFATVRKVLSMPQVNIVKKTEVQTGGFSKESILPKRNSDKLIARKKDWDPKKYGGFDSPTVAYSVLVVAKVEKGKSKKLKSVKELLGITIMERSSFEKNPIDFLEAKGYKEVKKDLIIKLPKYSLFELENGRKRMLASAGELQKGNELALPSKYVNFLYLASHYEKLKGSPEDNEQKQLFVEQHKHYLDEIIEQISEFSKRVILADANLDKVLSAYNKHRDKPIREQAENIIHLFTLTNLGAPAAFKYFDTTIDRKRYTSTKEVLDATLIHQSITGLYETRIDLSQLGGDGGGGSEAAAKGSSGGTLNIEDEHRLHETSKEPDVSLGSTWLSDFPQAWAETGGMGLAVRQAPLIIPLKATSTPVSIKQYPMSQEARLGIKPHIQRLLDQGILVPCQSPWNTPLLPVKKPGTNDYRPVQDLREVNKRVEDIHPTVPNPYNLLSGLPPSHQWYTVLDLKDAFFCLRLHPTSQPLFAFEWRDPEMGISGQLTWTRLPQGFKNSPTLFDEALHRDLADFRIQHPDLILLQYVDDLLLAATSELDCQQGTRALLQTLGNLGYRASAKKAQICQKQVKYLGYLLKEGQRWLTEARKETVMGQPTPKTPRQLREFLGTAGFCRLWIPGFAEMAAPLYPLTKTGTLFNWGPDQQKAYQEIKQALLTAPALGLPDLTKPFELFVDEKQGYAKGVLTQKLGPWRRPVAYLSKKLDPVAAGWPPCLRMVAAIAVLTKDAGKLTMGQPLVILAPHAVEALVKQPPDRWLSNARMTHYQALLLDTDRVQFGPVVALNPATLLPLPEEGLQHNCLDILAEAHGTRPDLTDQPLPDADHTWYTDGSSLLQEGQRKAGAAVTTETEVIWAKALPAGTSAQRAELIALTQALKMAEGKKLNVYTDSRYAFATAHIHGEIYRRRGLLTSEGKEIKNKDEILALLKALFLPKRLSIIHCPGHQKGHSAEARGNRMADQAARKAAITETPDTSTLLAGKRTADGSEFEKRTADGSEFESPKKKAKVE

SEQ ID NO: 2961 - protein, 2096 aa, synthetic construct
MPAAKRVKLDGGDKKYSIGLDIGTNSVGWAVITDEYKVPSKKFKVLGNTDRHSIKKNLIGALLFDSGETAEATRLKRTARRRYTRRKNRICYLQEIFSNEMAKVDDSFFHRLEESFLVEEDKKHERHPIFGNIVDEVAYHEKYPTIYHLRKKLVDSTDKADLRLIYLALAHMIKFRGHFLIEGDLNPDNSDVDKLFIQLVQTYNQLFEENPINASGVDAKAILSARLSKSRRLENLIAQLPGEKKNGLFGNLIALSLGLTPNFKSNFDLAEDAKLQLSKDTYDDDLDNLLAQIGDQYADLFLAAKNLSDAILLSDILRVNTEITKAPLSASMIKRYDEHHQDLTLLKALVRQQLPEKYKEIFFDQSKNGYAGYIDGGASQEEFYKFIKPILEKMDGTEELLVKLNREDLLRKQRTFDNGSIPHQIHLGELHAILRRQEDFYPFLKDNREKIEKILTFRIPYYVGPLARGNSRFAWMTRKSEETITPWNFEEVVDKGASAQSFIERMTNFDKNLPNEKVLPKHSLLYEYFTVYNELTKVKYVTEGMRKPAFLSGEQKKAIVDLLFKTNRKVTVKQLKEDYFKKIECFDSVEISGVEDRFNASLGTYHDLLKIIKDKDFLDNEENEDILEDIVLTLTLFEDREMIEERLKTYAHLFDDKVMKQLKRRRYTGWGRLSRKLINGIRDKQSGKTILDFLKSDGFANRNFMQLIHDDSLTFKEDIQKAQVSGQGDSLHEHIANLAGSPAIKKGILQTVKVVDELVKVMGRHKPENIVIEMARENQTTQKGQKNSRERMKRIEEGIKELGSQILKEHPVENTQLQNEKLYLYYLQNGRDMYVDQELDINRLSDYDVDHIVPQSFLKDDSIDNKVLTRSDKARGKSDNVPSEEVVKKMKNYWRQLLNAKLITQRKFDNLTKAERGGLSELDKAGFIKRQLVETRQITKHVAQILDSRMNTKYDENDKLIREVKVITLKSKLVSDFRKDFQFYKVREINNYHHAHDAYLNAVVGTALIKKYPKLESEFVYGDYKVYDVRKMIAKSEQEIGKATAKYFFYSNIMNFFKTEITLANGEIRKRPLIETNGETGEIVWDKGRDFATVRKVLSMPQVNIVKKTEVQTGGFSKESILPKRNSDKLIARKKDWDPKKYGGFDSPTVAYSVLVVAKVEKGKSKKLKSVKELLGITIMERSSFEKNPIDFLEAKGYKEVKKDLIIKLPKYSLFELENGRKRMLASAGELQKGNELALPSKYVNFLYLASHYEKLKGSPEDNEQKQLFVEQHKHYLDEIIEQISEFSKRVILADANLDKVLSAYNKHRDKPIREQAENIIHLFTLTNLGAPAAFKYFDTTIDRKRYTSTKEVLDATLIHQSITGLYETRIDLSQLGGDGGPAPGGSEAAAKGGTLNIEDEHRLHETSKEPDVSLGSTWLSDFPQAWAETGGMGLAVRQAPLIIPLKATSTPVSIKQYPMSQEARLGIKPHIQRLLDQGILVPCQSPWNTPLLPVKKPGTNDYRPVQDLREVNKRVEDIHPTVPNPYNLLSGLPPSHQWYTVLDLKDAFFCLRLHPTSQPLFAFEWRDPEMGISGQLTWTRLPQGFKNSPTLFDEALHRDLADFRIQHPDLILLQYVDDLLLAATSELDCQQGTRALLQTLGNLGYRASAKKAQICQKQVKYLGYLLKEGQRWLTEARKETVMGQPTPKTPRQLREFLGTAGFCRLWIPGFAEMAAPLYPLTKTGTLFNWGPDQQKAYQEIKQALLTAPALGLPDLTKPFELFVDEKQGYAKGVLTQKLGPWRRPVAYLSKKLDPVAAGWPPCLRMVAAIAVLTKDAGKLTMGQPLVILAPHAVEALVKQPPDRWLSNARMTHYQALLLDTDRVQFGPVVALNPATLLPLPEEGLQHNCLDILAEAHGTRPDLTDQPLPDADHTWYTDGSSLLQEGQRKAGAAVTTETEVIWAKALPAGTSAQRAELIALTQALKMAEGKKLNVYTDSRYAFATAHIHGEIYRRRGLLTSEGKEIKNKDEILALLKALFLPKRLSIIHCPGHQKGHSAEARGNRMADQAARKAAITETPDTSTLLAGKRTADGSEFEKRTADGSEFESPKKKAKVE

SEQ ID NO: 2962 - protein, 2093 aa, synthetic construct
MPAAKRVKLDGGDKKYSIGLDIGTNSVGWAVITDEYKVPSKKFKVLGNTDRHSIKKNLIGALLFDSGETAEATRLKRTARRRYTRRKNRICYLQEIFSNEMAKVDDSFFHRLEESFLVEEDKKHERHPIFGNIVDEVAYHEKYPTIYHLRKKLVDSTDKADLRLIYLALAHMIKFRGHFLIEGDLNPDNSDVDKLFIQLVQTYNQLFEENPINASGVDAKAILSARLSKSRRLENLIAQLPGEKKNGLFGNLIALSLGLTPNFKSNFDLAEDAKLQLSKDTYDDDLDNLLAQIGDQYADLFLAAKNLSDAILLSDILRVNTEITKAPLSASMIKRYDEHHQDLTLLKALVRQQLPEKYKEIFFDQSKNGYAGYIDGGASQEEFYKFIKPILEKMDGTEELLVKLNREDLLRKQRTFDNGSIPHQIHLGELHAILRRQEDFYPFLKDNREKIEKILTFRIPYYVGPLARGNSRFAWMTRKSEETITPWNFEEVVDKGASAQSFIERMTNFDKNLPNEKVLPKHSLLYEYFTVYNELTKVKYVTEGMRKPAFLSGEQKKAIVDLLFKTNRKVTVKQLKEDYFKKIECFDSVEISGVEDRFNASLGTYHDLLKIIKDKDFLDNEENEDILEDIVLTLTLFEDREMIEERLKTYAHLFDDKVMKQLKRRRYTGWGRLSRKLINGIRDKQSGKTILDFLKSDGFANRNFMQLIHDDSLTFKEDIQKAQVSGQGDSLHEHIANLAGSPAIKKGILQTVKVVDELVKVMGRHKPENIVIEMARENQTTQKGQKNSRERMKRIEEGIKELGSQILKEHPVENTQLQNEKLYLYYLQNGRDMYVDQELDINRLSDYDVDHIVPQSFLKDDSIDNKVLTRSDKARGKSDNVPSEEVVKKMKNYWRQLLNAKLITQRKFDNLTKAERGGLSELDKAGFIKRQLVETRQITKHVAQILDSRMNTKYDENDKLIREVKVITLKSKLVSDFRKDFQFYKVREINNYHHAHDAYLNAVVGTALIKKYPKLESEFVYGDYKVYDVRKMIAKSEQEIGKATAKYFFYSNIMNFFKTEITLANGEIRKRPLIETNGETGEIVWDKGRDFATVRKVLSMPQVNIVKKTEVQTGGFSKESILPKRNSDKLIARKKDWDPKKYGGFDSPTVAYSVLVVAKVEKGKSKKLKSVKELLGITIMERSSFEKNPIDFLEAKGYKEVKKDLIIKLPKYSLFELENGRKRMLASAGELQKGNELALPSKYVNFLYLASHYEKLKGSPEDNEQKQLFVEQHKHYLDEIIEQISEFSKRVILADANLDKVLSAYNKHRDKPIREQAENIIHLFTLTNLGAPAAFKYFDTTIDRKRYTSTKEVLDATLIHQSITGLYETRIDLSQLGGDGGGGSEAAAKGGTLNIEDEHRLHETSKEPDVSLGSTWLSDFPQAWAETGGMGLAVRQAPLIIPLKATSTPVSIKQYPMSQEARLGIKPHIQRLLDQGILVPCQSPWNTPLLPVKKPGTNDYRPVQDLREVNKRVEDIHPTVPNPYNLLSGLPPSHQWYTVLDLKDAFFCLRLHPTSQPLFAFEWRDPEMGISGQLTWTRLPQGFKNSPTLFDEALHRDLADFRIQHPDLILLQYVDDLLLAATSELDCQQGTRALLQTLGNLGYRASAKKAQICQKQVKYLGYLLKEGQRWLTEARKETVMGQPTPKTPRQLREFLGTAGFCRLWIPGFAEMAAPLYPLTKTGTLFNWGPDQQKAYQEIKQALLTAPALGLPDLTKPFELFVDEKQGYAKGVLTQKLGPWRRPVAYLSKKLDPVAAGWPPCLRMVAAIAVLTKDAGKLTMGQPLVILAPHAVEALVKQPPDRWLSNARMTHYQALLLDTDRVQFGPVVALNPATLLPLPEEGLQHNCLDILAEAHGTRPDLTDQPLPDADHTWYTDGSSLLQEGQRKAGAAVTTETEVIWAKALPAGTSAQRAELIALTQALKMAEGKKLNVYTDSRYAFATAHIHGEIYRRRGLLTSEGKEIKNKDEILALLKALFLPKRLSIIHCPGHQKGHSAEARGNRMADQAARKAAITETPDTSTLLAGKRTADGSEFEKRTADGSEFESPKKKAKVE

SEQ ID NO: 2963 - protein, 2088 aa, synthetic construct
MPAAKRVKLDGGDKKYSIGLDIGTNSVGWAVITDEYKVPSKKFKVLGNTDRHSIKKNLIGALLFDSGETAEATRLKRTARRRYTRRKNRICYLQEIFSNEMAKVDDSFFHRLEESFLVEEDKKHERHPIFGNIVDEVAYHEKYPTIYHLRKKLVDSTDKADLRLIYLALAHMIKFRGHFLIEGDLNPDNSDVDKLFIQLVQTYNQLFEENPINASGVDAKAILSARLSKSRRLENLIAQLPGEKKNGLFGNLIALSLGLTPNFKSNFDLAEDAKLQLSKDTYDDDLDNLLAQIGDQYADLFLAAKNLSDAILLSDILRVNTEITKAPLSASMIKRYDEHHQDLTLLKALVRQQLPEKYKEIFFDQSKNGYAGYIDGGASQEEFYKFIKPILEKMDGTEELLVKLNREDLLRKQRTFDNGSIPHQIHLGELHAILRRQEDFYPFLKDNREKIEKILTFRIPYYVGPLARGNSRFAWMTRKSEETITPWNFEEVVDKGASAQSFIERMTNFDKNLPNEKVLPKHSLLYEYFTVYNELTKVKYVTEGMRKPAFLSGEQKKAIVDLLFKTNRKVTVKQLKEDYFKKIECFDSVEISGVEDRFNASLGTYHDLLKIIKDKDFLDNEENEDILEDIVLTLTLFEDREMIEERLKTYAHLFDDKVMKQLKRRRYTGWGRLSRKLINGIRDKQSGKTILDFLKSDGFANRNFMQLIHDDSLTFKEDIQKAQVSGQGDSLHEHIANLAGSPAIKKGILQTVKVVDELVKVMGRHKPENIVIEMARENQTTQKGQKNSRERMKRIEEGIKELGSQILKEHPVENTQLQNEKLYLYYLQNGRDMYVDQELDINRLSDYDVDHIVPQSFLKDDSIDNKVLTRSDKARGKSDNVPSEEVVKKMKNYWRQLLNAKLITQRKFDNLTKAERGGLSELDKAGFIKRQLVETRQITKHVAQILDSRMNTKYDENDKLIREVKVITLKSKLVSDFRKDFQFYKVREINNYHHAHDAYLNAVVGTALIKKYPKLESEFVYGDYKVYDVRKMIAKSEQEIGKATAKYFFYSNIMNFFKTEITLANGEIRKRPLIETNGETGEIVWDKGRDFATVRKVLSMPQVNIVKKTEVQTGGFSKESILPKRNSDKLIARKKDWDPKKYGGFDSPTVAYSVLVVAKVEKGKSKKLKSVKELLGITIMERSSFEKNPIDFLEAKGYKEVKKDLIIKLPKYSLFELENGRKRMLASAGELQKGNELALPSKYVNFLYLASHYEKLKGSPEDNEQKQLFVEQHKHYLDEIIEQISEFSKRVILADANLDKVLSAYNKHRDKPIREQAENIIHLFTLTNLGAPAAFKYFDTTIDRKRYTSTKEVLDATLIHQSITGLYETRIDLSQLGGDGGGSSGGTLNIEDEHRLHETSKEPDVSLGSTWLSDFPQAWAETGGMGLAVRQAPLIIPLKATSTPVSIKQYPMSQEARLGIKPHIQRLLDQGILVPCQSPWNTPLLPVKKPGTNDYRPVQDLREVNKRVEDIHPTVPNPYNLLSGLPPSHQWYTVLDLKDAFFCLRLHPTSQPLFAFEWRDPEMGISGQLTWTRLPQGFKNSPTLFDEALHRDLADFRIQHPDLILLQYVDDLLLAATSELDCQQGTRALLQTLGNLGYRASAKKAQICQKQVKYLGYLLKEGQRWLTEARKETVMGQPTPKTPRQLREFLGTAGFCRLWIPGFAEMAAPLYPLTKTGTLFNWGPDQQKAYQEIKQALLTAPALGLPDLTKPFELFVDEKQGYAKGVLTQKLGPWRRPVAYLSKKLDPVAAGWPPCLRMVAAIAVLTKDAGKLTMGQPLVILAPHAVEALVKQPPDRWLSNARMTHYQALLLDTDRVQFGPVVALNPATLLPLPEEGLQHNCLDILAEAHGTRPDLTDQPLPDADHTWYTDGSSLLQEGQRKAGAAVTTETEVIWAKALPAGTSAQRAELIALTQALKMAEGKKLNVYTDSRYAFATAHIHGEIYRRRGLLTSEGKEIKNKDEILALLKALFLPKRLSIIHCPGHQKGHSAEARGNRMADQAARKAAITETPDTSTLLAGKRTADGSEFEKRTADGSEFESPKKKAKVE

SEQ ID NO: 2964 - protein, 2094 aa, synthetic construct
MPAAKRVKLDGGDKKYSIGLDIGTNSVGWAVITDEYKVPSKKFKVLGNTDRHSIKKNLIGALLFDSGETAEATRLKRTARRRYTRRKNRICYLQEIFSNEMAKVDDSFFHRLEESFLVEEDKKHERHPIFGNIVDEVAYHEKYPTIYHLRKKLVDSTDKADLRLIYLALAHMIKFRGHFLIEGDLNPDNSDVDKLFIQLVQTYNQLFEENPINASGVDAKAILSARLSKSRRLENLIAQLPGEKKNGLFGNLIALSLGLTPNFKSNFDLAEDAKLQLSKDTYDDDLDNLLAQIGDQYADLFLAAKNLSDAILLSDILRVNTEITKAPLSASMIKRYDEHHQDLTLLKALVRQQLPEKYKEIFFDQSKNGYAGYIDGGASQEEFYKFIKPILEKMDGTEELLVKLNREDLLRKQRTFDNGSIPHQIHLGELHAILRRQEDFYPFLKDNREKIEKILTFRIPYYVGPLARGNSRFAWMTRKSEETITPWNFEEVVDKGASAQSFIERMTNFDKNLPNEKVLPKHSLLYEYFTVYNELTKVKYVTEGMRKPAFLSGEQKKAIVDLLFKTNRKVTVKQLKEDYFKKIECFDSVEISGVEDRFNASLGTYHDLLKIIKDKDFLDNEENEDILEDIVLTLTLFEDREMIEERLKTYAHLFDDKVMKQLKRRRYTGWGRLSRKLINGIRDKQSGKTILDFLKSDGFANRNFMQLIHDDSLTFKEDIQKAQVSGQGDSLHEHIANLAGSPAIKKGILQTVKVVDELVKVMGRHKPENIVIEMARENQTTQKGQKNSRERMKRIEEGIKELGSQILKEHPVENTQLQNEKLYLYYLQNGRDMYVDQELDINRLSDYDVDHIVPQSFLKDDSIDNKVLTRSDKARGKSDNVPSEEVVKKMKNYWRQLLNAKLITQRKFDNLTKAERGGLSELDKAGFIKRQLVETRQITKHVAQILDSRMNTKYDENDKLIREVKVITLKSKLVSDFRKDFQFYKVREINNYHHAHDAYLNAVVGTALIKKYPKLESEFVYGDYKVYDVRKMIAKSEQEIGKATAKYFFYSNIMNFFKTEITLANGEIRKRPLIETNGETGEIVWDKGRDFATVRKVLSMPQVNIVKKTEVQTGGFSKESILPKRNSDKLIARKKDWDPKKYGGFDSPTVAYSVLVVAKVEKGKSKKLKSVKELLGITIMERSSFEKNPIDFLEAKGYKEVKKDLIIKLPKYSLFELENGRKRMLASAGELQKGNELALPSKYVNFLYLASHYEKLKGSPEDNEQKQLFVEQHKHYLDEIIEQISEFSKRVILADANLDKVLSAYNKHRDKPIREQAENIIHLFTLTNLGAPAAFKYFDTTIDRKRYTSTKEVLDATLIHQSITGLYETRIDLSQLGGDGGGGSGSSPAPGGTLNIEDEHRLHETSKEPDVSLGSTWLSDFPQAWAETGGMGLAVRQAPLIIPLKATSTPVSIKQYPMSQEARLGIKPHIQRLLDQGILVPCQSPWNTPLLPVKKPGTNDYRPVQDLREVNKRVEDIHPTVPNPYNLLSGLPPSHQWYTVLDLKDAFFCLRLHPTSQPLFAFEWRDPEMGISGQLTWTRLPQGFKNSPTLFDEALHRDLADFRIQHPDLILLQYVDDLLLAATSELDCQQGTRALLQTLGNLGYRASAKKAQICQKQVKYLGYLLKEGQRWLTEARKETVMGQPTPKTPRQLREFLGTAGFCRLWIPGFAEMAAPLYPLTKTGTLFNWGPDQQKAYQEIKQALLTAPALGLPDLTKPFELFVDEKQGYAKGVLTQKLGPWRRPVAYLSKKLDPVAAGWPPCLRMVAAIAVLTKDAGKLTMGQPLVILAPHAVEALVKQPPDRWLSNARMTHYQALLLDTDRVQFGPVVALNPATLLPLPEEGLQHNCLDILAEAHGTRPDLTDQPLPDADHTWYTDGSSLLQEGQRKAGAAVTTETEVIWAKALPAGTSAQRAELIALTQALKMAEGKKLNVYTDSRYAFATAHIHGEIYRRRGLLTSEGKEIKNKDEILALLKALFLPKRLSIIHCPGHQKGHSAEARGNRMADQAARKAAITETPDTSTLLAGKRTADGSEFEKRTADGSEFESPKKKAKVE

SEQ ID NO: 2965 - protein, 2103 aa, synthetic construct
MPAAKRVKLDGGDKKYSIGLDIGTNSVGWAVITDEYKVPSKKFKVLGNTDRHSIKKNLIGALLFDSGETAEATRLKRTARRRYTRRKNRICYLQEIFSNEMAKVDDSFFHRLEESFLVEEDKKHERHPIFGNIVDEVAYHEKYPTIYHLRKKLVDSTDKADLRLIYLALAHMIKFRGHFLIEGDLNPDNSDVDKLFIQLVQTYNQLFEENPINASGVDAKAILSARLSKSRRLENLIAQLPGEKKNGLFGNLIALSLGLTPNFKSNFDLAEDAKLQLSKDTYDDDLDNLLAQIGDQYADLFLAAKNLSDAILLSDILRVNTEITKAPLSASMIKRYDEHHQDLTLLKALVRQQLPEKYKEIFFDQSKNGYAGYIDGGASQEEFYKFIKPILEKMDGTEELLVKLNREDLLRKQRTFDNGSIPHQIHLGELHAILRRQEDFYPFLKDNREKIEKILTFRIPYYVGPLARGNSRFAWMTRKSEETITPWNFEEVVDKGASAQSFIERMTNFDKNLPNEKVLPKHSLLYEYFTVYNELTKVKYVTEGMRKPAFLSGEQKKAIVDLLFKTNRKVTVKQLKEDYFKKIECFDSVEISGVEDRFNASLGTYHDLLKIIKDKDFLDNEENEDILEDIVLTLTLFEDREMIEERLKTYAHLFDDKVMKQLKRRRYTGWGRLSRKLINGIRDKQSGKTILDFLKSDGFANRNFMQLIHDDSLTFKEDIQKAQVSGQGDSLHEHIANLAGSPAIKKGILQTVKVVDELVKVMGRHKPENIVIEMARENQTTQKGQKNSRERMKRIEEGIKELGSQILKEHPVENTQLQNEKLYLYYLQNGRDMYVDQELDINRLSDYDVDHIVPQSFLKDDSIDNKVLTRSDKARGKSDNVPSEEVVKKMKNYWRQLLNAKLITQRKFDNLTKAERGGLSELDKAGFIKRQLVETRQITKHVAQILDSRMNTKYDENDKLIREVKVITLKSKLVSDFRKDFQFYKVREINNYHHAHDAYLNAVVGTALIKKYPKLESEFVYGDYKVYDVRKMIAKSEQEIGKATAKYFFYSNIMNFFKTEITLANGEIRKRPLIETNGETGEIVWDKGRDFATVRKVLSMPQVNIVKKTEVQTGGFSKESILPKRNSDKLIARKKDWDPKKYGGFDSPTVAYSVLVVAKVEKGKSKKLKSVKELLGITIMERSSFEKNPIDFLEAKGYKEVKKDLIIKLPKYSLFELENGRKRMLASAGELQKGNELALPSKYVNFLYLASHYEKLKGSPEDNEQKQLFVEQHKHYLDEIIEQISEFSKRVILADANLDKVLSAYNKHRDKPIREQAENIIHLFTLTNLGAPAAFKYFDTTIDRKRYTSTKEVLDATLIHQSITGLYETRIDLSQLGGDGGGSSGSSGSSGSSGSSGSSGGTLNIEDEHRLHETSKEPDVSLGSTWLSDFPQAWAETGGMGLAVRQAPLIIPLKATSTPVSIKQYPMSQEARLGIKPHIQRLLDQGILVPCQSPWNTPLLPVKKPGTNDYRPVQDLREVNKRVEDIHPTVPNPYNLLSGLPPSHQWYTVLDLKDAFFCLRLHPTSQPLFAFEWRDPEMGISGQLTWTRLPQGFKNSPTLFNEALHRDLADFRIQHPDLILLQYVDDLLLAATSELDCQQGTRALLQTLGNLGYRASAKKAQICQKQVKYLGYLLKEGQRWLTEARKETVMGQPTPKTPRQLREFLGTAGFCRLWIPGFAEMAAPLYPLTKPGTLFNWGPDQQKAYQEIKQALLTAPALGLPDLTKPFELFVDEKQGYAKGVLTQKLGPWRRPVAYLSKKLDPVAAGWPPCLRMVAAIAVLTKDAGKLTMGQPLVILAPHAVEALVKQPPDRWLSNARMTHYQALLLDTDRVQFGPVVALNPATLLPLPEEGLQHNCLDILAEAHGTRPDLTDQPLPDADHTWYTDGSSLLQEGQRKAGAAVTTETEVIWAKALPAGTSAQRAELIALTQALKMAEGKKLNVYTDSRYAFATAHIHGEIYRRRGWLTSEGKEIKNKDEILALLKALFLPKRLSIIHCPGHQKGHSAEARGNRMADQAARKAAITETPDTSTLLAGKRTADGSEFEKRTADGSEFESPKKKAKVE

SEQ ID NO: 2966 - protein, 2096 aa, synthetic construct; identical to SEQ ID NO: 2713

SEQ ID NO: 2967 - protein, 2091 aa, synthetic construct
MPAAKRVKLDGGDKKYSIGLDIGTNSVGWAVITDEYKVPSKKFKVLGNTDRHSIKKNLIGALLFDSGETAEATRLKRTARRRYTRRKNRICYLQEIFSNEMAKVDDSFFHRLEESFLVEEDKKHERHPIFGNIVDEVAYHEKYPTIYHLRKKLVDSTDKADLRLIYLALAHMIKFRGHFLIEGDLNPDNSDVDKLFIQLVQTYNQLFEENPINASGVDAKAILSARLSKSRRLENLIAQLPGEKKNGLFGNLIALSLGLTPNFKSNFDLAEDAKLQLSKDTYDDDLDNLLAQIGDQYADLFLAAKNLSDAILLSDILRVNTEITKAPLSASMIKRYDEHHQDLTLLKALVRQQLPEKYKEIFFDQSKNGYAGYIDGGASQEEFYKFIKPILEKMDGTEELLVKLNREDLLRKQRTFDNGSIPHQIHLGELHAILRRQEDFYPFLKDNREKIEKILTFRIPYYVGPLARGNSRFAWMTRKSEETITPWNFEEVVDKGASAQSFIERMTNFDKNLPNEKVLPKHSLLYEYFTVYNELTKVKYVTEGMRKPAFLSGEQKKAIVDLLFKTNRKVTVKQLKEDYFKKIECFDSVEISGVEDRFNASLGTYHDLLKIIKDKDFLDNEENEDILEDIVLTLTLFEDREMIEERLKTYAHLFDDKVMKQLKRRRYTGWGRLSRKLINGIRDKQSGKTILDFLKSDGFANRNFMQLIHDDSLTFKEDIQKAQVSGQGDSLHEHIANLAGSPAIKKGILQTVKVVDELVKVMGRHKPENIVIEMARENQTTQKGQKNSRERMKRIEEGIKELGSQILKEHPVENTQLQNEKLYLYYLQNGRDMYVDQELDINRLSDYDVDHIVPQSFLKDDSIDNKVLTRSDKARGKSDNVPSEEVVKKMKNYWRQLLNAKLITQRKFDNLTKAERGGLSELDKAGFIKRQLVETRQITKHVAQILDSRMNTKYDENDKLIREVKVITLKSKLVSDFRKDFQFYKVREINNYHHAHDAYLNAVVGTALIKKYPKLESEFVYGDYKVYDVRKMIAKSEQEIGKATAKYFFYSNIMNFFKTEITLANGEIRKRPLIETNGETGEIVWDKGRDFATVRKVLSMPQVNIVKKTEVQTGGFSKESILPKRNSDKLIARKKDWDPKKYGGFDSPTVAYSVLVVAKVEKGKSKKLKSVKELLGITIMERSSFEKNPIDFLEAKGYKEVKKDLIIKLPKYSLFELENGRKRMLASAGELQKGNELALPSKYVNFLYLASHYEKLKGSPEDNEQKQLFVEQHKHYLDEIIEQISEFSKRVILADANLDKVLSAYNKHRDKPIREQAENIIHLFTLTNLGAPAAFKYFDTTIDRKRYTSTKEVLDATLIHQSITGLYETRIDLSQLGGDGGGSSGGGGGTLNIEDEHRLHETSKEPDVSLGSTWLSDFPQAWAETGGMGLAVRQAPLIIPLKATSTPVSIKQYPMSQEARLGIKPHIQRLLDQGILVPCQSPWNTPLLPVKKPGTNDYRPVQDLREVNKRVEDIHPTVPNPYNLLSGLPPSHQWYTVLDLKDAFFCLRLHPTSQPLFAFEWRDPEMGISGQLTWTRLPQGFKNSPTLFNEALHRDLADFRIQHPDLILLQYVDDLLLAATSELDCQQGTRALLQTLGNLGYRASAKKAQICQKQVKYLGYLLKEGQRWLTEARKETVMGQPTPKTPRQLREFLGTAGFCRLWIPGFAEMAAPLYPLTKPGTLFNWGPDQQKAYQEIKQALLTAPALGLPDLTKPFELFVDEKQGYAKGVLTQKLGPWRRPVAYLSKKLDPVAAGWPPCLRMVAAIAVLTKDAGKLTMGQPLVILAPHAVEALVKQPPDRWLSNARMTHYQALLLDTDRVQFGPVVALNPATLLPLPEEGLQHNCLDILAEAHGTRPDLTDQPLPDADHTWYTDGSSLLQEGQRKAGAAVTTETEVIWAKALPAGTSAQRAELIALTQALKMAEGKKLNVYTDSRYAFATAHIHGEIYRRRGWLTSEGKEIKNKDEILALLKALFLPKRLSIIHCPGHQKGHSAEARGNRMADQAARKAAITETPDTSTLLAGKRTADGSEFEKRTADGSEFESPKKKAKVE

SEQ ID NO: 2968 - protein, 2105 aa, synthetic construct; identical to SEQ ID NO: 2771

SEQ ID NO: 2969 - protein, 2096 aa, synthetic construct; identical to SEQ ID NO: 2753

SEQ ID NO: 2970 - protein, 2096 aa, synthetic construct
MPAAKRVKLDGGDKKYSIGLDIGTNSVGWAVITDEYKVPSKKFKVLGNTDRHSIKKNLIGALLFDSGETAEATRLKRTARRRYTRRKNRICYLQEIFSNEMAKVDDSFFHRLEESFLVEEDKKHERHPIFGNIVDEVAYHEKYPTIYHLRKKLVDSTDKADLRLIYLALAHMIKFRGHFLIEGDLNPDNSDVDKLFIQLVQTYNQLFEENPINASGVDAKAILSARLSKSRRLENLIAQLPGEKKNGLFGNLIALSLGLTPNFKSNFDLAEDAKLQLSKDTYDDDLDNLLAQIGDQYADLFLAAKNLSDAILLSDILRVNTEITKAPLSASMIKRYDEHHQDLTLLKALVRQQLPEKYKEIFFDQSKNGYAGYIDGGASQEEFYKFIKPILEKMDGTEELLVKLNREDLLRKQRTFDNGSIPHQIHLGELHAILRRQEDFYPFLKDNREKIEKILTFRIPYYVGPLARGNSRFAWMTRKSEETITPWNFEEVVDKGASAQSFIERMTNFDKNLPNEKVLPKHSLLYEYFTVYNELTKVKYVTEGMRKPAFLSGEQKKAIVDLLFKTNRKVTVKQLKEDYFKKIECFDSVEISGVEDRFNASLGTYHDLLKIIKDKDFLDNEENEDILEDIVLTLTLFEDREMIEERLKTYAHLFDDKVMKQLKRRRYTGWGRLSRKLINGIRDKQSGKTILDFLKSDGFANRNFMQLIHDDSLTFKEDIQKAQVSGQGDSLHEHIANLAGSPAIKKGILQTVKVVDELVKVMGRHKPENIVIEMARENQTTQKGQKNSRERMKRIEEGIKELGSQILKEHPVENTQLQNEKLYLYYLQNGRDMYVDQELDINRLSDYDVDHIVPQSFLKDDSIDNKVLTRSDKARGKSDNVPSEEVVKKMKNYWRQLLNAKLITQRKFDNLTKAERGGLSELDKAGFIKRQLVETRQITKHVAQILDSRMNTKYDENDKLIREVKVITLKSKLVSDFRKDFQFYKVREINNYHHAHDAYLNAVVGTALIKKYPKLESEFVYGDYKVYDVRKMIAKSEQEIGKATAKYFFYSNIMNFFKTEITLANGEIRKRPLIETNGETGEIVWDKGRDFATVRKVLSMPQVNIVKKTEVQTGGFSKESILPKRNSDKLIARKKDWDPKKYGGFDSPTVAYSVLVVAKVEKGKSKKLKSVKELLGITIMERSSFEKNPIDFLEAKGYKEVKKDLIIKLPKYSLFELENGRKRMLASAGELQKGNELALPSKYVNFLYLASHYEKLKGSPEDNEQKQLFVEQHKHYLDEIIEQISEFSKRVILADANLDKVLSAYNKHRDKPIREQAENIIHLFTLTNLGAPAAFKYFDTTIDRKRYTSTKEVLDATLIHQSITGLYETRIDLSQLGGDGGPAPAPAPAPAPGGTLNIEDEHRLHETSKEPDVSLGSTWLSDFPQAWAETGGMGLAVRQAPLIIPLKATSTPVSIKQYPMSQEARLGIKPHIQRLLDQGILVPCQSPWNTPLLPVKKPGTNDYRPVQDLREVNKRVEDIHPTVPNPYNLLSGLPPSHQWYTVLDLKDAFFCLRLHPTSQPLFAFEWRDPEMGISGQLTWTRLPQGFKNSPTLFNEALHRDLADFRIQHPDLILLQYVDDLLLAATSELDCQQGTRALLQTLGNLGYRASAKKAQICQKQVKYLGYLLKEGQRWLTEARKETVMGQPTPKTPRQLREFLGTAGFCRLWIPGFAEMAAPLYPLTKPGTLFNWGPDQQKAYQEIKQALLTAPALGLPDLTKPFELFVDEKQGYAKGVLTQKLGPWRRPVAYLSKKLDPVAAGWPPCLRMVAAIAVLTKDAGKLTMGQPLVILAPHAVEALVKQPPDRWLSNARMTHYQALLLDTDRVQFGPVVALNPATLLPLPEEGLQHNCLDILAEAHGTRPDLTDQPLPDADHTWYTDGSSLLQEGQRKAGAAVTTETEVIWAKALPAGTSAQRAELIALTQALKMAEGKKLNVYTDSRYAFATAHIHGEIYRRRGWLTSEGKEIKNKDEILALLKALFLPKRLSIIHCPGHQKGHSAEARGNRMADQAARKAAITETPDTSTLLAGKRTADGSEFEKRTADGSEFESPKKKAKVE

SEQ ID NO: 2971 - protein, 2093 aa, synthetic construct; identical to SEQ ID NO: 2724

SEQ ID NO: 2972 - protein, 2131 aa, synthetic construct; identical to SEQ ID NO: 2711

SEQ ID NO: 2973 - protein, 2088 aa, synthetic construct
MPAAKRVKLDGGDKKYSIGLDIGTNSVGWAVITDEYKVPSKKFKVLGNTDRHSIKKNLIGALLFDSGETAEATRLKRTARRRYTRRKNRICYLQEIFSNEMAKVDDSFFHRLEESFLVEEDKKHERHPIFGNIVDEVAYHEKYPTIYHLRKKLVDSTDKADLRLIYLALAHMIKFRGHFLIEGDLNPDNSDVDKLFIQLVQTYNQLFEENPINASGVDAKAILSARLSKSRRLENLIAQLPGEKKNGLFGNLIALSLGLTPNFKSNFDLAEDAKLQLSKDTYDDDLDNLLAQIGDQYADLFLAAKNLSDAILLSDILRVNTEITKAPLSASMIKRYDEHHQDLTLLKALVRQQLPEKYKEIFFDQSKNGYAGYIDGGASQEEFYKFIKPILEKMDGTEELLVKLNREDLLRKQRTFDNGSIPHQIHLGELHAILRRQEDFYPFLKDNREKIEKILTFRIPYYVGPLARGNSRFAWMTRKSEETITPWNFEEVVDKGASAQSFIERMTNFDKNLPNEKVLPKHSLLYEYFTVYNELTKVKYVTEGMRKPAFLSGEQKKAIVDLLFKTNRKVTVKQLKEDYFKKIECFDSVEISGVEDRFNASLGTYHDLLKIIKDKDFLDNEENEDILEDIVLTLTLFEDREMIEERLKTYAHLFDDKVMKQLKRRRYTGWGRLSRKLINGIRDKQSGKTILDFLKSDGFANRNFMQLIHDDSLTFKEDIQKAQVSGQGDSLHEHIANLAGSPAIKKGILQTVKVVDELVKVMGRHKPENIVIEMARENQTTQKGQKNSRERMKRIEEGIKELGSQILKEHPVENTQLQNEKLYLYYLQNGRDMYVDQELDINRLSDYDVDHIVPQSFLKDDSIDNKVLTRSDKARGKSDNVPSEEVVKKMKNYWRQLLNAKLITQRKFDNLTKAERGGLSELDKAGFIKRQLVETRQITKHVAQILDSRMNTKYDENDKLIREVKVITLKSKLVSDFRKDFQFYKVREINNYHHAHDAYLNAVVGTALIKKYPKLESEFVYGDYKVYDVRKMIAKSEQEIGKATAKYFFYSNIMNFFKTEITLANGEIRKRPLIETNGETGEIVWDKGRDFATVRKVLSMPQVNIVKKTEVQTGGFSKESILPKRNSDKLIARKKDWDPKKYGGFDSPTVAYSVLVVAKVEKGKSKKLKSVKELLGITIMERSSFEKNPIDFLEAKGYKEVKKDLIIKLPKYSLFELENGRKRMLASAGELQKGNELALPSKYVNFLYLASHYEKLKGSPEDNEQKQLFVEQHKHYLDEIIEQISEFSKRVILADANLDKVLSAYNKHRDKPIREQAENIIHLFTLTNLGAPAAFKYFDTTIDRKRYTSTKEVLDATLIHQSITGLYETRIDLSQLGGDGGPAPGGTLNIEDEHRLHETSKEPDVSLGSTWLSDFPQAWAETGGMGLAVRQAPLIIPLKATSTPVSIKQYPMSQEARLGIKPHIQRLLDQGILVPCQSPWNTPLLPVKKPGTNDYRPVQDLREVNKRVEDIHPTVPNPYNLLSGLPPSHQWYTVLDLKDAFFCLRLHPTSQPLFAFEWRDPEMGISGQLTWTRLPQGFKNSPTLFNEALHRDLADFRIQHPDLILLQYVDDLLLAATSELDCQQGTRALLQTLGNLGYRASAKKAQICQKQVKYLGYLLKEGQRWLTEARKETVMGQPTPKTPRQLREFLGTAGFCRLWIPGFAEMAAPLYPLTKPGTLFNWGPDQQKAYQEIKQALLTAPALGLPDLTKPFELFVDEKQGYAKGVLTQKLGPWRRPVAYLSKKLDPVAAGWPPCLRMVAAIAVLTKDAGKLTMGQPLVILAPHAVEALVKQPPDRWLSNARMTHYQALLLDTDRVQFGPVVALNPATLLPLPEEGLQHNCLDILAEAHGTRPDLTDQPLPDADHTWYTDGSSLLQEGQRKAGAAVTTETEVIWAKALPAGTSAQRAELIALTQALKMAEGKKLNVYTDSRYAFATAHIHGEIYRRRGWLTSEGKEIKNKDEILALLKALFLPKRLSIIHCPGHQKGHSAEARGNRMADQAARKAAITETPDTSTLLAGKRTADGSEFEKRTADGSEFESPKKKAKVE

SEQ ID NO: 2974 - protein, 2098 aa, synthetic construct
MPAAKRVKLDGGDKKYSIGLDIGTNSVGWAVITDEYKVPSKKFKVLGNTDRHSIKKNLIGALLFDSGETAEATRLKRTARRRYTRRKNRICYLQEIFSNEMAKVDDSFFHRLEESFLVEEDKKHERHPIFGNIVDEVAYHEKYPTIYHLRKKLVDSTDKADLRLIYLALAHMIKFRGHFLIEGDLNPDNSDVDKLFIQLVQTYNQLFEENPINASGVDAKAILSARLSKSRRLENLIAQLPGEKKNGLFGNLIALSLGLTPNFKSNFDLAEDAKLQLSKDTYDDDLDNLLAQIGDQYADLFLAAKNLSDAILLSDILRVNTEITKAPLSASMIKRYDEHHQDLTLLKALVRQQLPEKYKEIFFDQSKNGYAGYIDGGASQEEFYKFIKPILEKMDGTEELLVKLNREDLLRKQRTFDNGSIPHQIHLGELHAILRRQEDFYPFLKDNREKIEKILTFRIPYYVGPLARGNSRFAWMTRKSEETITPWNFEEVVDKGASAQSFIERMTNFDKNLPNEKVLPKHSLLYEYFTVYNELTKVKYVTEGMRKPAFLSGEQKKAIVDLLFKTNRKVTVKQLKEDYFKKIECFDSVEISGVEDRFNASLGTYHDLLKIIKDKDFLDNEENEDILEDIVLTLTLFEDREMIEERLKTYAHLFDDKVMKQLKRRRYTGWGRLSRKLINGIRDKQSGKTILDFLKSDGFANRNFMQLIHDDSLTFKEDIQKAQVSGQGDSLHEHIANLAGSPAIKKGILQTVKVVDELVKVMGRHKPENIVIEMARENQTTQKGQKNSRERMKRIEEGIKELGSQILKEHPVENTQLQNEKLYLYYLQNGRDMYVDQELDINRLSDYDVDHIVPQSFLKDDSIDNKVLTRSDKARGKSDNVPSEEVVKKMKNYWRQLLNAKLITQRKFDNLTKAERGGLSELDKAGFIKRQLVETRQITKHVAQILDSRMNTKYDENDKLIREVKVITLKSKLVSDFRKDFQFYKVREINNYHHAHDAYLNAVVGTALIKKYPKLESEFVYGDYKVYDVRKMIAKSEQEIGKATAKYFFYSNIMNFFKTEITLANGEIRKRPLIETNGETGEIVWDKGRDFATVRKVLSMPQVNIVKKTEVQTGGFSKESILPKRNSDKLIARKKDWDPKKYGGFDSPTVAYSVLVVAKVEKGKSKKLKSVKELLGITIMERSSFEKNPIDFLEAKGYKEVKKDLIIKLPKYSLFELENGRKRMLASAGELQKGNELALPSKYVNFLYLASHYEKLKGSPEDNEQKQLFVEQHKHYLDEIIEQISEFSKRVILADANLDKVLSAYNKHRDKPIREQAENIIHLFTLTNLGAPAAFKYFDTTIDRKRYTSTKEVLDATLIHQSITGLYETRIDLSQLGGDGGPAPAPAPAPAPAPGGTLNIEDEHRLHETSKEPDVSLGSTWLSDFPQAWAETGGMGLAVRQAPLIIPLKATSTPVSIKQYPMSQEARLGIKPHIQRLLDQGILVPCQSPWNTPLLPVKKPGTNDYRPVQDLREVNKRVEDIHPTVPNPYNLLSGLPPSHQWYTVLDLKDAFFCLRLHPTSQPLFAFEWRDPEMGISGQLTWTRLPQGFKNSPTLFNEALHRDLADFRIQHPDLILLQYVDDLLLAATSELDCQQGTRALLQTLGNLGYRASAKKAQICQKQVKYLGYLLKEGQRWLTEARKETVMGQPTPKTPRQLREFLGTAGFCRLWIPGFAEMAAPLYPLTKPGTLFNWGPDQQKAYQEIKQALLTAPALGLPDLTKPFELFVDEKQGYAKGVLTQKLGPWRRPVAYLSKKLDPVAAGWPPCLRMVAAIAVLTKDAGKLTMGQPLVILAPHAVEALVKQPPDRWLSNARMTHYQALLLDTDRVQFGPVVALNPATLLPLPEEGLQHNCLDILAEAHGTRPDLTDQPLPDADHTWYTDGSSLLQEGQRKAGAAVTTETEVIWAKALPAGTSAQRAELIALTQALKMAEGKKLNVYTDSRYAFATAHIHGEIYRRRGWLTSEGKEIKNKDEILALLKALFLPKRLSIIHCPGHQKGHSAEARGNRMADQAARKAAITETPDTSTLLAGKRTADGSEFEKRTADGSEFESPKKKAKVE

SEQ ID NO: 2975 - protein, 2091 aa, synthetic construct
MPAAKRVKLDGGDKKYSIGLDIGTNSVGWAVITDEYKVPSKKFKVLGNTDRHSIKKNLIGALLFDSGETAEATRLKRTARRRYTRRKNRICYLQEIFSNEMAKVDDSFFHRLEESFLVEEDKKHERHPIFGNIVDEVAYHEKYPTIYHLRKKLVDSTDKADLRLIYLALAHMIKFRGHFLIEGDLNPDNSDVDKLFIQLVQTYNQLFEENPINASGVDAKAILSARLSKSRRLENLIAQLPGEKKNGLFGNLIALSLGLTPNFKSNFDLAEDAKLQLSKDTYDDDLDNLLAQIGDQYADLFLAAKNLSDAILLSDILRVNTEITKAPLSASMIKRYDEHHQDLTLLKALVRQQLPEKYKEIFFDQSKNGYAGYIDGGASQEEFYKFIKPILEKMDGTEELLVKLNREDLLRKQRTFDNGSIPHQIHLGELHAILRRQEDFYPFLKDNREKIEKILTFRIPYYVGPLARGNSRFAWMTRKSEETITPWNFEEVVDKGASAQSFIERMTNFDKNLPNEKVLPKHSLLYEYFTVYNELTKVKYVTEGMRKPAFLSGEQKKAIVDLLFKTNRKVTVKQLKEDYFKKIECFDSVEISGVEDRFNASLGTYHDLLKIIKDKDFLDNEENEDILEDIVLTLTLFEDREMIEERLKTYAHLFDDKVMKQLKRRRYTGWGRLSRKLINGIRDKQSGKTILDFLKSDGFANRNFMQLIHDDSLTFKEDIQKAQVSGQGDSLHEHIANLAGSPAIKKGILQTVKVVDELVKVMGRHKPENIVIEMARENQTTQKGQKNSRERMKRIEEGIKELGSQILKEHPVENTQLQNEKLYLYYLQNGRDMYVDQELDINRLSDYDVDHIVPQSFLKDDSIDNKVLTRSDKARGKSDNVPSEEVVKKMKNYWRQLLNAKLITQRKFDNLTKAERGGLSELDKAGFIKRQLVETRQITKHVAQILDSRMNTKYDENDKLIREVKVITLKSKLVSDFRKDFQFYKVREINNYHHAHDAYLNAVVGTALIKKYPKLESEFVYGDYKVYDVRKMIAKSEQEIGKATAKYFFYSNIMNFFKTEITLANGEIRKRPLIETNGETGEIVWDKGRDFATVRKVLSMPQVNIVKKTEVQTGGFSKESILPKRNSDKLIARKKDWDPKKYGGFDSPTVAYSVLVVAKVEKGKSKKLKSVKELLGITIMERSSFEKNPIDFLEAKGYKEVKKDLIIKLPKYSLFELENGRKRMLASAGELQKGNELALPSKYVNFLYLASHYEKLKGSPEDNEQKQLFVEQHKHYLDEIIEQISEFSKRVILADANLDKVLSAYNKHRDKPIREQAENIIHLFTLTNLGAPAAFKYFDTTIDRKRYTSTKEVLDATLIHQSITGLYETRIDLSQLGGDGGGGGGGGGGTLNIEDEHRLHETSKEPDVSLGSTWLSDFPQAWAETGGMGLAVRQAPLIIPLKATSTPVSIKQYPMSQEARLGIKPHIQRLLDQGILVPCQSPWNTPLLPVKKPGTNDYRPVQDLREVNKRVEDIHPTVPNPYNLLSGLPPSHQWYTVLDLKDAFFCLRLHPTSQPLFAFEWRDPEMGISGQLTWTRLPQGFKNSPTLFNEALHRDLADFRIQHPDLILLQYVDDLLLAATSELDCQQGTRALLQTLGNLGYRASAKKAQICQKQVKYLGYLLKEGQRWLTEARKETVMGQPTPKTPRQLREFLGTAGFCRLWIPGFAEMAAPLYPLTKPGTLFNWGPDQQKAYQEIKQALLTAPALGLPDLTKPFELFVDEKQGYAKGVLTQKLGPWRRPVAYLSKKLDPVAAGWPPCLRMVAAIAVLTKDAGKLTMGQPLVILAPHAVEALVKQPPDRWLSNARMTHYQALLLDTDRVQFGPVVALNPATLLPLPEEGLQHNCLDILAEAHGTRPDLTDQPLPDADHTWYTDGSSLLQEGQRKAGAAVTTETEVIWAKALPAGTSAQRAELIALTQALKMAEGKKLNVYTDSRYAFATAHIHGEIYRRRGWLTSEGKEIKNKDEILALLKALFLPKRLSIIHCPGHQKGHSAEARGNRMADQAARKAAITETPDTSTLLAGKRTADGSEFEKRTADGSEFESPKKKAKVE

SEQ ID NO: 2976 - protein, 2096 aa, synthetic construct; identical to SEQ ID NO: 2723

SEQ ID NO: 2977 - protein, 2096 aa, synthetic construct; identical to SEQ ID NO: 2777

SEQ ID NO: 2978 - protein, 2093 aa, synthetic construct
MPAAKRVKLDGGDKKYSIGLDIGTNSVGWAVITDEYKVPSKKFKVLGNTDRHSIKKNLIGALLFDSGETAEATRLKRTARRRYTRRKNRICYLQEIFSNEMAKVDDSFFHRLEESFLVEEDKKHERHPIFGNIVDEVAYHEKYPTIYHLRKKLVDSTDKADLRLIYLALAHMIKFRGHFLIEGDLNPDNSDVDKLFIQLVQTYNQLFEENPINASGVDAKAILSARLSKSRRLENLIAQLPGEKKNGLFGNLIALSLGLTPNFKSNFDLAEDAKLQLSKDTYDDDLDNLLAQIGDQYADLFLAAKNLSDAILLSDILRVNTEITKAPLSASMIKRYDEHHQDLTLLKALVRQQLPEKYKEIFFDQSKNGYAGYIDGGASQEEFYKFIKPILEKMDGTEELLVKLNREDLLRKQRTFDNGSIPHQIHLGELHAILRRQEDFYPFLKDNREKIEKILTFRIPYYVGPLARGNSRFAWMTRKSEETITPWNFEEVVDKGASAQSFIERMTNFDKNLPNEKVLPKHSLLYEYFTVYNELTKVKYVTEGMRKPAFLSGEQKKAIVDLLFKTNRKVTVKQLKEDYFKKIECFDSVEISGVEDRFNASLGTYHDLLKIIKDKDFLDNEENEDILEDIVLTLTLFEDREMIEERLKTYAHLFDDKVMKQLKRRRYTGWGRLSRKLINGIRDKQSGKTILDFLKSDGFANRNFMQLIHDDSLTFKEDIQKAQVSGQGDSLHEHIANLAGSPAIKKGILQTVKVVDELVKVMGRHKPENIVIEMARENQTTQKGQKNSRERMKRIEEGIKELGSQILKEHPVENTQLQNEKLYLYYLQNGRDMYVDQELDINRLSDYDVDHIVPQSFLKDDSIDNKVLTRSDKARGKSDNVPSEEVVKKMKNYWRQLLNAKLITQRKFDNLTKAERGGLSELDKAGFIKRQLVETRQITKHVAQILDSRMNTKYDENDKLIREVKVITLKSKLVSDFRKDFQFYKVREINNYHHAHDAYLNAVVGTALIKKYPKLESEFVYGDYKVYDVRKMIAKSEQEIGKATAKYFFYSNIMNFFKTEITLANGEIRKRPLIETNGETGEIVWDKGRDFATVRKVLSMPQVNIVKKTEVQTGGFSKESILPKRNSDKLIARKKDWDPKKYGGFDSPTVAYSVLVVAKVEKGKSKKLKSVKELLGITIMERSSFEKNPIDFLEAKGYKEVKKDLIIKLPKYSLFELENGRKRMLASAGELQKGNELALPSKYVNFLYLASHYEKLKGSPEDNEQKQLFVEQHKHYLDEIIEQISEFSKRVILADANLDKVLSAYNKHRDKPIREQAENIIHLFTLTNLGAPAAFKYFDTTIDRKRYTSTKEVLDATLIHQSITGLYETRIDLSQLGGDGGEAAAKGGGGGTLNIEDEHRLHETSKEPDVSLGSTWLSDFPQAWAETGGMGLAVRQAPLIIPLKATSTPVSIKQYPMSQEARLGIKPHIQRLLDQGILVPCQSPWNTPLLPVKKPGTNDYRPVQDLREVNKRVEDIHPTVPNPYNLLSGLPPSHQWYTVLDLKDAFFCLRLHPTSQPLFAFEWRDPEMGISGQLTWTRLPQGFKNSPTLFNEALHRDLADFRIQHPDLILLQYVDDLLLAATSELDCQQGTRALLQTLGNLGYRASAKKAQICQKQVKYLGYLLKEGQRWLTEARKETVMGQPTPKTPRQLREFLGTAGFCRLWIPGFAEMAAPLYPLTKPGTLFNWGPDQQKAYQEIKQALLTAPALGLPDLTKPFELFVDEKQGYAKGVLTQKLGPWRRPVAYLSKKLDPVAAGWPPCLRMVAAIAVLTKDAGKLTMGQPLVILAPHAVEALVKQPPDRWLSNARMTHYQALLLDTDRVQFGPVVALNPATLLPLPEEGLQHNCLDILAEAHGTRPDLTDQPLPDADHTWYTDGSSLLQEGQRKAGAAVTTETEVIWAKALPAGTSAQRAELIALTQALKMAEGKKLNVYTDSRYAFATAHIHGEIYRRRGWLTSEGKEIKNKDEILALLKALFLPKRLSIIHCPGHQKGHSAEARGNRMADQAARKAAITETPDTSTLLAGKRTADGSEFEKRTADGSEFESPKKKAKVE

SEQ ID NO: 2979 - protein, 2094 aa, synthetic construct
MPAAKRVKLDGGDKKYSIGLDIGTNSVGWAVITDEYKVPSKKFKVLGNTDRHSIKKNLIGALLFDSGETAEATRLKRTARRRYTRRKNRICYLQEIFSNEMAKVDDSFFHRLEESFLVEEDKKHERHPIFGNIVDEVAYHEKYPTIYHLRKKLVDSTDKADLRLIYLALAHMIKFRGHFLIEGDLNPDNSDVDKLFIQLVQTYNQLFEENPINASGVDAKAILSARLSKSRRLENLIAQLPGEKKNGLFGNLIALSLGLTPNFKSNFDLAEDAKLQLSKDTYDDDLDNLLAQIGDQYADLFLAAKNLSDAILLSDILRVNTEITKAPLSASMIKRYDEHHQDLTLLKALVRQQLPEKYKEIFFDQSKNGYAGYIDGGASQEEFYKFIKPILEKMDGTEELLVKLNREDLLRKQRTFDNGSIPHQIHLGELHAILRRQEDFYPFLKDNREKIEKILTFRIPYYVGPLARGNSRFAWMTRKSEETITPWNFEEVVDKGASAQSFIERMTNFDKNLPNEKVLPKHSLLYEYFTVYNELTKVKYVTEGMRKPAFLSGEQKKAIVDLLFKTNRKVTVKQLKEDYFKKIECFDSVEISGVEDRFNASLGTYHDLLKIIKDKDFLDNEENEDILEDIVLTLTLFEDREMIEERLKTYAHLFDDKVMKQLKRRRYTGWGRLSRKLINGIRDKQSGKTILDFLKSDGFANRNFMQLIHDDSLTFKEDIQKAQVSGQGDSLHEHIANLAGSPAIKKGILQTVKVVDELVKVMGRHKPENIVIEMARENQTTQKGQKNSRERMKRIEEGIKELGSQILKEHPVENTQLQNEKLYLYYLQNGRDMYVDQELDINRLSDYDVDHIVPQSFLKDDSIDNKVLTRSDKARGKSDNVPSEEVVKKMKNYWRQLLNAKLITQRKFDNLTKAERGGLSELDKAGFIKRQLVETRQITKHVAQILDSRMNTKYDENDKLIREVKVITLKSKLVSDFRKDFQFYKVREINNYHHAHDAYLNAVVGTALIKKYPKLESEFVYGDYKVYDVRKMIAKSEQEIGKATAKYFFYSNIMNFFKTEITLANGEIRKRPLIETNGETGEIVWDKGRDFATVRKVLSMPQVNIVKKTEVQTGGFSKESILPKRNSDKLIARKKDWDPKKYGGFDSPTVAYSVLVVAKVEKGKSKKLKSVKELLGITIMERSSFEKNPIDFLEAKGYKEVKKDLIIKLPKYSLFELENGRKRMLASAGELQKGNELALPSKYVNFLYLASHYEKLKGSPEDNEQKQLFVEQHKHYLDEIIEQISEFSKRVILADANLDKVLSAYNKHRDKPIREQAENIIHLFTLTNLGAPAAFKYFDTTIDRKRYTSTKEVLDATLIHQSITGLYETRIDLSQLGGDGGGGSGSSGGGGGTLNIEDEHRLHETSKEPDVSLGSTWLSDFPQAWAETGGMGLAVRQAPLIIPLKATSTPVSIKQYPMSQEARLGIKPHIQRLLDQGILVPCQSPWNTPLLPVKKPGTNDYRPVQDLREVNKRVEDIHPTVPNPYNLLSGLPPSHQWYTVLDLKDAFFCLRLHPTSQPLFAFEWRDPEMGISGQLTWTRLPQGFKNSPTLFNEALHRDLADFRIQHPDLILLQYVDDLLLAATSELDCQQGTRALLQTLGNLGYRASAKKAQICQKQVKYLGYLLKEGQRWLTEARKETVMGQPTPKTPRQLREFLGTAGFCRLWIPGFAEMAAPLYPLTKPGTLFNWGPDQQKAYQEIKQALLTAPALGLPDLTKPFELFVDEKQGYAKGVLTQKLGPWRRPVAYLSKKLDPVAAGWPPCLRMVAAIAVLTKDAGKLTMGQPLVILAPHAVEALVKQPPDRWLSNARMTHYQALLLDTDRVQFGPVVALNPATLLPLPEEGLQHNCLDILAEAHGTRPDLTDQPLPDADHTWYTDGSSLLQEGQRKAGAAVTTETEVIWAKALPAGTSAQRAELIALTQALKMAEGKKLNVYTDSRYAFATAHIHGEIYRRRGWLTSEGKEIKNKDEILALLKALFLPKRLSIIHCPGHQKGHSAEARGNRMADQAARKAAITETPDTSTLLAGKRTADGSEFEKRTADGSEFESPKKKAKVE

SEQ ID NO: 2980 - protein, 2092 aa, synthetic construct
MPAAKRVKLDGGDKKYSIGLDIGTNSVGWAVITDEYKVPSKKFKVLGNTDRHSIKKNLIGALLFDSGETAEATRLKRTARRRYTRRKNRICYLQEIFSNEMAKVDDSFFHRLEESFLVEEDKKHERHPIFGNIVDEVAYHEKYPTIYHLRKKLVDSTDKADLRLIYLALAHMIKFRGHFLIEGDLNPDNSDVDKLFIQLVQTYNQLFEENPINASGVDAKAILSARLSKSRRLENLIAQLPGEKKNGLFGNLIALSLGLTPNFKSNFDLAEDAKLQLSKDTYDDDLDNLLAQIGDQYADLFLAAKNLSDAILLSDILRVNTEITKAPLSASMIKRYDEHHQDLTLLKALVRQQLPEKYKEIFFDQSKNGYAGYIDGGASQEEFYKFIKPILEKMDGTEELLVKLNREDLLRKQRTFDNGSIPHQIHLGELHAILRRQEDFYPFLKDNREKIEKILTFRIPYYVGPLARGNSRFAWMTRKSEETITPWNFEEVVDKGASAQSFIERMTNFDKNLPNEKVLPKHSLLYEYFTVYNELTKVKYVTEGMRKPAFLSGEQKKAIVDLLFKTNRKVTVKQLKEDYFKKIECFDSVEISGVEDRFNASLGTYHDLLKIIKDKDFLDNEENEDILEDIVLTLTLFEDREMIEERLKTYAHLFDDKVMKQLKRRRYTGWGRLSRKLINGIRDKQSGKTILDFLKSDGFANRNFMQLIHDDSLTFKEDIQKAQVSGQGDSLHEHIANLAGSPAIKKGILQTVKVVDELVKVMGRHKPENIVIEMARENQTTQKGQKNSRERMKRIEEGIKELGSQILKEHPVENTQLQNEKLYLYYLQNGRDMYVDQELDINRLSDYDVDHIVPQSFLKDDSIDNKVLTRSDKARGKSDNVPSEEVVKKMKNYWRQLLNAKLITQRKFDNLTKAERGGLSELDKAGFIKRQLVETRQITKHVAQILDSRMNTKYDENDKLIREVKVITLKSKLVSDFRKDFQFYKVREINNYHHAHDAYLNAVVGTALIKKYPKLESEFVYGDYKVYDVRKMIAKSEQEIGKATAKYFFYSNIMNFFKTEITLANGEIRKRPLIETNGETGEIVWDKGRDFATVRKVLSMPQVNIVKKTEVQTGGFSKESILPKRNSDKLIARKKDWDPKKYGGFDSPTVAYSVLVVAKVEKGKSKKLKSVKELLGITIMERSSFEKNPIDFLEAKGYKEVKKDLIIKLPKYSLFELENGRKRMLASAGELQKGNELALPSKYVNFLYLASHYEKLKGSPEDNEQKQLFVEQHKHYLDEIIEQISEFSKRVILADANLDKVLSAYNKHRDKPIREQAENIIHLFTLTNLGAPAAFKYFDTTIDRKRYTSTKEVLDATLIHQSITGLYETRIDLSQLGGDGGPAPAPAPGGTLNIEDEHRLHETSKEPDVSLGSTWLSDFPQAWAETGGMGLAVRQAPLIIPLKATSTPVSIKQYPMSQEARLGIKPHIQRLLDQGILVPCQSPWNTPLLPVKKPGTNDYRPVQDLREVNKRVEDIHPTVPNPYNLLSGLPPSHQWYTVLDLKDAFFCLRLHPTSQPLFAFEWRDPEMGISGQLTWTRLPQGFKNSPTLFNEALHRDLADFRIQHPDLILLQYVDDLLLAATSELDCQQGTRALLQTLGNLGYRASAKKAQICQKQVKYLGYLLKEGQRWLTEARKETVMGQPTPKTPRQLREFLGTAGFCRLWIPGFAEMAAPLYPLTKPGTLFNWGPDQQKAYQEIKQALLTAPALGLPDLTKPFELFVDEKQGYAKGVLTQKLGPWRRPVAYLSKKLDPVAAGWPPCLRMVAAIAVLTKDAGKLTMGQPLVILAPHAVEALVKQPPDRWLSNARMTHYQALLLDTDRVQFGPVVALNPATLLPLPEEGLQHNCLDILAEAHGTRPDLTDQPLPDADHTWYTDGSSLLQEGQRKAGAAVTTETEVIWAKALPAGTSAQRAELIALTQALKMAEGKKLNVYTDSRYAFATAHIHGEIYRRRGWLTSEGKEIKNKDEILALLKALFLPKRLSIIHCPGHQKGHSAEARGNRMADQAARKAAITETPDTSTLLAGKRTADGSEFEKRTADGSEFESPKKKAKVE

SEQ ID NO: 2981 - protein, 2100 aa, synthetic construct
MPAAKRVKLDGGDKKYSIGLDIGTNSVGWAVITDEYKVPSKKFKVLGNTDRHSIKKNLIGALLFDSGETAEATRLKRTARRRYTRRKNRICYLQEIFSNEMAKVDDSFFHRLEESFLVEEDKKHERHPIFGNIVDEVAYHEKYPTIYHLRKKLVDSTDKADLRLIYLALAHMIKFRGHFLIEGDLNPDNSDVDKLFIQLVQTYNQLFEENPINASGVDAKAILSARLSKSRRLENLIAQLPGEKKNGLFGNLIALSLGLTPNFKSNFDLAEDAKLQLSKDTYDDDLDNLLAQIGDQYADLFLAAKNLSDAILLSDILRVNTEITKAPLSASMIKRYDEHHQDLTLLKALVRQQLPEKYKEIFFDQSKNGYAGYIDGGASQEEFYKFIKPILEKMDGTEELLVKLNREDLLRKQRTFDNGSIPHQIHLGELHAILRRQEDFYPFLKDNREKIEKILTFRIPYYVGPLARGNSRFAWMTRKSEETITPWNFEEVVDKGASAQSFIERMTNFDKNLPNEKVLPKHSLLYEYFTVYNELTKVKYVTEGMRKPAFLSGEQKKAIVDLLFKTNRKVTVKQLKEDYFKKIECFDSVEISGVEDRFNASLGTYHDLLKIIKDKDFLDNEENEDILEDIVLTLTLFEDREMIEERLKTYAHLFDDKVMKQLKRRRYTGWGRLSRKLINGIRDKQSGKTILDFLKSDGFANRNFMQLIHDDSLTFKEDIQKAQVSGQGDSLHEHIANLAGSPAIKKGILQTVKVVDELVKVMGRHKPENIVIEMARENQTTQKGQKNSRERMKRIEEGIKELGSQILKEHPVENTQLQNEKLYLYYLQNGRDMYVDQELDINRLSDYDVDHIVPQSFLKDDSIDNKVLTRSDKARGKSDNVPSEEVVKKMKNYWRQLLNAKLITQRKFDNLTKAERGGLSELDKAGFIKRQLVETRQITKHVAQILDSRMNTKYDENDKLIREVKVITLKSKLVSDFRKDFQFYKVREINNYHHAHDAYLNAVVGTALIKKYPKLESEFVYGDYKVYDVRKMIAKSEQEIGKATAKYFFYSNIMNFFKTEITLANGEIRKRPLIETNGETGEIVWDKGRDFATVRKVLSMPQVNIVKKTEVQTGGFSKESILPKRNSDKLIARKKDWDPKKYGGFDSPTVAYSVLVVAKVEKGKSKKLKSVKELLGITIMERSSFEKNPIDFLEAKGYKEVKKDLIIKLPKYSLFELENGRKRMLASAGELQKGNELALPSKYVNFLYLASHYEKLKGSPEDNEQKQLFVEQHKHYLDEIIEQISEFSKRVILADANLDKVLSAYNKHRDKPIREQAENIIHLFTLTNLGAPAAFKYFDTTIDRKRYTSTKEVLDATLIHQSITGLYETRIDLSQLGGDGGGGSGGSGGSGGSGGSGGTLNIEDEHRLHETSKEPDVSLGSTWLSDFPQAWAETGGMGLAVRQAPLIIPLKATSTPVSIKQYPMSQEARLGIKPHIQRLLDQGILVPCQSPWNTPLLPVKKPGTNDYRPVQDLREVNKRVEDIHPTVPNPYNLLSGLPPSHQWYTVLDLKDAFFCLRLHPTSQPLFAFEWRDPEMGISGQLTWTRLPQGFKNSPTLFNEALHRDLADFRIQHPDLILLQYVDDLLLAATSELDCQQGTRALLQTLGNLGYRASAKKAQICQKQVKYLGYLLKEGQRWLTEARKETVMGQPTPKTPRQLREFLGTAGFCRLWIPGFAEMAAPLYPLTKPGTLFNWGPDQQKAYQEIKQALLTAPALGLPDLTKPFELFVDEKQGYAKGVLTQKLGPWRRPVAYLSKKLDPVAAGWPPCLRMVAAIAVLTKDAGKLTMGQPLVILAPHAVEALVKQPPDRWLSNARMTHYQALLLDTDRVQFGPVVALNPATLLPLPEEGLQHNCLDILAEAHGTRPDLTDQPLPDADHTWYTDGSSLLQEGQRKAGAAVTTETEVIWAKALPAGTSAQRAELIALTQALKMAEGKKLNVYTDSRYAFATAHIHGEIYRRRGWLTSEGKEIKNKDEILALLKALFLPKRLSIIHCPGHQKGHSAEARGNRMADQAARKAAITETPDTSTLLAGKRTADGSEFEKRTADGSEFESPKKKAKVE

SEQ ID NO: 2982 - protein, 2093 aa, synthetic construct; identical to SEQ ID NO: 2726

SEQ ID NO: 2983 - protein, 2115 aa, synthetic construct; identical to SEQ ID NO: 2741

SEQ ID NO: 2984 - protein, 2090 aa, synthetic construct
MPAAKRVKLDGGDKKYSIGLDIGTNSVGWAVITDEYKVPSKKFKVLGNTDRHSIKKNLIGALLFDSGETAEATRLKRTARRRYTRRKNRICYLQEIFSNEMAKVDDSFFHRLEESFLVEEDKKHERHPIFGNIVDEVAYHEKYPTIYHLRKKLVDSTDKADLRLIYLALAHMIKFRGHFLIEGDLNPDNSDVDKLFIQLVQTYNQLFEENPINASGVDAKAILSARLSKSRRLENLIAQLPGEKKNGLFGNLIALSLGLTPNFKSNFDLAEDAKLQLSKDTYDDDLDNLLAQIGDQYADLFLAAKNLSDAILLSDILRVNTEITKAPLSASMIKRYDEHHQDLTLLKALVRQQLPEKYKEIFFDQSKNGYAGYIDGGASQEEFYKFIKPILEKMDGTEELLVKLNREDLLRKQRTFDNGSIPHQIHLGELHAILRRQEDFYPFLKDNREKIEKILTFRIPYYVGPLARGNSRFAWMTRKSEETITPWNFEEVVDKGASAQSFIERMTNFDKNLPNEKVLPKHSLLYEYFTVYNELTKVKYVTEGMRKPAFLSGEQKKAIVDLLFKTNRKVTVKQLKEDYFKKIECFDSVEISGVEDRFNASLGTYHDLLKIIKDKDFLDNEENEDILEDIVLTLTLFEDREMIEERLKTYAHLFDDKVMKQLKRRRYTGWGRLSRKLINGIRDKQSGKTILDFLKSDGFANRNFMQLIHDDSLTFKEDIQKAQVSGQGDSLHEHIANLAGSPAIKKGILQTVKVVDELVKVMGRHKPENIVIEMARENQTTQKGQKNSRERMKRIEEGIKELGSQILKEHPVENTQLQNEKLYLYYLQNGRDMYVDQELDINRLSDYDVDHIVPQSFLKDDSIDNKVLTRSDKARGKSDNVPSEEVVKKMKNYWRQLLNAKLITQRKFDNLTKAERGGLSELDKAGFIKRQLVETRQITKHVAQILDSRMNTKYDENDKLIREVKVITLKSKLVSDFRKDFQFYKVREINNYHHAHDAYLNAVVGTALIKKYPKLESEFVYGDYKVYDVRKMIAKSEQEIGKATAKYFFYSNIMNFFKTEITLANGEIRKRPLIETNGETGEIVWDKGRDFATVRKVLSMPQVNIVKKTEVQTGGFSKESILPKRNSDKLIARKKDWDPKKYGGFDSPTVAYSVLVVAKVEKGKSKKLKSVKELLGITIMERSSFEKNPIDFLEAKGYKEVKKDLIIKLPKYSLFELENGRKRMLASAGELQKGNELALPSKYVNFLYLASHYEKLKGSPEDNEQKQLFVEQHKHYLDEIIEQISEFSKRVILADANLDKVLSAYNKHRDKPIREQAENIIHLFTLTNLGAPAAFKYFDTTIDRKRYTSTKEVLDATLIHQSITGLYETRIDLSQLGGDGGGGGGGGGTLNIEDEHRLHETSKEPDVSLGSTWLSDFPQAWAETGGMGLAVRQAPLIIPLKATSTPVSIKQYPMSQEARLGIKPHIQRLLDQGILVPCQSPWNTPLLPVKKPGTNDYRPVQDLREVNKRVEDIHPTVPNPYNLLSGLPPSHQWYTVLDLKDAFFCLRLHPTSQPLFAFEWRDPEMGISGQLTWTRLPQGFKNSPTLFNEALHRDLADFRIQHPDLILLQYVDDLLLAATSELDCQQGTRALLQTLGNLGYRASAKKAQICQKQVKYLGYLLKEGQRWLTEARKETVMGQPTPKTPRQLREFLGTAGFCRLWIPGFAEMAAPLYPLTKPGTLFNWGPDQQKAYQEIKQALLTAPALGLPDLTKPFELFVDEKQGYAKGVLTQKLGPWRRPVAYLSKKLDPVAAGWPPCLRMVAAIAVLTKDAGKLTMGQPLVILAPHAVEALVKQPPDRWLSNARMTHYQALLLDTDRVQFGPVVALNPATLLPLPEEGLQHNCLDILAEAHGTRPDLTDQPLPDADHTWYTDGSSLLQEGQRKAGAAVTTETEVIWAKALPAGTSAQRAELIALTQALKMAEGKKLNVYTDSRYAFATAHIHGEIYRRRGWLTSEGKEIKNKDEILALLKALFLPKRLSIIHCPGHQKGHSAEARGNRMADQAARKAAITETPDTSTLLAGKRTADGSEFEKRTADGSEFESPKKKAKVE

SEQ ID NO: 2985 - protein, 2094 aa, synthetic construct
MPAAKRVKLDGGDKKYSIGLDIGTNSVGWAVITDEYKVPSKKFKVLGNTDRHSIKKNLIGALLFDSGETAEATRLKRTARRRYTRRKNRICYLQEIFSNEMAKVDDSFFHRLEESFLVEEDKKHERHPIFGNIVDEVAYHEKYPTIYHLRKKLVDSTDKADLRLIYLALAHMIKFRGHFLIEGDLNPDNSDVDKLFIQLVQTYNQLFEENPINASGVDAKAILSARLSKSRRLENLIAQLPGEKKNGLFGNLIALSLGLTPNFKSNFDLAEDAKLQLSKDTYDDDLDNLLAQIGDQYADLFLAAKNLSDAILLSDILRVNTEITKAPLSASMIKRYDEHHQDLTLLKALVRQQLPEKYKEIFFDQSKNGYAGYIDGGASQEEFYKFIKPILEKMDGTEELLVKLNREDLLRKQRTFDNGSIPHQIHLGELHAILRRQEDFYPFLKDNREKIEKILTFRIPYYVGPLARGNSRFAWMTRKSEETITPWNFEEVVDKGASAQSFIERMTNFDKNLPNEKVLPKHSLLYEYFTVYNELTKVKYVTEGMRKPAFLSGEQKKAIVDLLFKTNRKVTVKQLKEDYFKKIECFDSVEISGVEDRFNASLGTYHDLLKIIKDKDFLDNEENEDILEDIVLTLTLFEDREMIEERLKTYAHLFDDKVMKQLKRRRYTGWGRLSRKLINGIRDKQSGKTILDFLKSDGFANRNFMQLIHDDSLTFKEDIQKAQVSGQGDSLHEHIANLAGSPAIKKGILQTVKVVDELVKVMGRHKPENIVIEMARENQTTQKGQKNSRERMKRIEEGIKELGSQILKEHPVENTQLQNEKLYLYYLQNGRDMYVDQELDINRLSDYDVDHIVPQSFLKDDSIDNKVLTRSDKARGKSDNVPSEEVVKKMKNYWRQLLNAKLITQRKFDNLTKAERGGLSELDKAGFIKRQLVETRQITKHVAQILDSRMNTKYDENDKLIREVKVITLKSKLVSDFRKDFQFYKVREINNYHHAHDAYLNAVVGTALIKKYPKLESEFVYGDYKVYDVRKMIAKSEQEIGKATAKYFFYSNIMNFFKTEITLANGEIRKRPLIETNGETGEIVWDKGRDFATVRKVLSMPQVNIVKKTEVQTGGFSKESILPKRNSDKLIARKKDWDPKKYGGFDSPTVAYSVLVVAKVEKGKSKKLKSVKELLGITIMERSSFEKNPIDFLEAKGYKEVKKDLIIKLPKYSLFELENGRKRMLASAGELQKGNELALPSKYVNFLYLASHYEKLKGSPEDNEQKQLFVEQHKHYLDEIIEQISEFSKRVILADANLDKVLSAYNKHRDKPIREQAENIIHLFTLTNLGAPAAFKYFDTTIDRKRYTSTKEVLDATLIHQSITGLYETRIDLSQLGGDGGGGSGSSPAPGGTLNIEDEHRLHETSKEPDVSLGSTWLSDFPQAWAETGGMGLAVRQAPLIIPLKATSTPVSIKQYPMSQEARLGIKPHIQRLLDQGILVPCQSPWNTPLLPVKKPGTNDYRPVQDLREVNKRVEDIHPTVPNPYNLLSGLPPSHQWYTVLDLKDAFFCLRLHPTSQPLFAFEWRDPEMGISGQLTWTRLPQGFKNSPTLFNEALHRDLADFRIQHPDLILLQYVDDLLLAATSELDCQQGTRALLQTLGNLGYRASAKKAQICQKQVKYLGYLLKEGQRWLTEARKETVMGQPTPKTPRQLREFLGTAGFCRLWIPGFAEMAAPLYPLTKPGTLFNWGPDQQKAYQEIKQALLTAPALGLPDLTKPFELFVDEKQGYAKGVLTQKLGPWRRPVAYLSKKLDPVAAGWPPCLRMVAAIAVLTKDAGKLTMGQPLVILAPHAVEALVKQPPDRWLSNARMTHYQALLLDTDRVQFGPVVALNPATLLPLPEEGLQHNCLDILAEAHGTRPDLTDQPLPDADHTWYTDGSSLLQEGQRKAGAAVTTETEVIWAKALPAGTSAQRAELIALTQALKMAEGKKLNVYTDSRYAFATAHIHGEIYRRRGWLTSEGKEIKNKDEILALLKALFLPKRLSIIHCPGHQKGHSAEARGNRMADQAARKAAITETPDTSTLLAGKRTADGSEFEKRTADGSEFESPKKKAKVE

SEQ ID NO: 2986 - protein, 2088 aa, synthetic construct
MPAAKRVKLDGGDKKYSIGLDIGTNSVGWAVITDEYKVPSKKFKVLGNTDRHSIKKNLIGALLFDSGETAEATRLKRTARRRYTRRKNRICYLQEIFSNEMAKVDDSFFHRLEESFLVEEDKKHERHPIFGNIVDEVAYHEKYPTIYHLRKKLVDSTDKADLRLIYLALAHMIKFRGHFLIEGDLNPDNSDVDKLFIQLVQTYNQLFEENPINASGVDAKAILSARLSKSRRLENLIAQLPGEKKNGLFGNLIALSLGLTPNFKSNFDLAEDAKLQLSKDTYDDDLDNLLAQIGDQYADLFLAAKNLSDAILLSDILRVNTEITKAPLSASMIKRYDEHHQDLTLLKALVRQQLPEKYKEIFFDQSKNGYAGYIDGGASQEEFYKFIKPILEKMDGTEELLVKLNREDLLRKQRTFDNGSIPHQIHLGELHAILRRQEDFYPFLKDNREKIEKILTFRIPYYVGPLARGNSRFAWMTRKSEETITPWNFEEVVDKGASAQSFIERMTNFDKNLPNEKVLPKHSLLYEYFTVYNELTKVKYVTEGMRKPAFLSGEQKKAIVDLLFKTNRKVTVKQLKEDYFKKIECFDSVEISGVEDRFNASLGTYHDLLKIIKDKDFLDNEENEDILEDIVLTLTLFEDREMIEERLKTYAHLFDDKVMKQLKRRRYTGWGRLSRKLINGIRDKQSGKTILDFLKSDGFANRNFMQLIHDDSLTFKEDIQKAQVSGQGDSLHEHIANLAGSPAIKKGILQTVKVVDELVKVMGRHKPENIVIEMARENQTTQKGQKNSRERMKRIEEGIKELGSQILKEHPVENTQLQNEKLYLYYLQNGRDMYVDQELDINRLSDYDVDHIVPQSFLKDDSIDNKVLTRSDKARGKSDNVPSEEVVKKMKNYWRQLLNAKLITQRKFDNLTKAERGGLSELDKAGFIKRQLVETRQITKHVAQILDSRMNTKYDENDKLIREVKVITLKSKLVSDFRKDFQFYKVREINNYHHAHDAYLNAVVGTALIKKYPKLESEFVYGDYKVYDVRKMIAKSEQEIGKATAKYFFYSNIMNFFKTEITLANGEIRKRPLIETNGETGEIVWDKGRDFATVRKVLSMPQVNIVKKTEVQTGGFSKESILPKRNSDKLIARKKDWDPKKYGGFDSPTVAYSVLVVAKVEKGKSKKLKSVKELLGITIMERSSFEKNPIDFLEAKGYKEVKKDLIIKLPKYSLFELENGRKRMLASAGELQKGNELALPSKYVNFLYLASHYEKLKGSPEDNEQKQLFVEQHKHYLDEIIEQISEFSKRVILADANLDKVLSAYNKHRDKPIREQAENIIHLFTLTNLGAPAAFKYFDTTIDRKRYTSTKEVLDATLIHQSITGLYETRIDLSQLGGDGGGSSGGTLNIEDEHRLHETSKEPDVSLGSTWLSDFPQAWAETGGMGLAVRQAPLIIPLKATSTPVSIKQYPMSQEARLGIKPHIQRLLDQGILVPCQSPWNTPLLPVKKPGTNDYRPVQDLREVNKRVEDIHPTVPNPYNLLSGLPPSHQWYTVLDLKDAFFCLRLHPTSQPLFAFEWRDPEMGISGQLTWTRLPQGFKNSPTLFNEALHRDLADFRIQHPDLILLQYVDDLLLAATSELDCQQGTRALLQTLGNLGYRASAKKAQICQKQVKYLGYLLKEGQRWLTEARKETVMGQPTPKTPRQLREFLGTAGFCRLWIPGFAEMAAPLYPLTKPGTLFNWGPDQQKAYQEIKQALLTAPALGLPDLTKPFELFVDEKQGYAKGVLTQKLGPWRRPVAYLSKKLDPVAAGWPPCLRMVAAIAVLTKDAGKLTMGQPLVILAPHAVEALVKQPPDRWLSNARMTHYQALLLDTDRVQFGPVVALNPATLLPLPEEGLQHNCLDILAEAHGTRPDLTDQPLPDADHTWYTDGSSLLQEGQRKAGAAVTTETEVIWAKALPAGTSAQRAELIALTQALKMAEGKKLNVYTDSRYAFATAHIHGEIYRRRGWLTSEGKEIKNKDEILALLKALFLPKRLSIIHCPGHQKGHSAEARGNRMADQAARKAAITETPDTSTLLAGKRTADGSEFEKRTADGSEFESPKKKAKVE

SEQ ID NO: 2987 - protein, 2096 aa, synthetic construct; identical to SEQ ID NO: 2776

SEQ ID NO: 2988 - protein, 2094 aa, synthetic construct
MPAAKRVKLDGGDKKYSIGLDIGTNSVGWAVITDEYKVPSKKFKVLGNTDRHSIKKNLIGALLFDSGETAEATRLKRTARRRYTRRKNRICYLQEIFSNEMAKVDDSFFHRLEESFLVEEDKKHERHPIFGNIVDEVAYHEKYPTIYHLRKKLVDSTDKADLRLIYLALAHMIKFRGHFLIEGDLNPDNSDVDKLFIQLVQTYNQLFEENPINASGVDAKAILSARLSKSRRLENLIAQLPGEKKNGLFGNLIALSLGLTPNFKSNFDLAEDAKLQLSKDTYDDDLDNLLAQIGDQYADLFLAAKNLSDAILLSDILRVNTEITKAPLSASMIKRYDEHHQDLTLLKALVRQQLPEKYKEIFFDQSKNGYAGYIDGGASQEEFYKFIKPILEKMDGTEELLVKLNREDLLRKQRTFDNGSIPHQIHLGELHAILRRQEDFYPFLKDNREKIEKILTFRIPYYVGPLARGNSRFAWMTRKSEETITPWNFEEVVDKGASAQSFIERMTNFDKNLPNEKVLPKHSLLYEYFTVYNELTKVKYVTEGMRKPAFLSGEQKKAIVDLLFKTNRKVTVKQLKEDYFKKIECFDSVEISGVEDRFNASLGTYHDLLKIIKDKDFLDNEENEDILEDIVLTLTLFEDREMIEERLKTYAHLFDDKVMKQLKRRRYTGWGRLSRKLINGIRDKQSGKTILDFLKSDGFANRNFMQLIHDDSLTFKEDIQKAQVSGQGDSLHEHIANLAGSPAIKKGILQTVKVVDELVKVMGRHKPENIVIEMARENQTTQKGQKNSRERMKRIEEGIKELGSQILKEHPVENTQLQNEKLYLYYLQNGRDMYVDQELDINRLSDYDVDHIVPQSFLKDDSIDNKVLTRSDKARGKSDNVPSEEVVKKMKNYWRQLLNAKLITQRKFDNLTKAERGGLSELDKAGFIKRQLVETRQITKHVAQILDSRMNTKYDENDKLIREVKVITLKSKLVSDFRKDFQFYKVREINNYHHAHDAYLNAVVGTALIKKYPKLESEFVYGDYKVYDVRKMIAKSEQEIGKATAKYFFYSNIMNFFKTEITLANGEIRKRPLIETNGETGEIVWDKGRDFATVRKVLSMPQVNIVKKTEVQTGGFSKESILPKRNSDKLIARKKDWDPKKYGGFDSPTVAYSVLVVAKVEKGKSKKLKSVKELLGITIMERSSFEKNPIDFLEAKGYKEVKKDLIIKLPKYSLFELENGRKRMLASAGELQKGNELALPSKYVNFLYLASHYEKLKGSPEDNEQKQLFVEQHKHYLDEIIEQISEFSKRVILADANLDKVLSAYNKHRDKPIREQAENIIHLFTLTNLGAPAAFKYFDTTIDRKRYTSTKEVLDATLIHQSITGLYETRIDLSQLGGDGGGSSPAPGGGGGTLNIEDEHRLHETSKEPDVSLGSTWLSDFPQAWAETGGMGLAVRQAPLIIPLKATSTPVSIKQYPMSQEARLGIKPHIQRLLDQGILVPCQSPWNTPLLPVKKPGTNDYRPVQDLREVNKRVEDIHPTVPNPYNLLSGLPPSHQWYTVLDLKDAFFCLRLHPTSQPLFAFEWRDPEMGISGQLTWTRLPQGFKNSPTLFNEALHRDLADFRIQHPDLILLQYVDDLLLAATSELDCQQGTRALLQTLGNLGYRASAKKAQICQKQVKYLGYLLKEGQRWLTEARKETVMGQPTPKTPRQLREFLGTAGFCRLWIPGFAEMAAPLYPLTKPGTLFNWGPDQQKAYQEIKQALLTAPALGLPDLTKPFELFVDEKQGYAKGVLTQKLGPWRRPVAYLSKKLDPVAAGWPPCLRMVAAIAVLTKDAGKLTMGQPLVILAPHAVEALVKQPPDRWLSNARMTHYQALLLDTDRVQFGPVVALNPATLLPLPEEGLQHNCLDILAEAHGTRPDLTDQPLPDADHTWYTDGSSLLQEGQRKAGAAVTTETEVIWAKALPAGTSAQRAELIALTQALKMAEGKKLNVYTDSRYAFATAHIHGEIYRRRGWLTSEGKEIKNKDEILALLKALFLPKRLSIIHCPGHQKGHSAEARGNRMADQAARKAAITETPDTSTLLAGKRTADGSEFEKRTADGSEFESPKKKAKVE

SEQ ID NO: 2989 - protein, 2096 aa, synthetic construct; identical to SEQ ID NO: 2727

SEQ ID NO: 2990 - protein, 2096 aa, synthetic construct; identical to SEQ ID NO: 2764

SEQ ID NO: 2991 - protein, 2110 aa, synthetic construct; identical to SEQ ID NO: 2716

SEQ ID NO: 2992 - protein, 2115 aa, synthetic construct
MPAAKRVKLDGGDKKYSIGLDIGTNSVGWAVITDEYKVPSKKFKVLGNTDRHSIKKNLIGALLFDSGETAEATRLKRTARRRYTRRKNRICYLQEIFSNEMAKVDDSFFHRLEESFLVEEDKKHERHPIFGNIVDEVAYHEKYPTIYHLRKKLVDSTDKADLRLIYLALAHMIKFRGHFLIEGDLNPDNSDVDKLFIQLVQTYNQLFEENPINASGVDAKAILSARLSKSRRLENLIAQLPGEKKNGLFGNLIALSLGLTPNFKSNFDLAEDAKLQLSKDTYDDDLDNLLAQIGDQYADLFLAAKNLSDAILLSDILRVNTEITKAPLSASMIKRYDEHHQDLTLLKALVRQQLPEKYKEIFFDQSKNGYAGYIDGGASQEEFYKFIKPILEKMDGTEELLVKLNREDLLRKQRTFDNGSIPHQIHLGELHAILRRQEDFYPFLKDNREKIEKILTFRIPYYVGPLARGNSRFAWMTRKSEETITPWNFEEVVDKGASAQSFIERMTNFDKNLPNEKVLPKHSLLYEYFTVYNELTKVKYVTEGMRKPAFLSGEQKKAIVDLLFKTNRKVTVKQLKEDYFKKIECFDSVEISGVEDRFNASLGTYHDLLKIIKDKDFLDNEENEDILEDIVLTLTLFEDREMIEERLKTYAHLFDDKVMKQLKRRRYTGWGRLSRKLINGIRDKQSGKTILDFLKSDGFANRNFMQLIHDDSLTFKEDIQKAQVSGQGDSLHEHIANLAGSPAIKKGILQTVKVVDELVKVMGRHKPENIVIEMARENQTTQKGQKNSRERMKRIEEGIKELGSQILKEHPVENTQLQNEKLYLYYLQNGRDMYVDQELDINRLSDYDVDHIVPQSFLKDDSIDNKVLTRSDKARGKSDNVPSEEVVKKMKNYWRQLLNAKLITQRKFDNLTKAERGGLSELDKAGFIKRQLVETRQITKHVAQILDSRMNTKYDENDKLIREVKVITLKSKLVSDFRKDFQFYKVREINNYHHAHDAYLNAVVGTALIKKYPKLESEFVYGDYKVYDVRKMIAKSEQEIGKATAKYFFYSNIMNFFKTEITLANGEIRKRPLIETNGETGEIVWDKGRDFATVRKVLSMPQVNIVKKTEVQTGGFSKESILPKRNSDKLIARKKDWDPKKYGGFDSPTVAYSVLVVAKVEKGKSKKLKSVKELLGITIMERSSFEKNPIDFLEAKGYKEVKKDLIIKLPKYSLFELENGRKRMLASAGELQKGNELALPSKYVNFLYLASHYEKLKGSPEDNEQKQLFVEQHKHYLDEIIEQISEFSKRVILADANLDKVLSAYNKHRDKPIREQAENIIHLFTLTNLGAPAAFKYFDTTIDRKRYTSTKEVLDATLIHQSITGLYETRIDLSQLGGDGGEAAAKEAAAKEAAAKEAAAKEAAAKEAAAKGGTLNIEDEHRLHETSKEPDVSLGSTWLSDFPQAWAETGGMGLAVRQAPLIIPLKATSTPVSIKQYPMSQEARLGIKPHIQRLLDQGILVPCQSPWNTPLLPVKKPGTNDYRPVQDLREVNKRVEDIHPTVPNPYNLLSGLPPSHQWYTVLDLKDAFFCLRLHPTSQPLFAFEWRDPEMGISGQLTWTRLPQGFKNSPTLFNEALHRDLADFRIQHPDLILLQYVDDLLLAATSELDCQQGTRALLQTLGNLGYRASAKKAQICQKQVKYLGYLLKEGQRWLTEARKETVMGQPTPKTPRQLREFLGTAGFCRLWIPGFAEMAAPLYPLTKPGTLFNWGPDQQKAYQEIKQALLTAPALGLPDLTKPFELFVDEKQGYAKGVLTQKLGPWRRPVAYLSKKLDPVAAGWPPCLRMVAAIAVLTKDAGKLTMGQPLVILAPHAVEALVKQPPDRWLSNARMTHYQALLLDTDRVQFGPVVALNPATLLPLPEEGLQHNCLDILAEAHGTRPDLTDQPLPDADHTWYTDGSSLLQEGQRKAGAAVTTETEVIWAKALPAGTSAQRAELIALTQALKMAEGKKLNVYTDSRYAFATAHIHGEIYRRRGWLTSEGKEIKNKDEILALLKALFLPKRLSIIHCPGHQKGHSAEARGNRMADQAARKAAITETPDTSTLLAGKRTADGSEFEKRTADGSEFESPKKKAKVE

SEQ ID NO: 2993 - protein, 2094 aa, synthetic construct; identical to SEQ ID NO: 2766

SEQ ID NO: 2994 - protein, 2094 aa, synthetic construct; identical to SEQ ID NO: 2773

SEQ ID NO: 2995 - protein, 2097 aa, synthetic construct
MPAAKRVKLDGGDKKYSIGLDIGTNSVGWAVITDEYKVPSKKFKVLGNTDRHSIKKNLIGALLFDSGETAEATRLKRTARRRYTRRKNRICYLQEIFSNEMAKVDDSFFHRLEESFLVEEDKKHERHPIFGNIVDEVAYHEKYPTIYHLRKKLVDSTDKADLRLIYLALAHMIKFRGHFLIEGDLNPDNSDVDKLFIQLVQTYNQLFEENPINASGVDAKAILSARLSKSRRLENLIAQLPGEKKNGLFGNLIALSLGLTPNFKSNFDLAEDAKLQLSKDTYDDDLDNLLAQIGDQYADLFLAAKNLSDAILLSDILRVNTEITKAPLSASMIKRYDEHHQDLTLLKALVRQQLPEKYKEIFFDQSKNGYAGYIDGGASQEEFYKFIKPILEKMDGTEELLVKLNREDLLRKQRTFDNGSIPHQIHLGELHAILRRQEDFYPFLKDNREKIEKILTFRIPYYVGPLARGNSRFAWMTRKSEETITPWNFEEVVDKGASAQSFIERMTNFDKNLPNEKVLPKHSLLYEYFTVYNELTKVKYVTEGMRKPAFLSGEQKKAIVDLLFKTNRKVTVKQLKEDYFKKIECFDSVEISGVEDRFNASLGTYHDLLKIIKDKDFLDNEENEDILEDIVLTLTLFEDREMIEERLKTYAHLFDDKVMKQLKRRRYTGWGRLSRKLINGIRDKQSGKTILDFLKSDGFANRNFMQLIHDDSLTFKEDIQKAQVSGQGDSLHEHIANLAGSPAIKKGILQTVKVVDELVKVMGRHKPENIVIEMARENQTTQKGQKNSRERMKRIEEGIKELGSQILKEHPVENTQLQNEKLYLYYLQNGRDMYVDQELDINRLSDYDVDHIVPQSFLKDDSIDNKVLTRSDKARGKSDNVPSEEVVKKMKNYWRQLLNAKLITQRKFDNLTKAERGGLSELDKAGFIKRQLVETRQITKHVAQILDSRMNTKYDENDKLIREVKVITLKSKLVSDFRKDFQFYKVREINNYHHAHDAYLNAVVGTALIKKYPKLESEFVYGDYKVYDVRKMIAKSEQEIGKATAKYFFYSNIMNFFKTEITLANGEIRKRPLIETNGETGEIVWDKGRDFATVRKVLSMPQVNIVKKTEVQTGGFSKESILPKRNSDKLIARKKDWDPKKYGGFDSPTVAYSVLVVAKVEKGKSKKLKSVKELLGITIMERSSFEKNPIDFLEAKGYKEVKKDLIIKLPKYSLFELENGRKRMLASAGELQKGNELALPSKYVNFLYLASHYEKLKGSPEDNEQKQLFVEQHKHYLDEIIEQISEFSKRVILADANLDKVLSAYNKHRDKPIREQAENIIHLFTLTNLGAPAAFKYFDTTIDRKRYTSTKEVLDATLIHQSITGLYETRIDLSQLGGDGGGSAGSAAGSGEFGGTLNIEDEHRLHETSKEPDVSLGSTWLSDFPQAWAETGGMGLAVRQAPLIIPLKATSTPVSIKQYPMSQEARLGIKPHIQRLLDQGILVPCQSPWNTPLLPVKKPGTNDYRPVQDLREVNKRVEDIHPTVPNPYNLLSGLPPSHQWYTVLDLKDAFFCLRLHPTSQPLFAFEWRDPEMGISGQLTWTRLPQGFKNSPTLFNEALHRDLADFRIQHPDLILLQYVDDLLLAATSELDCQQGTRALLQTLGNLGYRASAKKAQICQKQVKYLGYLLKEGQRWLTEARKETVMGQPTPKTPRQLREFLGTAGFCRLWIPGFAEMAAPLYPLTKPGTLFNWGPDQQKAYQEIKQALLTAPALGLPDLTKPFELFVDEKQGYAKGVLTQKLGPWRRPVAYLSKKLDPVAAGWPPCLRMVAAIAVLTKDAGKLTMGQPLVILAPHAVEALVKQPPDRWLSNARMTHYQALLLDTDRVQFGPVVALNPATLLPLPEEGLQHNCLDILAEAHGTRPDLTDQPLPDADHTWYTDGSSLLQEGQRKAGAAVTTETEVIWAKALPAGTSAQRAELIALTQALKMAEGKKLNVYTDSRYAFATAHIHGEIYRRRGWLTSEGKEIKNKDEILALLKALFLPKRLSIIHCPGHQKGHSAEARGNRMADQAARKAAITETPDTSTLLAGKRTADGSEFEKRTADGSEFESPKKKAKVE

SEQ ID NO: 2996 - protein, 2091 aa, synthetic construct
MPAAKRVKLDGGDKKYSIGLDIGTNSVGWAVITDEYKVPSKKFKVLGNTDRHSIKKNLIGALLFDSGETAEATRLKRTARRRYTRRKNRICYLQEIFSNEMAKVDDSFFHRLEESFLVEEDKKHERHPIFGNIVDEVAYHEKYPTIYHLRKKLVDSTDKADLRLIYLALAHMIKFRGHFLIEGDLNPDNSDVDKLFIQLVQTYNQLFEENPINASGVDAKAILSARLSKSRRLENLIAQLPGEKKNGLFGNLIALSLGLTPNFKSNFDLAEDAKLQLSKDTYDDDLDNLLAQIGDQYADLFLAAKNLSDAILLSDILRVNTEITKAPLSASMIKRYDEHHQDLTLLKALVRQQLPEKYKEIFFDQSKNGYAGYIDGGASQEEFYKFIKPILEKMDGTEELLVKLNREDLLRKQRTFDNGSIPHQIHLGELHAILRRQEDFYPFLKDNREKIEKILTFRIPYYVGPLARGNSRFAWMTRKSEETITPWNFEEVVDKGASAQSFIERMTNFDKNLPNEKVLPKHSLLYEYFTVYNELTKVKYVTEGMRKPAFLSGEQKKAIVDLLFKTNRKVTVKQLKEDYFKKIECFDSVEISGVEDRFNASLGTYHDLLKIIKDKDFLDNEENEDILEDIVLTLTLFEDREMIEERLKTYAHLFDDKVMKQLKRRRYTGWGRLSRKLINGIRDKQSGKTILDFLKSDGFANRNFMQLIHDDSLTFKEDIQKAQVSGQGDSLHEHIANLAGSPAIKKGILQTVKVVDELVKVMGRHKPENIVIEMARENQTTQKGQKNSRERMKRIEEGIKELGSQILKEHPVENTQLQNEKLYLYYLQNGRDMYVDQELDINRLSDYDVDHIVPQSFLKDDSIDNKVLTRSDKARGKSDNVPSEEVVKKMKNYWRQLLNAKLITQRKFDNLTKAERGGLSELDKAGFIKRQLVETRQITKHVAQILDSRMNTKYDENDKLIREVKVITLKSKLVSDFRKDFQFYKVREINNYHHAHDAYLNAVVGTALIKKYPKLESEFVYGDYKVYDVRKMIAKSEQEIGKATAKYFFYSNIMNFFKTEITLANGEIRKRPLIETNGETGEIVWDKGRDFATVRKVLSMPQVNIVKKTEVQTGGFSKESILPKRNSDKLIARKKDWDPKKYGGFDSPTVAYSVLVVAKVEKGKSKKLKSVKELLGITIMERSSFEKNPIDFLEAKGYKEVKKDLIIKLPKYSLFELENGRKRMLASAGELQKGNELALPSKYVNFLYLASHYEKLKGSPEDNEQKQLFVEQHKHYLDEIIEQISEFSKRVILADANLDKVLSAYNKHRDKPIREQAENIIHLFTLTNLGAPAAFKYFDTTIDRKRYTSTKEVLDATLIHQSITGLYETRIDLSQLGGDGGPAPGSSGGTLNIEDEHRLHETSKEPDVSLGSTWLSDFPQAWAETGGMGLAVRQAPLIIPLKATSTPVSIKQYPMSQEARLGIKPHIQRLLDQGILVPCQSPWNTPLLPVKKPGTNDYRPVQDLREVNKRVEDIHPTVPNPYNLLSGLPPSHQWYTVLDLKDAFFCLRLHPTSQPLFAFEWRDPEMGISGQLTWTRLPQGFKNSPTLFNEALHRDLADFRIQHPDLILLQYVDDLLLAATSELDCQQGTRALLQTLGNLGYRASAKKAQICQKQVKYLGYLLKEGQRWLTEARKETVMGQPTPKTPRQLREFLGTAGFCRLWIPGFAEMAAPLYPLTKPGTLFNWGPDQQKAYQEIKQALLTAPALGLPDLTKPFELFVDEKQGYAKGVLTQKLGPWRRPVAYLSKKLDPVAAGWPPCLRMVAAIAVLTKDAGKLTMGQPLVILAPHAVEALVKQPPDRWLSNARMTHYQALLLDTDRVQFGPVVALNPATLLPLPEEGLQHNCLDILAEAHGTRPDLTDQPLPDADHTWYTDGSSLLQEGQRKAGAAVTTETEVIWAKALPAGTSAQRAELIALTQALKMAEGKKLNVYTDSRYAFATAHIHGEIYRRRGWLTSEGKEIKNKDEILALLKALFLPKRLSIIHCPGHQKGHSAEARGNRMADQAARKAAITETPDTSTLLAGKRTADGSEFEKRTADGSEFESPKKKAKVE

SEQ ID NO: 2997 - protein, 2096 aa, synthetic construct
MPAAKRVKLDGGDKKYSIGLDIGTNSVGWAVITDEYKVPSKKFKVLGNTDRHSIKKNLIGALLFDSGETAEATRLKRTARRRYTRRKNRICYLQEIFSNEMAKVDDSFFHRLEESFLVEEDKKHERHPIFGNIVDEVAYHEKYPTIYHLRKKLVDSTDKADLRLIYLALAHMIKFRGHFLIEGDLNPDNSDVDKLFIQLVQTYNQLFEENPINASGVDAKAILSARLSKSRRLENLIAQLPGEKKNGLFGNLIALSLGLTPNFKSNFDLAEDAKLQLSKDTYDDDLDNLLAQIGDQYADLFLAAKNLSDAILLSDILRVNTEITKAPLSASMIKRYDEHHQDLTLLKALVRQQLPEKYKEIFFDQSKNGYAGYIDGGASQEEFYKFIKPILEKMDGTEELLVKLNREDLLRKQRTFDNGSIPHQIHLGELHAILRRQEDFYPFLKDNREKIEKILTFRIPYYVGPLARGNSRFAWMTRKSEETITPWNFEEVVDKGASAQSFIERMTNFDKNLPNEKVLPKHSLLYEYFTVYNELTKVKYVTEGMRKPAFLSGEQKKAIVDLLFKTNRKVTVKQLKEDYFKKIECFDSVEISGVEDRFNASLGTYHDLLKIIKDKDFLDNEENEDILEDIVLTLTLFEDREMIEERLKTYAHLFDDKVMKQLKRRRYTGWGRLSRKLINGIRDKQSGKTILDFLKSDGFANRNFMQLIHDDSLTFKEDIQKAQVSGQGDSLHEHIANLAGSPAIKKGILQTVKVVDELVKVMGRHKPENIVIEMARENQTTQKGQKNSRERMKRIEEGIKELGSQILKEHPVENTQLQNEKLYLYYLQNGRDMYVDQELDINRLSDYDVDHIVPQSFLKDDSIDNKVLTRSDKARGKSDNVPSEEVVKKMKNYWRQLLNAKLITQRKFDNLTKAERGGLSELDKAGFIKRQLVETRQITKHVAQILDSRMNTKYDENDKLIREVKVITLKSKLVSDFRKDFQFYKVREINNYHHAHDAYLNAVVGTALIKKYPKLESEFVYGDYKVYDVRKMIAKSEQEIGKATAKYFFYSNIMNFFKTEITLANGEIRKRPLIETNGETGEIVWDKGRDFATVRKVLSMPQVNIVKKTEVQTGGFSKESILPKRNSDKLIARKKDWDPKKYGGFDSPTVAYSVLVVAKVEKGKSKKLKSVKELLGITIMERSSFEKNPIDFLEAKGYKEVKKDLIIKLPKYSLFELENGRKRMLASAGELQKGNELALPSKYVNFLYLASHYEKLKGSPEDNEQKQLFVEQHKHYLDEIIEQISEFSKRVILADANLDKVLSAYNKHRDKPIREQAENIIHLFTLTNLGAPAAFKYFDTTIDRKRYTSTKEVLDATLIHQSITGLYETRIDLSQLGGDGGEAAAKGGGGSSGGTLNIEDEHRLHETSKEPDVSLGSTWLSDFPQAWAETGGMGLAVRQAPLIIPLKATSTPVSIKQYPMSQEARLGIKPHIQRLLDQGILVPCQSPWNTPLLPVKKPGTNDYRPVQDLREVNKRVEDIHPTVPNPYNLLSGLPPSHQWYTVLDLKDAFFCLRLHPTSQPLFAFEWRDPEMGISGQLTWTRLPQGFKNSPTLFNEALHRDLADFRIQHPDLILLQYVDDLLLAATSELDCQQGTRALLQTLGNLGYRASAKKAQICQKQVKYLGYLLKEGQRWLTEARKETVMGQPTPKTPRQLREFLGTAGFCRLWIPGFAEMAAPLYPLTKPGTLFNWGPDQQKAYQEIKQALLTAPALGLPDLTKPFELFVDEKQGYAKGVLTQKLGPWRRPVAYLSKKLDPVAAGWPPCLRMVAAIAVLTKDAGKLTMGQPLVILAPHAVEALVKQPPDRWLSNARMTHYQALLLDTDRVQFGPVVALNPATLLPLPEEGLQHNCLDILAEAHGTRPDLTDQPLPDADHTWYTDGSSLLQEGQRKAGAAVTTETEVIWAKALPAGTSAQRAELIALTQALKMAEGKKLNVYTDSRYAFATAHIHGEIYRRRGWLTSEGKEIKNKDEILALLKALFLPKRLSIIHCPGHQKGHSAEARGNRMADQAARKAAITETPDTSTLLAGKRTADGSEFEKRTADGSEFESPKKKAKVE

SEQ ID NO: 2998 - protein, 2100 aa, synthetic construct
MPAAKRVKLDGGDKKYSIGLDIGTNSVGWAVITDEYKVPSKKFKVLGNTDRHSIKKNLIGALLFDSGETAEATRLKRTARRRYTRRKNRICYLQEIFSNEMAKVDDSFFHRLEESFLVEEDKKHERHPIFGNIVDEVAYHEKYPTIYHLRKKLVDSTDKADLRLIYLALAHMIKFRGHFLIEGDLNPDNSDVDKLFIQLVQTYNQLFEENPINASGVDAKAILSARLSKSRRLENLIAQLPGEKKNGLFGNLIALSLGLTPNFKSNFDLAEDAKLQLSKDTYDDDLDNLLAQIGDQYADLFLAAKNLSDAILLSDILRVNTEITKAPLSASMIKRYDEHHQDLTLLKALVRQQLPEKYKEIFFDQSKNGYAGYIDGGASQEEFYKFIKPILEKMDGTEELLVKLNREDLLRKQRTFDNGSIPHQIHLGELHAILRRQEDFYPFLKDNREKIEKILTFRIPYYVGPLARGNSRFAWMTRKSEETITPWNFEEVVDKGASAQSFIERMTNFDKNLPNEKVLPKHSLLYEYFTVYNELTKVKYVTEGMRKPAFLSGEQKKAIVDLLFKTNRKVTVKQLKEDYFKKIECFDSVEISGVEDRFNASLGTYHDLLKIIKDKDFLDNEENEDILEDIVLTLTLFEDREMIEERLKTYAHLFDDKVMKQLKRRRYTGWGRLSRKLINGIRDKQSGKTILDFLKSDGFANRNFMQLIHDDSLTFKEDIQKAQVSGQGDSLHEHIANLAGSPAIKKGILQTVKVVDELVKVMGRHKPENIVIEMARENQTTQKGQKNSRERMKRIEEGIKELGSQILKEHPVENTQLQNEKLYLYYLQNGRDMYVDQELDINRLSDYDVDHIVPQSFLKDDSIDNKVLTRSDKARGKSDNVPSEEVVKKMKNYWRQLLNAKLITQRKFDNLTKAERGGLSELDKAGFIKRQLVETRQITKHVAQILDSRMNTKYDENDKLIREVKVITLKSKLVSDFRKDFQFYKVREINNYHHAHDAYLNAVVGTALIKKYPKLESEFVYGDYKVYDVRKMIAKSEQEIGKATAKYFFYSNIMNFFKTEITLANGEIRKRPLIETNGETGEIVWDKGRDFATVRKVLSMPQVNIVKKTEVQTGGFSKESILPKRNSDKLIARKKDWDPKKYGGFDSPTVAYSVLVVAKVEKGKSKKLKSVKELLGITIMERSSFEKNPIDFLEAKGYKEVKKDLIIKLPKYSLFELENGRKRMLASAGELQKGNELALPSKYVNFLYLASHYEKLKGSPEDNEQKQLFVEQHKHYLDEIIEQISEFSKRVILADANLDKVLSAYNKHRDKPIREQAENIIHLFTLTNLGAPAAFKYFDTTIDRKRYTSTKEVLDATLIHQSITGLYETRIDLSQLGGDGGGSSGSSGSSGSSGSSGGTLNIEDEHRLHETSKEPDVSLGSTWLSDFPQAWAETGGMGLAVRQAPLIIPLKATSTPVSIKQYPMSQEARLGIKPHIQRLLDQGILVPCQSPWNTPLLPVKKPGTNDYRPVQDLREVNKRVEDIHPTVPNPYNLLSGLPPSHQWYTVLDLKDAFFCLRLHPTSQPLFAFEWRDPEMGISGQLTWTRLPQGFKNSPTLFNEALHRDLADFRIQHPDLILLQYVDDLLLAATSELDCQQGTRALLQTLGNLGYRASAKKAQICQKQVKYLGYLLKEGQRWLTEARKETVMGQPTPKTPRQLREFLGTAGFCRLWIPGFAEMAAPLYPLTKPGTLFNWGPDQQKAYQEIKQALLTAPALGLPDLTKPFELFVDEKQGYAKGVLTQKLGPWRRPVAYLSKKLDPVAAGWPPCLRMVAAIAVLTKDAGKLTMGQPLVILAPHAVEALVKQPPDRWLSNARMTHYQALLLDTDRVQFGPVVALNPATLLPLPEEGLQHNCLDILAEAHGTRPDLTDQPLPDADHTWYTDGSSLLQEGQRKAGAAVTTETEVIWAKALPAGTSAQRAELIALTQALKMAEGKKLNVYTDSRYAFATAHIHGEIYRRRGWLTSEGKEIKNKDEILALLKALFLPKRLSIIHCPGHQKGHSAEARGNRMADQAARKAAITETPDTSTLLAGKRTADGSEFEKRTADGSEFESPKKKAKVE

SEQ ID NO: 2999 - protein, 2096 aa, synthetic construct; identical to SEQ ID NO: 2719

SEQ ID NO: 3000 - protein, 2088 aa, synthetic construct
MPAAKRVKLDGGDKKYSIGLDIGTNSVGWAVITDEYKVPSKKFKVLGNTDRHSIKKNLIGALLFDSGETAEATRLKRTARRRYTRRKNRICYLQEIFSNEMAKVDDSFFHRLEESFLVEEDKKHERHPIFGNIVDEVAYHEKYPTIYHLRKKLVDSTDKADLRLIYLALAHMIKFRGHFLIEGDLNPDNSDVDKLFIQLVQTYNQLFEENPINASGVDAKAILSARLSKSRRLENLIAQLPGEKKNGLFGNLIALSLGLTPNFKSNFDLAEDAKLQLSKDTYDDDLDNLLAQIGDQYADLFLAAKNLSDAILLSDILRVNTEITKAPLSASMIKRYDEHHQDLTLLKALVRQQLPEKYKEIFFDQSKNGYAGYIDGGASQEEFYKFIKPILEKMDGTEELLVKLNREDLLRKQRTFDNGSIPHQIHLGELHAILRRQEDFYPFLKDNREKIEKILTFRIPYYVGPLARGNSRFAWMTRKSEETITPWNFEEVVDKGASAQSFIERMTNFDKNLPNEKVLPKHSLLYEYFTVYNELTKVKYVTEGMRKPAFLSGEQKKAIVDLLFKTNRKVTVKQLKEDYFKKIECFDSVEISGVEDRFNASLGTYHDLLKIIKDKDFLDNEENEDILEDIVLTLTLFEDREMIEERLKTYAHLFDDKVMKQLKRRRYTGWGRLSRKLINGIRDKQSGKTILDFLKSDGFANRNFMQLIHDDSLTFKEDIQKAQVSGQGDSLHEHIANLAGSPAIKKGILQTVKVVDELVKVMGRHKPENIVIEMARENQTTQKGQKNSRERMKRIEEGIKELGSQILKEHPVENTQLQNEKLYLYYLQNGRDMYVDQELDINRLSDYDVDHIVPQSFLKDDSIDNKVLTRSDKARGKSDNVPSEEVVKKMKNYWRQLLNAKLITQRKFDNLTKAERGGLSELDKAGFIKRQLVETRQITKHVAQILDSRMNTKYDENDKLIREVKVITLKSKLVSDFRKDFQFYKVREINNYHHAHDAYLNAVVGTALIKKYPKLESEFVYGDYKVYDVRKMIAKSEQEIGKATAKYFFYSNIMNFFKTEITLANGEIRKRPLIETNGETGEIVWDKGRDFATVRKVLSMPQVNIVKKTEVQTGGFSKESILPKRNSDKLIARKKDWDPKKYGGFDSPTVAYSVLVVAKVEKGKSKKLKSVKELLGITIMERSSFEKNPIDFLEAKGYKEVKKDLIIKLPKYSLFELENGRKRMLASAGELQKGNELALPSKYVNFLYLASHYEKLKGSPEDNEQKQLFVEQHKHYLDEIIEQISEFSKRVILADANLDKVLSAYNKHRDKPIREQAENIIHLFTLTNLGAPAAFKYFDTTIDRKRYTSTKEVLDATLIHQSITGLYETRIDLSQLGGDGGGGSGGTLNIEDEHRLHETSKEPDVSLGSTWLSDFPQAWAETGGMGLAVRQAPLIIPLKATSTPVSIKQYPMSQEARLGIKPHIQRLLDQGILVPCQSPWNTPLLPVKKPGTNDYRPVQDLREVNKRVEDIHPTVPNPYNLLSGLPPSHQWYTVLDLKDAFFCLRLHPTSQPLFAFEWRDPEMGISGQLTWTRLPQGFKNSPTLFNEALHRDLADFRIQHPDLILLQYVDDLLLAATSELDCQQGTRALLQTLGNLGYRASAKKAQICQKQVKYLGYLLKEGQRWLTEARKETVMGQPTPKTPRQLREFLGTAGFCRLWIPGFAEMAAPLYPLTKPGTLFNWGPDQQKAYQEIKQALLTAPALGLPDLTKPFELFVDEKQGYAKGVLTQKLGPWRRPVAYLSKKLDPVAAGWPPCLRMVAAIAVLTKDAGKLTMGQPLVILAPHAVEALVKQPPDRWLSNARMTHYQALLLDTDRVQFGPVVALNPATLLPLPEEGLQHNCLDILAEAHGTRPDLTDQPLPDADHTWYTDGSSLLQEGQRKAGAAVTTETEVIWAKALPAGTSAQRAELIALTQALKMAEGKKLNVYTDSRYAFATAHIHGEIYRRRGWLTSEGKEIKNKDEILALLKALFLPKRLSIIHCPGHQKGHSAEARGNRMADQAARKAAITETPDTSTLLAGKRTADGSEFEKRTADGSEFESPKKKAKVE

SEQ ID NO: 3001 - protein, 2100 aa, synthetic construct; identical to SEQ ID NO: 2725

SEQ ID NO: 3002 - protein, 2093 aa, synthetic construct; identical to SEQ ID NO: 2740

SEQ ID NO: 3003 - protein, 2094 aa, synthetic construct; identical to SEQ ID NO: 2752

SEQ ID NO: 3004 - protein, 2097 aa, synthetic construct; identical to SEQ ID NO: 2763

SEQ ID NO: 3005 - protein, 2096 aa, synthetic construct
MPAAKRVKLDGGDKKYSIGLDIGTNSVGWAVITDEYKVPSKKFKVLGNTDRHSIKKNLIGALLFDSGETAEATRLKRTARRRYTRRKNRICYLQEIFSNEMAKVDDSFFHRLEESFLVEEDKKHERHPIFGNIVDEVAYHEKYPTIYHLRKKLVDSTDKADLRLIYLALAHMIKFRGHFLIEGDLNPDNSDVDKLFIQLVQTYNQLFEENPINASGVDAKAILSARLSKSRRLENLIAQLPGEKKNGLFGNLIALSLGLTPNFKSNFDLAEDAKLQLSKDTYDDDLDNLLAQIGDQYADLFLAAKNLSDAILLSDILRVNTEITKAPLSASMIKRYDEHHQDLTLLKALVRQQLPEKYKEIFFDQSKNGYAGYIDGGASQEEFYKFIKPILEKMDGTEELLVKLNREDLLRKQRTFDNGSIPHQIHLGELHAILRRQEDFYPFLKDNREKIEKILTFRIPYYVGPLARGNSRFAWMTRKSEETITPWNFEEVVDKGASAQSFIERMTNFDKNLPNEKVLPKHSLLYEYFTVYNELTKVKYVTEGMRKPAFLSGEQKKAIVDLLFKTNRKVTVKQLKEDYFKKIECFDSVEISGVEDRFNASLGTYHDLLKIIKDKDFLDNEENEDILEDIVLTLTLFEDREMIEERLKTYAHLFDDKVMKQLKRRRYTGWGRLSRKLINGIRDKQSGKTILDFLKSDGFANRNFMQLIHDDSLTFKEDIQKAQVSGQGDSLHEHIANLAGSPAIKKGILQTVKVVDELVKVMGRHKPENIVIEMARENQTTQKGQKNSRERMKRIEEGIKELGSQILKEHPVENTQLQNEKLYLYYLQNGRDMYVDQELDINRLSDYDVDHIVPQSFLKDDSIDNKVLTRSDKARGKSDNVPSEEVVKKMKNYWRQLLNAKLITQRKFDNLTKAERGGLSELDKAGFIKRQLVETRQITKHVAQILDSRMNTKYDENDKLIREVKVITLKSKLVSDFRKDFQFYKVREINNYHHAHDAYLNAVVGTALIKKYPKLESEFVYGDYKVYDVRKMIAKSEQEIGKATAKYFFYSNIMNFFKTEITLANGEIRKRPLIETNGETGEIVWDKGRDFATVRKVLSMPQVNIVKKTEVQTGGFSKESILPKRNSDKLIARKKDWDPKKYGGFDSPTVAYSVLVVAKVEKGKSKKLKSVKELLGITIMERSSFEKNPIDFLEAKGYKEVKKDLIIKLPKYSLFELENGRKRMLASAGELQKGNELALPSKYVNFLYLASHYEKLKGSPEDNEQKQLFVEQHKHYLDEIIEQISEFSKRVILADANLDKVLSAYNKHRDKPIREQAENIIHLFTLTNLGAPAAFKYFDTTIDRKRYTSTKEVLDATLIHQSITGLYETRIDLSQLGGDGGEAAAKPAPGSSGGTLNIEDEHRLHETSKEPDVSLGSTWLSDFPQAWAETGGMGLAVRQAPLIIPLKATSTPVSIKQYPMSQEARLGIKPHIQRLLDQGILVPCQSPWNTPLLPVKKPGTNDYRPVQDLREVNKRVEDIHPTVPNPYNLLSGLPPSHQWYTVLDLKDAFFCLRLHPTSQPLFAFEWRDPEMGISGQLTWTRLPQGFKNSPTLFNEALHRDLADFRIQHPDLILLQYVDDLLLAATSELDCQQGTRALLQTLGNLGYRASAKKAQICQKQVKYLGYLLKEGQRWLTEARKETVMGQPTPKTPRQLREFLGTAGFCRLWIPGFAEMAAPLYPLTKPGTLFNWGPDQQKAYQEIKQALLTAPALGLPDLTKPFELFVDEKQGYAKGVLTQKLGPWRRPVAYLSKKLDPVAAGWPPCLRMVAAIAVLTKDAGKLTMGQPLVILAPHAVEALVKQPPDRWLSNARMTHYQALLLDTDRVQFGPVVALNPATLLPLPEEGLQHNCLDILAEAHGTRPDLTDQPLPDADHTWYTDGSSLLQEGQRKAGAAVTTETEVIWAKALPAGTSAQRAELIALTQALKMAEGKKLNVYTDSRYAFATAHIHGEIYRRRGWLTSEGKEIKNKDEILALLKALFLPKRLSIIHCPGHQKGHSAEARGNRMADQAARKAAITETPDTSTLLAGKRTADGSEFEKRTADGSEFESPKKKAKVE

SEQ ID NO: 3006 - protein, 2089 aa, synthetic construct
MPAAKRVKLDGGDKKYSIGLDIGTNSVGWAVITDEYKVPSKKFKVLGNTDRHSIKKNLIGALLFDSGETAEATRLKRTARRRYTRRKNRICYLQEIFSNEMAKVDDSFFHRLEESFLVEEDKKHERHPIFGNIVDEVAYHEKYPTIYHLRKKLVDSTDKADLRLIYLALAHMIKFRGHFLIEGDLNPDNSDVDKLFIQLVQTYNQLFEENPINASGVDAKAILSARLSKSRRLENLIAQLPGEKKNGLFGNLIALSLGLTPNFKSNFDLAEDAKLQLSKDTYDDDLDNLLAQIGDQYADLFLAAKNLSDAILLSDILRVNTEITKAPLSASMIKRYDEHHQDLTLLKALVRQQLPEKYKEIFFDQSKNGYAGYIDGGASQEEFYKFIKPILEKMDGTEELLVKLNREDLLRKQRTFDNGSIPHQIHLGELHAILRRQEDFYPFLKDNREKIEKILTFRIPYYVGPLARGNSRFAWMTRKSEETITPWNFEEVVDKGASAQSFIERMTNFDKNLPNEKVLPKHSLLYEYFTVYNELTKVKYVTEGMRKPAFLSGEQKKAIVDLLFKTNRKVTVKQLKEDYFKKIECFDSVEISGVEDRFNASLGTYHDLLKIIKDKDFLDNEENEDILEDIVLTLTLFEDREMIEERLKTYAHLFDDKVMKQLKRRRYTGWGRLSRKLINGIRDKQSGKTILDFLKSDGFANRNFMQLIHDDSLTFKEDIQKAQVSGQGDSLHEHIANLAGSPAIKKGILQTVKVVDELVKVMGRHKPENIVIEMARENQTTQKGQKNSRERMKRIEEGIKELGSQILKEHPVENTQLQNEKLYLYYLQNGRDMYVDQELDINRLSDYDVDHIVPQSFLKDDSIDNKVLTRSDKARGKSDNVPSEEVVKKMKNYWRQLLNAKLITQRKFDNLTKAERGGLSELDKAGFIKRQLVETRQITKHVAQILDSRMNTKYDENDKLIREVKVITLKSKLVSDFRKDFQFYKVREINNYHHAHDAYLNAVVGTALIKKYPKLESEFVYGDYKVYDVRKMIAKSEQEIGKATAKYFFYSNIMNFFKTEITLANGEIRKRPLIETNGETGEIVWDKGRDFATVRKVLSMPQVNIVKKTEVQTGGFSKESILPKRNSDKLIARKKDWDPKKYGGFDSPTVAYSVLVVAKVEKGKSKKLKSVKELLGITIMERSSFEKNPIDFLEAKGYKEVKKDLIIKLPKYSLFELENGRKRMLASAGELQKGNELALPSKYVNFLYLASHYEKLKGSPEDNEQKQLFVEQHKHYLDEIIEQISEFSKRVILADANLDKVLSAYNKHRDKPIREQAENIIHLFTLTNLGAPAAFKYFDTTIDRKRYTSTKEVLDATLIHQSITGLYETRIDLSQLGGDGGGGGGGGTLNIEDEHRLHETSKEPDVSLGSTWLSDFPQAWAETGGMGLAVRQAPLIIPLKATSTPVSIKQYPMSQEARLGIKPHIQRLLDQGILVPCQSPWNTPLLPVKKPGTNDYRPVQDLREVNKRVEDIHPTVPNPYNLLSGLPPSHQWYTVLDLKDAFFCLRLHPTSQPLFAFEWRDPEMGISGQLTWTRLPQGFKNSPTLFNEALHRDLADFRIQHPDLILLQYVDDLLLAATSELDCQQGTRALLQTLGNLGYRASAKKAQICQKQVKYLGYLLKEGQRWLTEARKETVMGQPTPKTPRQLREFLGTAGFCRLWIPGFAEMAAPLYPLTKPGTLFNWGPDQQKAYQEIKQALLTAPALGLPDLTKPFELFVDEKQGYAKGVLTQKLGPWRRPVAYLSKKLDPVAAGWPPCLRMVAAIAVLTKDAGKLTMGQPLVILAPHAVEALVKQPPDRWLSNARMTHYQALLLDTDRVQFGPVVALNPATLLPLPEEGLQHNCLDILAEAHGTRPDLTDQPLPDADHTWYTDGSSLLQEGQRKAGAAVTTETEVIWAKALPAGTSAQRAELIALTQALKMAEGKKLNVYTDSRYAFATAHIHGEIYRRRGWLTSEGKEIKNKDEILALLKALFLPKRLSIIHCPGHQKGHSAEARGNRMADQAARKAAITETPDTSTLLAGKRTADGSEFEKRTADGSEFESPKKKAKVE

SEQ ID NO: 3007 - protein, 2096 aa, synthetic construct; identical to SEQ ID NO: 2748

SEQ ID NO: 3008 - protein, 2090 aa, synthetic construct; identical to SEQ ID NO: 2730

SEQ ID NO: 3009 - protein, 2096 aa, synthetic construct
MPAAKRVKLDGGDKKYSIGLDIGTNSVGWAVITDEYKVPSKKFKVLGNTDRHSIKKNLIGALLFDSGETAEATRLKRTARRRYTRRKNRICYLQEIFSNEMAKVDDSFFHRLEESFLVEEDKKHERHPIFGNIVDEVAYHEKYPTIYHLRKKLVDSTDKADLRLIYLALAHMIKFRGHFLIEGDLNPDNSDVDKLFIQLVQTYNQLFEENPINASGVDAKAILSARLSKSRRLENLIAQLPGEKKNGLFGNLIALSLGLTPNFKSNFDLAEDAKLQLSKDTYDDDLDNLLAQIGDQYADLFLAAKNLSDAILLSDILRVNTEITKAPLSASMIKRYDEHHQDLTLLKALVRQQLPEKYKEIFFDQSKNGYAGYIDGGASQEEFYKFIKPILEKMDGTEELLVKLNREDLLRKQRTFDNGSIPHQIHLGELHAILRRQEDFYPFLKDNREKIEKILTFRIPYYVGPLARGNSRFAWMTRKSEETITPWNFEEVVDKGASAQSFIERMTNFDKNLPNEKVLPKHSLLYEYFTVYNELTKVKYVTEGMRKPAFLSGEQKKAIVDLLFKTNRKVTVKQLKEDYFKKIECFDSVEISGVEDRFNASLGTYHDLLKIIKDKDFLDNEENEDILEDIVLTLTLFEDREMIEERLKTYAHLFDDKVMKQLKRRRYTGWGRLSRKLINGIRDKQSGKTILDFLKSDGFANRNFMQLIHDDSLTFKEDIQKAQVSGQGDSLHEHIANLAGSPAIKKGILQTVKVVDELVKVMGRHKPENIVIEMARENQTTQKGQKNSRERMKRIEEGIKELGSQILKEHPVENTQLQNEKLYLYYLQNGRDMYVDQELDINRLSDYDVDHIVPQSFLKDDSIDNKVLTRSDKARGKSDNVPSEEVVKKMKNYWRQLLNAKLITQRKFDNLTKAERGGLSELDKAGFIKRQLVETRQITKHVAQILDSRMNTKYDENDKLIREVKVITLKSKLVSDFRKDFQFYKVREINNYHHAHDAYLNAVVGTALIKKYPKLESEFVYGDYKVYDVRKMIAKSEQEIGKATAKYFFYSNIMNFFKTEITLANGEIRKRPLIETNGETGEIVWDKGRDFATVRKVLSMPQVNIVKKTEVQTGGFSKESILPKRNSDKLIARKKDWDPKKYGGFDSPTVAYSVLVVAKVEKGKSKKLKSVKELLGITIMERSSFEKNPIDFLEAKGYKEVKKDLIIKLPKYSLFELENGRKRMLASAGELQKGNELALPSKYVNFLYLASHYEKLKGSPEDNEQKQLFVEQHKHYLDEIIEQISEFSKRVILADANLDKVLSAYNKHRDKPIREQAENIIHLFTLTNLGAPAAFKYFDTTIDRKRYTSTKEVLDATLIHQSITGLYETRIDLSQLGGDGGPAPEAAAKGGGGGTLNIEDEHRLHETSKEPDVSLGSTWLSDFPQAWAETGGMGLAVRQAPLIIPLKATSTPVSIKQYPMSQEARLGIKPHIQRLLDQGILVPCQSPWNTPLLPVKKPGTNDYRPVQDLREVNKRVEDIHPTVPNPYNLLSGLPPSHQWYTVLDLKDAFFCLRLHPTSQPLFAFEWRDPEMGISGQLTWTRLPQGFKNSPTLFNEALHRDLADFRIQHPDLILLQYVDDLLLAATSELDCQQGTRALLQTLGNLGYRASAKKAQICQKQVKYLGYLLKEGQRWLTEARKETVMGQPTPKTPRQLREFLGTAGFCRLWIPGFAEMAAPLYPLTKPGTLFNWGPDQQKAYQEIKQALLTAPALGLPDLTKPFELFVDEKQGYAKGVLTQKLGPWRRPVAYLSKKLDPVAAGWPPCLRMVAAIAVLTKDAGKLTMGQPLVILAPHAVEALVKQPPDRWLSNARMTHYQALLLDTDRVQFGPVVALNPATLLPLPEEGLQHNCLDILAEAHGTRPDLTDQPLPDADHTWYTDGSSLLQEGQRKAGAAVTTETEVIWAKALPAGTSAQRAELIALTQALKMAEGKKLNVYTDSRYAFATAHIHGEIYRRRGWLTSEGKEIKNKDEILALLKALFLPKRLSIIHCPGHQKGHSAEARGNRMADQAARKAAITETPDTSTLLAGKRTADGSEFEKRTADGSEFESPKKKAKVE

SEQ ID NO: 3010 - protein, 2101 aa, synthetic construct
MPAAKRVKLDGGDKKYSIGLDIGTNSVGWAVITDEYKVPSKKFKVLGNTDRHSIKKNLIGALLFDSGETAEATRLKRTARRRYTRRKNRICYLQEIFSNEMAKVDDSFFHRLEESFLVEEDKKHERHPIFGNIVDEVAYHEKYPTIYHLRKKLVDSTDKADLRLIYLALAHMIKFRGHFLIEGDLNPDNSDVDKLFIQLVQTYNQLFEENPINASGVDAKAILSARLSKSRRLENLIAQLPGEKKNGLFGNLIALSLGLTPNFKSNFDLAEDAKLQLSKDTYDDDLDNLLAQIGDQYADLFLAAKNLSDAILLSDILRVNTEITKAPLSASMIKRYDEHHQDLTLLKALVRQQLPEKYKEIFFDQSKNGYAGYIDGGASQEEFYKFIKPILEKMDGTEELLVKLNREDLLRKQRTFDNGSIPHQIHLGELHAILRRQEDFYPFLKDNREKIEKILTFRIPYYVGPLARGNSRFAWMTRKSEETITPWNFEEVVDKGASAQSFIERMTNFDKNLPNEKVLPKHSLLYEYFTVYNELTKVKYVTEGMRKPAFLSGEQKKAIVDLLFKTNRKVTVKQLKEDYFKKIECFDSVEISGVEDRFNASLGTYHDLLKIIKDKDFLDNEENEDILEDIVLTLTLFEDREMIEERLKTYAHLFDDKVMKQLKRRRYTGWGRLSRKLINGIRDKQSGKTILDFLKSDGFANRNFMQLIHDDSLTFKEDIQKAQVSGQGDSLHEHIANLAGSPAIKKGILQTVKVVDELVKVMGRHKPENIVIEMARENQTTQKGQKNSRERMKRIEEGIKELGSQILKEHPVENTQLQNEKLYLYYLQNGRDMYVDQELDINRLSDYDVDHIVPQSFLKDDSIDNKVLTRSDKARGKSDNVPSEEVVKKMKNYWRQLLNAKLITQRKFDNLTKAERGGLSELDKAGFIKRQLVETRQITKHVAQILDSRMNTKYDENDKLIREVKVITLKSKLVSDFRKDFQFYKVREINNYHHAHDAYLNAVVGTALIKKYPKLESEFVYGDYKVYDVRKMIAKSEQEIGKATAKYFFYSNIMNFFKTEITLANGEIRKRPLIETNGETGEIVWDKGRDFATVRKVLSMPQVNIVKKTEVQTGGFSKESILPKRNSDKLIARKKDWDPKKYGGFDSPTVAYSVLVVAKVEKGKSKKLKSVKELLGITIMERSSFEKNPIDFLEAKGYKEVKKDLIIKLPKYSLFELENGRKRMLASAGELQKGNELALPSKYVNFLYLASHYEKLKGSPEDNEQKQLFVEQHKHYLDEIIEQISEFSKRVILADANLDKVLSAYNKHRDKPIREQAENIIHLFTLTNLGAPAAFKYFDTTIDRKRYTSTKEVLDATLIHQSITGLYETRIDLSQLGGDGGSGSETPGTSESATPESGGTLNIEDEHRLHETSKEPDVSLGSTWLSDFPQAWAETGGMGLAVRQAPLIIPLKATSTPVSIKQYPMSQEARLGIKPHIQRLLDQGILVPCQSPWNTPLLPVKKPGTNDYRPVQDLREVNKRVEDIHPTVPNPYNLLSGLPPSHQWYTVLDLKDAFFCLRLHPTSQPLFAFEWRDPEMGISGQLTWTRLPQGFKNSPTLFNEALHRDLADFRIQHPDLILLQYVDDLLLAATSELDCQQGTRALLQTLGNLGYRASAKKAQICQKQVKYLGYLLKEGQRWLTEARKETVMGQPTPKTPRQLREFLGTAGFCRLWIPGFAEMAAPLYPLTKPGTLFNWGPDQQKAYQEIKQALLTAPALGLPDLTKPFELFVDEKQGYAKGVLTQKLGPWRRPVAYLSKKLDPVAAGWPPCLRMVAAIAVLTKDAGKLTMGQPLVILAPHAVEALVKQPPDRWLSNARMTHYQALLLDTDRVQFGPVVALNPATLLPLPEEGLQHNCLDILAEAHGTRPDLTDQPLPDADHTWYTDGSSLLQEGQRKAGAAVTTETEVIWAKALPAGTSAQRAELIALTQALKMAEGKKLNVYTDSRYAFATAHIHGEIYRRRGWLTSEGKEIKNKDEILALLKALFLPKRLSIIHCPGHQKGHSAEARGNRMADQAARKAAITETPDTSTLLAGKRTADGSEFEKRTADGSEFESPKKKAKVE

SEQ ID NO: 3011 - protein, 2091 aa, synthetic construct
MPAAKRVKLDGGDKKYSIGLDIGTNSVGWAVITDEYKVPSKKFKVLGNTDRHSIKKNLIGALLFDSGETAEATRLKRTARRRYTRRKNRICYLQEIFSNEMAKVDDSFFHRLEESFLVEEDKKHERHPIFGNIVDEVAYHEKYPTIYHLRKKLVDSTDKADLRLIYLALAHMIKFRGHFLIEGDLNPDNSDVDKLFIQLVQTYNQLFEENPINASGVDAKAILSARLSKSRRLENLIAQLPGEKKNGLFGNLIALSLGLTPNFKSNFDLAEDAKLQLSKDTYDDDLDNLLAQIGDQYADLFLAAKNLSDAILLSDILRVNTEITKAPLSASMIKRYDEHHQDLTLLKALVRQQLPEKYKEIFFDQSKNGYAGYIDGGASQEEFYKFIKPILEKMDGTEELLVKLNREDLLRKQRTFDNGSIPHQIHLGELHAILRRQEDFYPFLKDNREKIEKILTFRIPYYVGPLARGNSRFAWMTRKSEETITPWNFEEVVDKGASAQSFIERMTNFDKNLPNEKVLPKHSLLYEYFTVYNELTKVKYVTEGMRKPAFLSGEQKKAIVDLLFKTNRKVTVKQLKEDYFKKIECFDSVEISGVEDRFNASLGTYHDLLKIIKDKDFLDNEENEDILEDIVLTLTLFEDREMIEERLKTYAHLFDDKVMKQLKRRRYTGWGRLSRKLINGIRDKQSGKTILDFLKSDGFANRNFMQLIHDDSLTFKEDIQKAQVSGQGDSLHEHIANLAGSPAIKKGILQTVKVVDELVKVMGRHKPENIVIEMARENQTTQKGQKNSRERMKRIEEGIKELGSQILKEHPVENTQLQNEKLYLYYLQNGRDMYVDQELDINRLSDYDVDHIVPQSFLKDDSIDNKVLTRSDKARGKSDNVPSEEVVKKMKNYWRQLLNAKLITQRKFDNLTKAERGGLSELDKAGFIKRQLVETRQITKHVAQILDSRMNTKYDENDKLIREVKVITLKSKLVSDFRKDFQFYKVREINNYHHAHDAYLNAVVGTALIKKYPKLESEFVYGDYKVYDVRKMIAKSEQEIGKATAKYFFYSNIMNFFKTEITLANGEIRKRPLIETNGETGEIVWDKGRDFATVRKVLSMPQVNIVKKTEVQTGGFSKESILPKRNSDKLIARKKDWDPKKYGGFDSPTVAYSVLVVAKVEKGKSKKLKSVKELLGITIMERSSFEKNPIDFLEAKGYKEVKKDLIIKLPKYSLFELENGRKRMLASAGELQKGNELALPSKYVNFLYLASHYEKLKGSPEDNEQKQLFVEQHKHYLDEIIEQISEFSKRVILADANLDKVLSAYNKHRDKPIREQAENIIHLFTLTNLGAPAAFKYFDTTIDRKRYTSTKEVLDATLIHQSITGLYETRIDLSQLGGDGGGGSGSSGGTLNIEDEHRLHETSKEPDVSLGSTWLSDFPQAWAETGGMGLAVRQAPLIIPLKATSTPVSIKQYPMSQEARLGIKPHIQRLLDQGILVPCQSPWNTPLLPVKKPGTNDYRPVQDLREVNKRVEDIHPTVPNPYNLLSGLPPSHQWYTVLDLKDAFFCLRLHPTSQPLFAFEWRDPEMGISGQLTWTRLPQGFKNSPTLFNEALHRDLADFRIQHPDLILLQYVDDLLLAATSELDCQQGTRALLQTLGNLGYRASAKKAQICQKQVKYLGYLLKEGQRWLTEARKETVMGQPTPKTPRQLREFLGTAGFCRLWIPGFAEMAAPLYPLTKPGTLFNWGPDQQKAYQEIKQALLTAPALGLPDLTKPFELFVDEKQGYAKGVLTQKLGPWRRPVAYLSKKLDPVAAGWPPCLRMVAAIAVLTKDAGKLTMGQPLVILAPHAVEALVKQPPDRWLSNARMTHYQALLLDTDRVQFGPVVALNPATLLPLPEEGLQHNCLDILAEAHGTRPDLTDQPLPDADHTWYTDGSSLLQEGQRKAGAAVTTETEVIWAKALPAGTSAQRAELIALTQALKMAEGKKLNVYTDSRYAFATAHIHGEIYRRRGWLTSEGKEIKNKDEILALLKALFLPKRLSIIHCPGHQKGHSAEARGNRMADQAARKAAITETPDTSTLLAGKRTADGSEFEKRTADGSEFESPKKKAKVE

SEQ ID NO: 3012 - protein, 2096 aa, synthetic construct; identical to SEQ ID NO: 2758

SEQ ID NO: 3013 - protein, 2094 aa, synthetic construct
MPAAKRVKLDGGDKKYSIGLDIGTNSVGWAVITDEYKVPSKKFKVLGNTDRHSIKKNLIGALLFDSGETAEATRLKRTARRRYTRRKNRICYLQEIFSNEMAKVDDSFFHRLEESFLVEEDKKHERHPIFGNIVDEVAYHEKYPTIYHLRKKLVDSTDKADLRLIYLALAHMIKFRGHFLIEGDLNPDNSDVDKLFIQLVQTYNQLFEENPINASGVDAKAILSARLSKSRRLENLIAQLPGEKKNGLFGNLIALSLGLTPNFKSNFDLAEDAKLQLSKDTYDDDLDNLLAQIGDQYADLFLAAKNLSDAILLSDILRVNTEITKAPLSASMIKRYDEHHQDLTLLKALVRQQLPEKYKEIFFDQSKNGYAGYIDGGASQEEFYKFIKPILEKMDGTEELLVKLNREDLLRKQRTFDNGSIPHQIHLGELHAILRRQEDFYPFLKDNREKIEKILTFRIPYYVGPLARGNSRFAWMTRKSEETITPWNFEEVVDKGASAQSFIERMTNFDKNLPNEKVLPKHSLLYEYFTVYNELTKVKYVTEGMRKPAFLSGEQKKAIVDLLFKTNRKVTVKQLKEDYFKKIECFDSVEISGVEDRFNASLGTYHDLLKIIKDKDFLDNEENEDILEDIVLTLTLFEDREMIEERLKTYAHLFDDKVMKQLKRRRYTGWGRLSRKLINGIRDKQSGKTILDFLKSDGFANRNFMQLIHDDSLTFKEDIQKAQVSGQGDSLHEHIANLAGSPAIKKGILQTVKVVDELVKVMGRHKPENIVIEMARENQTTQKGQKNSRERMKRIEEGIKELGSQILKEHPVENTQLQNEKLYLYYLQNGRDMYVDQELDINRLSDYDVDHIVPQSFLKDDSIDNKVLTRSDKARGKSDNVPSEEVVKKMKNYWRQLLNAKLITQRKFDNLTKAERGGLSELDKAGFIKRQLVETRQITKHVAQILDSRMNTKYDENDKLIREVKVITLKSKLVSDFRKDFQFYKVREINNYHHAHDAYLNAVVGTALIKKYPKLESEFVYGDYKVYDVRKMIAKSEQEIGKATAKYFFYSNIMNFFKTEITLANGEIRKRPLIETNGETGEIVWDKGRDFATVRKVLSMPQVNIVKKTEVQTGGFSKESILPKRNSDKLIARKKDWDPKKYGGFDSPTVAYSVLVVAKVEKGKSKKLKSVKELLGITIMERSSFEKNPIDFLEAKGYKEVKKDLIIKLPKYSLFELENGRKRMLASAGELQKGNELALPSKYVNFLYLASHYEKLKGSPEDNEQKQLFVEQHKHYLDEIIEQISEFSKRVILADANLDKVLSAYNKHRDKPIREQAENIIHLFTLTNLGAPAAFKYFDTTIDRKRYTSTKEVLDATLIHQSITGLYETRIDLSQLGGDGGPAPGGSGGGGGTLNIEDEHRLHETSKEPDVSLGSTWLSDFPQAWAETGGMGLAVRQAPLIIPLKATSTPVSIKQYPMSQEARLGIKPHIQRLLDQGILVPCQSPWNTPLLPVKKPGTNDYRPVQDLREVNKRVEDIHPTVPNPYNLLSGLPPSHQWYTVLDLKDAFFCLRLHPTSQPLFAFEWRDPEMGISGQLTWTRLPQGFKNSPTLFNEALHRDLADFRIQHPDLILLQYVDDLLLAATSELDCQQGTRALLQTLGNLGYRASAKKAQICQKQVKYLGYLLKEGQRWLTEARKETVMGQPTPKTPRQLREFLGTAGFCRLWIPGFAEMAAPLYPLTKPGTLFNWGPDQQKAYQEIKQALLTAPALGLPDLTKPFELFVDEKQGYAKGVLTQKLGPWRRPVAYLSKKLDPVAAGWPPCLRMVAAIAVLTKDAGKLTMGQPLVILAPHAVEALVKQPPDRWLSNARMTHYQALLLDTDRVQFGPVVALNPATLLPLPEEGLQHNCLDILAEAHGTRPDLTDQPLPDADHTWYTDGSSLLQEGQRKAGAAVTTETEVIWAKALPAGTSAQRAELIALTQALKMAEGKKLNVYTDSRYAFATAHIHGEIYRRRGWLTSEGKEIKNKDEILALLKALFLPKRLSIIHCPGHQKGHSAEARGNRMADQAARKAAITETPDTSTLLAGKRTADGSEFEKRTADGSEFESPKKKAKVE

SEQ ID NO: 3014 - protein, 2096 aa, synthetic construct; identical to SEQ ID NO: 2714

SEQ ID NO: 3015 - protein, 2093 aa, synthetic construct; identical to SEQ ID NO: 2718

SEQ ID NO: 3016 - protein, 2094 aa, synthetic construct; identical to SEQ ID NO: 2762

SEQ ID NO: 3017 - protein, 2095 aa, synthetic construct; identical to SEQ ID NO: 2749

SEQ ID NO: 3018 - protein, 2096 aa, synthetic construct; identical to SEQ ID NO: 2721

SEQ ID NO: 3019 - protein, 2096 aa, synthetic construct; identical to SEQ ID NO: 2747

SEQ ID NO: 3020 - protein, 2096 aa, synthetic construct; identical to SEQ ID NO: 2755

SEQ ID NO: 3021 - protein, 2096 aa, synthetic construct
MPAAKRVKLDGGDKKYSIGLDIGTNSVGWAVITDEYKVPSKKFKVLGNTDRHSIKKNLIGALLFDSGETAEATRLKRTARRRYTRRKNRICYLQEIFSNEMAKVDDSFFHRLEESFLVEEDKKHERHPIFGNIVDEVAYHEKYPTIYHLRKKLVDSTDKADLRLIYLALAHMIKFRGHFLIEGDLNPDNSDVDKLFIQLVQTYNQLFEENPINASGVDAKAILSARLSKSRRLENLIAQLPGEKKNGLFGNLIALSLGLTPNFKSNFDLAEDAKLQLSKDTYDDDLDNLLAQIGDQYADLFLAAKNLSDAILLSDILRVNTEITKAPLSASMIKRYDEHHQDLTLLKALVRQQLPEKYKEIFFDQSKNGYAGYIDGGASQEEFYKFIKPILEKMDGTEELLVKLNREDLLRKQRTFDNGSIPHQIHLGELHAILRRQEDFYPFLKDNREKIEKILTFRIPYYVGPLARGNSRFAWMTRKSEETITPWNFEEVVDKGASAQSFIERMTNFDKNLPNEKVLPKHSLLYEYFTVYNELTKVKYVTEGMRKPAFLSGEQKKAIVDLLFKTNRKVTVKQLKEDYFKKIECFDSVEISGVEDRFNASLGTYHDLLKIIKDKDFLDNEENEDILEDIVLTLTLFEDREMIEERLKTYAHLFDDKVMKQLKRRRYTGWGRLSRKLINGIRDKQSGKTILDFLKSDGFANRNFMQLIHDDSLTFKEDIQKAQVSGQGDSLHEHIANLAGSPAIKKGILQTVKVVDELVKVMGRHKPENIVIEMARENQTTQKGQKNSRERMKRIEEGIKELGSQILKEHPVENTQLQNEKLYLYYLQNGRDMYVDQELDINRLSDYDVDHIVPQSFLKDDSIDNKVLTRSDKARGKSDNVPSEEVVKKMKNYWRQLLNAKLITQRKFDNLTKAERGGLSELDKAGFIKRQLVETRQITKHVAQILDSRMNTKYDENDKLIREVKVITLKSKLVSDFRKDFQFYKVREINNYHHAHDAYLNAVVGTALIKKYPKLESEFVYGDYKVYDVRKMIAKSEQEIGKATAKYFFYSNIMNFFKTEITLANGEIRKRPLIETNGETGEIVWDKGRDFATVRKVLSMPQVNIVKKTEVQTGGFSKESILPKRNSDKLIARKKDWDPKKYGGFDSPTVAYSVLVVAKVEKGKSKKLKSVKELLGITIMERSSFEKNPIDFLEAKGYKEVKKDLIIKLPKYSLFELENGRKRMLASAGELQKGNELALPSKYVNFLYLASHYEKLKGSPEDNEQKQLFVEQHKHYLDEIIEQISEFSKRVILADANLDKVLSAYNKHRDKPIREQAENIIHLFTLTNLGAPAAFKYFDTTIDRKRYTSTKEVLDATLIHQSITGLYETRIDLSQLGGDGGEAAAKGSSGGSGGTLNIEDEHRLHETSKEPDVSLGSTWLSDFPQAWAETGGMGLAVRQAPLIIPLKATSTPVSIKQYPMSQEARLGIKPHIQRLLDQGILVPCQSPWNTPLLPVKKPGTNDYRPVQDLREVNKRVEDIHPTVPNPYNLLSGLPPSHQWYTVLDLKDAFFCLRLHPTSQPLFAFEWRDPEMGISGQLTWTRLPQGFKNSPTLFNEALHRDLADFRIQHPDLILLQYVDDLLLAATSELDCQQGTRALLQTLGNLGYRASAKKAQICQKQVKYLGYLLKEGQRWLTEARKETVMGQPTPKTPRQLREFLGTAGFCRLWIPGFAEMAAPLYPLTKPGTLFNWGPDQQKAYQEIKQALLTAPALGLPDLTKPFELFVDEKQGYAKGVLTQKLGPWRRPVAYLSKKLDPVAAGWPPCLRMVAAIAVLTKDAGKLTMGQPLVILAPHAVEALVKQPPDRWLSNARMTHYQALLLDTDRVQFGPVVALNPATLLPLPEEGLQHNCLDILAEAHGTRPDLTDQPLPDADHTWYTDGSSLLQEGQRKAGAAVTTETEVIWAKALPAGTSAQRAELIALTQALKMAEGKKLNVYTDSRYAFATAHIHGEIYRRRGWLTSEGKEIKNKDEILALLKALFLPKRLSIIHCPGHQKGHSAEARGNRMADQAARKAAITETPDTSTLLAGKRTADGSEFEKRTADGSEFESPKKKAKVE

SEQ ID NO: 3022 - protein, 2094 aa, synthetic construct
MPAAKRVKLDGGDKKYSIGLDIGTNSVGWAVITDEYKVPSKKFKVLGNTDRHSIKKNLIGALLFDSGETAEATRLKRTARRRYTRRKNRICYLQEIFSNEMAKVDDSFFHRLEESFLVEEDKKHERHPIFGNIVDEVAYHEKYPTIYHLRKKLVDSTDKADLRLIYLALAHMIKFRGHFLIEGDLNPDNSDVDKLFIQLVQTYNQLFEENPINASGVDAKAILSARLSKSRRLENLIAQLPGEKKNGLFGNLIALSLGLTPNFKSNFDLAEDAKLQLSKDTYDDDLDNLLAQIGDQYADLFLAAKNLSDAILLSDILRVNTEITKAPLSASMIKRYDEHHQDLTLLKALVRQQLPEKYKEIFFDQSKNGYAGYIDGGASQEEFYKFIKPILEKMDGTEELLVKLNREDLLRKQRTFDNGSIPHQIHLGELHAILRRQEDFYPFLKDNREKIEKILTFRIPYYVGPLARGNSRFAWMTRKSEETITPWNFEEVVDKGASAQSFIERMTNFDKNLPNEKVLPKHSLLYEYFTVYNELTKVKYVTEGMRKPAFLSGEQKKAIVDLLFKTNRKVTVKQLKEDYFKKIECFDSVEISGVEDRFNASLGTYHDLLKIIKDKDFLDNEENEDILEDIVLTLTLFEDREMIEERLKTYAHLFDDKVMKQLKRRRYTGWGRLSRKLINGIRDKQSGKTILDFLKSDGFANRNFMQLIHDDSLTFKEDIQKAQVSGQGDSLHEHIANLAGSPAIKKGILQTVKVVDELVKVMGRHKPENIVIEMARENQTTQKGQKNSRERMKRIEEGIKELGSQILKEHPVENTQLQNEKLYLYYLQNGRDMYVDQELDINRLSDYDVDHIVPQSFLKDDSIDNKVLTRSDKARGKSDNVPSEEVVKKMKNYWRQLLNAKLITQRKFDNLTKAERGGLSELDKAGFIKRQLVETRQITKHVAQILDSRMNTKYDENDKLIREVKVITLKSKLVSDFRKDFQFYKVREINNYHHAHDAYLNAVVGTALIKKYPKLESEFVYGDYKVYDVRKMIAKSEQEIGKATAKYFFYSNIMNFFKTEITLANGEIRKRPLIETNGETGEIVWDKGRDFATVRKVLSMPQVNIVKKTEVQTGGFSKESILPKRNSDKLIARKKDWDPKKYGGFDSPTVAYSVLVVAKVEKGKSKKLKSVKELLGITIMERSSFEKNPIDFLEAKGYKEVKKDLIIKLPKYSLFELENGRKRMLASAGELQKGNELALPSKYVNFLYLASHYEKLKGSPEDNEQKQLFVEQHKHYLDEIIEQISEFSKRVILADANLDKVLSAYNKHRDKPIREQAENIIHLFTLTNLGAPAAFKYFDTTIDRKRYTSTKEVLDATLIHQSITGLYETRIDLSQLGGDGGGGGGSSGGSGGTLNIEDEHRLHETSKEPDVSLGSTWLSDFPQAWAETGGMGLAVRQAPLIIPLKATSTPVSIKQYPMSQEARLGIKPHIQRLLDQGILVPCQSPWNTPLLPVKKPGTNDYRPVQDLREVNKRVEDIHPTVPNPYNLLSGLPPSHQWYTVLDLKDAFFCLRLHPTSQPLFAFEWRDPEMGISGQLTWTRLPQGFKNSPTLFNEALHRDLADFRIQHPDLILLQYVDDLLLAATSELDCQQGTRALLQTLGNLGYRASAKKAQICQKQVKYLGYLLKEGQRWLTEARKETVMGQPTPKTPRQLREFLGTAGFCRLWIPGFAEMAAPLYPLTKPGTLFNWGPDQQKAYQEIKQALLTAPALGLPDLTKPFELFVDEKQGYAKGVLTQKLGPWRRPVAYLSKKLDPVAAGWPPCLRMVAAIAVLTKDAGKLTMGQPLVILAPHAVEALVKQPPDRWLSNARMTHYQALLLDTDRVQFGPVVALNPATLLPLPEEGLQHNCLDILAEAHGTRPDLTDQPLPDADHTWYTDGSSLLQEGQRKAGAAVTTETEVIWAKALPAGTSAQRAELIALTQALKMAEGKKLNVYTDSRYAFATAHIHGEIYRRRGWLTSEGKEIKNKDEILALLKALFLPKRLSIIHCPGHQKGHSAEARGNRMADQAARKAAITETPDTSTLLAGKRTADGSEFEKRTADGSEFESPKKKAKVE

SEQ ID NO: 3023 - protein, 2096 aa, synthetic construct; identical to SEQ ID NO: 2759

SEQ ID NO: 3024 - protein, 2092 aa, synthetic construct
MPAAKRVKLDGGDKKYSIGLDIGTNSVGWAVITDEYKVPSKKFKVLGNTDRHSIKKNLIGALLFDSGETAEATRLKRTARRRYTRRKNRICYLQEIFSNEMAKVDDSFFHRLEESFLVEEDKKHERHPIFGNIVDEVAYHEKYPTIYHLRKKLVDSTDKADLRLIYLALAHMIKFRGHFLIEGDLNPDNSDVDKLFIQLVQTYNQLFEENPINASGVDAKAILSARLSKSRRLENLIAQLPGEKKNGLFGNLIALSLGLTPNFKSNFDLAEDAKLQLSKDTYDDDLDNLLAQIGDQYADLFLAAKNLSDAILLSDILRVNTEITKAPLSASMIKRYDEHHQDLTLLKALVRQQLPEKYKEIFFDQSKNGYAGYIDGGASQEEFYKFIKPILEKMDGTEELLVKLNREDLLRKQRTFDNGSIPHQIHLGELHAILRRQEDFYPFLKDNREKIEKILTFRIPYYVGPLARGNSRFAWMTRKSEETITPWNFEEVVDKGASAQSFIERMTNFDKNLPNEKVLPKHSLLYEYFTVYNELTKVKYVTEGMRKPAFLSGEQKKAIVDLLFKTNRKVTVKQLKEDYFKKIECFDSVEISGVEDRFNASLGTYHDLLKIIKDKDFLDNEENEDILEDIVLTLTLFEDREMIEERLKTYAHLFDDKVMKQLKRRRYTGWGRLSRKLINGIRDKQSGKTILDFLKSDGFANRNFMQLIHDDSLTFKEDIQKAQVSGQGDSLHEHIANLAGSPAIKKGILQTVKVVDELVKVMGRHKPENIVIEMARENQTTQKGQKNSRERMKRIEEGIKELGSQILKEHPVENTQLQNEKLYLYYLQNGRDMYVDQELDINRLSDYDVDHIVPQSFLKDDSIDNKVLTRSDKARGKSDNVPSEEVVKKMKNYWRQLLNAKLITQRKFDNLTKAERGGLSELDKAGFIKRQLVETRQITKHVAQILDSRMNTKYDENDKLIREVKVITLKSKLVSDFRKDFQFYKVREINNYHHAHDAYLNAVVGTALIKKYPKLESEFVYGDYKVYDVRKMIAKSEQEIGKATAKYFFYSNIMNFFKTEITLANGEIRKRPLIETNGETGEIVWDKGRDFATVRKVLSMPQVNIVKKTEVQTGGFSKESILPKRNSDKLIARKKDWDPKKYGGFDSPTVAYSVLVVAKVEKGKSKKLKSVKELLGITIMERSSFEKNPIDFLEAKGYKEVKKDLIIKLPKYSLFELENGRKRMLASAGELQKGNELALPSKYVNFLYLASHYEKLKGSPEDNEQKQLFVEQHKHYLDEIIEQISEFSKRVILADANLDKVLSAYNKHRDKPIREQAENIIHLFTLTNLGAPAAFKYFDTTIDRKRYTSTKEVLDATLIHQSITGLYETRIDLSQLGGDGGGGGGGGGGGTLNIEDEHRLHETSKEPDVSLGSTWLSDFPQAWAETGGMGLAVRQAPLIIPLKATSTPVSIKQYPMSQEARLGIKPHIQRLLDQGILVPCQSPWNTPLLPVKKPGTNDYRPVQDLREVNKRVEDIHPTVPNPYNLLSGLPPSHQWYTVLDLKDAFFCLRLHPTSQPLFAFEWRDPEMGISGQLTWTRLPQGFKNSPTLFNEALHRDLADFRIQHPDLILLQYVDDLLLAATSELDCQQGTRALLQTLGNLGYRASAKKAQICQKQVKYLGYLLKEGQRWLTEARKETVMGQPTPKTPRQLREFLGTAGFCRLWIPGFAEMAAPLYPLTKPGTLFNWGPDQQKAYQEIKQALLTAPALGLPDLTKPFELFVDEKQGYAKGVLTQKLGPWRRPVAYLSKKLDPVAAGWPPCLRMVAAIAVLTKDAGKLTMGQPLVILAPHAVEALVKQPPDRWLSNARMTHYQALLLDTDRVQFGPVVALNPATLLPLPEEGLQHNCLDILAEAHGTRPDLTDQPLPDADHTWYTDGSSLLQEGQRKAGAAVTTETEVIWAKALPAGTSAQRAELIALTQALKMAEGKKLNVYTDSRYAFATAHIHGEIYRRRGWLTSEGKEIKNKDEILALLKALFLPKRLSIIHCPGHQKGHSAEARGNRMADQAARKAAITETPDTSTLLAGKRTADGSEFEKRTADGSEFESPKKKAKVE

SEQ ID NO: 3025 - protein, 2094 aa, synthetic construct; identical to SEQ ID NO: 2742

SEQ ID NO: 3026 - protein, 2094 aa, synthetic construct; identical to SEQ ID NO: 2715

SEQ ID NO: 3027 - protein, 2097 aa, synthetic construct; identical to SEQ ID NO: 2728

SEQ ID NO: 3028 - protein, 2091 aa, synthetic construct; identical to SEQ ID NO: 2743

SEQ ID NO: 3029 - protein, 2090 aa, synthetic construct
MPAAKRVKLDGGDKKYSIGLDIGTNSVGWAVITDEYKVPSKKFKVLGNTDRHSIKKNLIGALLFDSGETAEATRLKRTARRRYTRRKNRICYLQEIFSNEMAKVDDSFFHRLEESFLVEEDKKHERHPIFGNIVDEVAYHEKYPTIYHLRKKLVDSTDKADLRLIYLALAHMIKFRGHFLIEGDLNPDNSDVDKLFIQLVQTYNQLFEENPINASGVDAKAILSARLSKSRRLENLIAQLPGEKKNGLFGNLIALSLGLTPNFKSNFDLAEDAKLQLSKDTYDDDLDNLLAQIGDQYADLFLAAKNLSDAILLSDILRVNTEITKAPLSASMIKRYDEHHQDLTLLKALVRQQLPEKYKEIFFDQSKNGYAGYIDGGASQEEFYKFIKPILEKMDGTEELLVKLNREDLLRKQRTFDNGSIPHQIHLGELHAILRRQEDFYPFLKDNREKIEKILTFRIPYYVGPLARGNSRFAWMTRKSEETITPWNFEEVVDKGASAQSFIERMTNFDKNLPNEKVLPKHSLLYEYFTVYNELTKVKYVTEGMRKPAFLSGEQKKAIVDLLFKTNRKVTVKQLKEDYFKKIECFDSVEISGVEDRFNASLGTYHDLLKIIKDKDFLDNEENEDILEDIVLTLTLFEDREMIEERLKTYAHLFDDKVMKQLKRRRYTGWGRLSRKLINGIRDKQSGKTILDFLKSDGFANRNFMQLIHDDSLTFKEDIQKAQVSGQGDSLHEHIANLAGSPAIKKGILQTVKVVDELVKVMGRHKPENIVIEMARENQTTQKGQKNSRERMKRIEEGIKELGSQILKEHPVENTQLQNEKLYLYYLQNGRDMYVDQELDINRLSDYDVDHIVPQSFLKDDSIDNKVLTRSDKARGKSDNVPSEEVVKKMKNYWRQLLNAKLITQRKFDNLTKAERGGLSELDKAGFIKRQLVETRQITKHVAQILDSRMNTKYDENDKLIREVKVITLKSKLVSDFRKDFQFYKVREINNYHHAHDAYLNAVVGTALIKKYPKLESEFVYGDYKVYDVRKMIAKSEQEIGKATAKYFFYSNIMNFFKTEITLANGEIRKRPLIETNGETGEIVWDKGRDFATVRKVLSMPQVNIVKKTEVQTGGFSKESILPKRNSDKLIARKKDWDPKKYGGFDSPTVAYSVLVVAKVEKGKSKKLKSVKELLGITIMERSSFEKNPIDFLEAKGYKEVKKDLIIKLPKYSLFELENGRKRMLASAGELQKGNELALPSKYVNFLYLASHYEKLKGSPEDNEQKQLFVEQHKHYLDEIIEQISEFSKRVILADANLDKVLSAYNKHRDKPIREQAENIIHLFTLTNLGAPAAFKYFDTTIDRKRYTSTKEVLDATLIHQSITGLYETRIDLSQLGGDGGPAPAPGGTLNIEDEHRLHETSKEPDVSLGSTWLSDFPQAWAETGGMGLAVRQAPLIIPLKATSTPVSIKQYPMSQEARLGIKPHIQRLLDQGILVPCQSPWNTPLLPVKKPGTNDYRPVQDLREVNKRVEDIHPTVPNPYNLLSGLPPSHQWYTVLDLKDAFFCLRLHPTSQPLFAFEWRDPEMGISGQLTWTRLPQGFKNSPTLFNEALHRDLADFRIQHPDLILLQYVDDLLLAATSELDCQQGTRALLQTLGNLGYRASAKKAQICQKQVKYLGYLLKEGQRWLTEARKETVMGQPTPKTPRQLREFLGTAGFCRLWIPGFAEMAAPLYPLTKPGTLFNWGPDQQKAYQEIKQALLTAPALGLPDLTKPFELFVDEKQGYAKGVLTQKLGPWRRPVAYLSKKLDPVAAGWPPCLRMVAAIAVLTKDAGKLTMGQPLVILAPHAVEALVKQPPDRWLSNARMTHYQALLLDTDRVQFGPVVALNPATLLPLPEEGLQHNCLDILAEAHGTRPDLTDQPLPDADHTWYTDGSSLLQEGQRKAGAAVTTETEVIWAKALPAGTSAQRAELIALTQALKMAEGKKLNVYTDSRYAFATAHIHGEIYRRRGWLTSEGKEIKNKDEILALLKALFLPKRLSIIHCPGHQKGHSAEARGNRMADQAARKAAITETPDTSTLLAGKRTADGSEFEKRTADGSEFESPKKKAKVE

SEQ ID NO: 3030 - protein, 2091 aa, synthetic construct; identical to SEQ ID NO: 2750

SEQ ID NO: 3031 - protein, 2094 aa, synthetic construct; identical to SEQ ID NO: 2768

SEQ ID NO: 3032 - protein, 2094 aa, synthetic construct; identical to SEQ ID NO: 2770

SEQ ID NO: 3033 - protein, 2091 aa, synthetic construct; identical to SEQ ID NO: 2779

SEQ ID NO: 3034 - protein, 2093 aa, synthetic construct; identical to SEQ ID NO: 2774

SEQ ID NO: 3035 - protein, 2103 aa, synthetic construct
MPAAKRVKLDGGDKKYSIGLDIGTNSVGWAVITDEYKVPSKKFKVLGNTDRHSIKKNLIGALLFDSGETAEATRLKRTARRRYTRRKNRICYLQEIFSNEMAKVDDSFFHRLEESFLVEEDKKHERHPIFGNIVDEVAYHEKYPTIYHLRKKLVDSTDKADLRLIYLALAHMIKFRGHFLIEGDLNPDNSDVDKLFIQLVQTYNQLFEENPINASGVDAKAILSARLSKSRRLENLIAQLPGEKKNGLFGNLIALSLGLTPNFKSNFDLAEDAKLQLSKDTYDDDLDNLLAQIGDQYADLFLAAKNLSDAILLSDILRVNTEITKAPLSASMIKRYDEHHQDLTLLKALVRQQLPEKYKEIFFDQSKNGYAGYIDGGASQEEFYKFIKPILEKMDGTEELLVKLNREDLLRKQRTFDNGSIPHQIHLGELHAILRRQEDFYPFLKDNREKIEKILTFRIPYYVGPLARGNSRFAWMTRKSEETITPWNFEEVVDKGASAQSFIERMTNFDKNLPNEKVLPKHSLLYEYFTVYNELTKVKYVTEGMRKPAFLSGEQKKAIVDLLFKTNRKVTVKQLKEDYFKKIECFDSVEISGVEDRFNASLGTYHDLLKIIKDKDFLDNEENEDILEDIVLTLTLFEDREMIEERLKTYAHLFDDKVMKQLKRRRYTGWGRLSRKLINGIRDKQSGKTILDFLKSDGFANRNFMQLIHDDSLTFKEDIQKAQVSGQGDSLHEHIANLAGSPAIKKGILQTVKVVDELVKVMGRHKPENIVIEMARENQTTQKGQKNSRERMKRIEEGIKELGSQILKEHPVENTQLQNEKLYLYYLQNGRDMYVDQELDINRLSDYDVDHIVPQSFLKDDSIDNKVLTRSDKARGKSDNVPSEEVVKKMKNYWRQLLNAKLITQRKFDNLTKAERGGLSELDKAGFIKRQLVETRQITKHVAQILDSRMNTKYDENDKLIREVKVITLKSKLVSDFRKDFQFYKVREINNYHHAHDAYLNAVVGTALIKKYPKLESEFVYGDYKVYDVRKMIAKSEQEIGKATAKYFFYSNIMNFFKTEITLANGEIRKRPLIETNGETGEIVWDKGRDFATVRKVLSMPQVNIVKKTEVQTGGFSKESILPKRNSDKLIARKKDWDPKKYGGFDSPTVAYSVLVVAKVEKGKSKKLKSVKELLGITIMERSSFEKNPIDFLEAKGYKEVKKDLIIKLPKYSLFELENGRKRMLASAGELQKGNELALPSKYVNFLYLASHYEKLKGSPEDNEQKQLFVEQHKHYLDEIIEQISEFSKRVILADANLDKVLSAYNKHRDKPIREQAENIIHLFTLTNLGAPAAFKYFDTTIDRKRYTSTKEVLDATLIHQSITGLYETRIDLSQLGGDGGGGSGGSGGSGGSGGSGGSGGTLNIEDEHRLHETSKEPDVSLGSTWLSDFPQAWAETGGMGLAVRQAPLIIPLKATSTPVSIKQYPMSQEARLGIKPHIQRLLDQGILVPCQSPWNTPLLPVKKPGTNDYRPVQDLREVNKRVEDIHPTVPNPYNLLSGLPPSHQWYTVLDLKDAFFCLRLHPTSQPLFAFEWRDPEMGISGQLTWTRLPQGFKNSPTLFNEALHRDLADFRIQHPDLILLQYVDDLLLAATSELDCQQGTRALLQTLGNLGYRASAKKAQICQKQVKYLGYLLKEGQRWLTEARKETVMGQPTPKTPRQLREFLGKAGFCRLFIPGFAEMAAPLYPLTKPGTLFNWGPDQQKAYQEIKQALLTAPALGLPDLTKPFELFVDEKQGYAKGVLTQKLGPWRRPVAYLSKKLDPVAAGWPPCLRMVAAIAVLTKDAGKLTMGQPLVILAPHAVEALVKQPPDRWLSNARMTHYQALLLDTDRVQFGPVVALNPATLLPLPEEGLQHNCLDILAEAHGTRPDLTDQPLPDADHTWYTDGSSLLQEGQRKAGAAVTTETEVIWAKALPAGTSAQRAELIALTQALKMAEGKKLNVYTDSRYAFATAHIHGEIYRRRGWLTSEGKEIKNKDEILALLKALFLPKRLSIIHCPGHQKGHSAEARGNRMADQAARKAAITETPDTSTLLAGKRTADGSEFEKRTADGSEFESPKKKAKVE

SEQ ID NO: 3036 - protein, 2105 aa, synthetic construct; identical to SEQ ID NO: 2844

SEQ ID NO: 3037 - protein, 2088 aa, synthetic construct; identical to SEQ ID NO: 2812

SEQ ID NO: 3038 - protein, 2103 aa, synthetic construct; identical to SEQ ID NO: 2816

SEQ ID NO: 3039 - protein, 2097 aa, synthetic construct; identical to SEQ ID NO: 2795

SEQ ID NO: 3040 - protein, 2096 aa, synthetic construct; identical to SEQ ID NO: 2831

SEQ ID NO: 3041 - protein, 2095 aa, synthetic construct; identical to SEQ ID NO: 2845

SEQ ID NO: 3042 - protein, 2094 aa, synthetic construct; identical to SEQ ID NO: 2818

SEQ ID NO: 3043 - protein, 2110 aa, synthetic construct; identical to SEQ ID NO: 2803

SEQ ID NO: 3044 - protein, 2091 aa, synthetic construct
MPAAKRVKLDGGDKKYSIGLDIGTNSVGWAVITDEYKVPSKKFKVLGNTDRHSIKKNLIGALLFDSGETAEATRLKRTARRRYTRRKNRICYLQEIFSNEMAKVDDSFFHRLEESFLVEEDKKHERHPIFGNIVDEVAYHEKYPTIYHLRKKLVDSTDKADLRLIYLALAHMIKFRGHFLIEGDLNPDNSDVDKLFIQLVQTYNQLFEENPINASGVDAKAILSARLSKSRRLENLIAQLPGEKKNGLFGNLIALSLGLTPNFKSNFDLAEDAKLQLSKDTYDDDLDNLLAQIGDQYADLFLAAKNLSDAILLSDILRVNTEITKAPLSASMIKRYDEHHQDLTLLKALVRQQLPEKYKEIFFDQSKNGYAGYIDGGASQEEFYKFIKPILEKMDGTEELLVKLNREDLLRKQRTFDNGSIPHQIHLGELHAILRRQEDFYPFLKDNREKIEKILTFRIPYYVGPLARGNSRFAWMTRKSEETITPWNFEEVVDKGASAQSFIERMTNFDKNLPNEKVLPKHSLLYEYFTVYNELTKVKYVTEGMRKPAFLSGEQKKAIVDLLFKTNRKVTVKQLKEDYFKKIECFDSVEISGVEDRFNASLGTYHDLLKIIKDKDFLDNEENEDILEDIVLTLTLFEDREMIEERLKTYAHLFDDKVMKQLKRRRYTGWGRLSRKLINGIRDKQSGKTILDFLKSDGFANRNFMQLIHDDSLTFKEDIQKAQVSGQGDSLHEHIANLAGSPAIKKGILQTVKVVDELVKVMGRHKPENIVIEMARENQTTQKGQKNSRERMKRIEEGIKELGSQILKEHPVENTQLQNEKLYLYYLQNGRDMYVDQELDINRLSDYDVDHIVPQSFLKDDSIDNKVLTRSDKARGKSDNVPSEEVVKKMKNYWRQLLNAKLITQRKFDNLTKAERGGLSELDKAGFIKRQLVETRQITKHVAQILDSRMNTKYDENDKLIREVKVITLKSKLVSDFRKDFQFYKVREINNYHHAHDAYLNAVVGTALIKKYPKLESEFVYGDYKVYDVRKMIAKSEQEIGKATAKYFFYSNIMNFFKTEITLANGEIRKRPLIETNGETGEIVWDKGRDFATVRKVLSMPQVNIVKKTEVQTGGFSKESILPKRNSDKLIARKKDWDPKKYGGFDSPTVAYSVLVVAKVEKGKSKKLKSVKELLGITIMERSSFEKNPIDFLEAKGYKEVKKDLIIKLPKYSLFELENGRKRMLASAGELQKGNELALPSKYVNFLYLASHYEKLKGSPEDNEQKQLFVEQHKHYLDEIIEQISEFSKRVILADANLDKVLSAYNKHRDKPIREQAENIIHLFTLTNLGAPAAFKYFDTTIDRKRYTSTKEVLDATLIHQSITGLYETRIDLSQLGGDGGGGGGGGGGTLNIEDEHRLHETSKEPDVSLGSTWLSDFPQAWAETGGMGLAVRQAPLIIPLKATSTPVSIKQYPMSQEARLGIKPHIQRLLDQGILVPCQSPWNTPLLPVKKPGTNDYRPVQDLREVNKRVEDIHPTVPNPYNLLSGLPPSHQWYTVLDLKDAFFCLRLHPTSQPLFAFEWRDPEMGISGQLTWTRLPQGFKNSPTLFNEALHRDLADFRIQHPDLILLQYVDDLLLAATSELDCQQGTRALLQTLGNLGYRASAKKAQICQKQVKYLGYLLKEGQRWLTEARKETVMGQPTPKTPRQLREFLGKAGFCRLFIPGFAEMAAPLYPLTKPGTLFNWGPDQQKAYQEIKQALLTAPALGLPDLTKPFELFVDEKQGYAKGVLTQKLGPWRRPVAYLSKKLDPVAAGWPPCLRMVAAIAVLTKDAGKLTMGQPLVILAPHAVEALVKQPPDRWLSNARMTHYQALLLDTDRVQFGPVVALNPATLLPLPEEGLQHNCLDILAEAHGTRPDLTDQPLPDADHTWYTDGSSLLQEGQRKAGAAVTTETEVIWAKALPAGTSAQRAELIALTQALKMAEGKKLNVYTDSRYAFATAHIHGEIYRRRGWLTSEGKEIKNKDEILALLKALFLPKRLSIIHCPGHQKGHSAEARGNRMADQAARKAAITETPDTSTLLAGKRTADGSEFEKRTADGSEFESPKKKAKVE

SEQ ID NO: 3045 - protein, 2096 aa, synthetic construct
MPAAKRVKLDGGDKKYSIGLDIGTNSVGWAVITDEYKVPSKKFKVLGNTDRHSIKKNLIGALLFDSGETAEATRLKRTARRRYTRRKNRICYLQEIFSNEMAKVDDSFFHRLEESFLVEEDKKHERHPIFGNIVDEVAYHEKYPTIYHLRKKLVDSTDKADLRLIYLALAHMIKFRGHFLIEGDLNPDNSDVDKLFIQLVQTYNQLFEENPINASGVDAKAILSARLSKSRRLENLIAQLPGEKKNGLFGNLIALSLGLTPNFKSNFDLAEDAKLQLSKDTYDDDLDNLLAQIGDQYADLFLAAKNLSDAILLSDILRVNTEITKAPLSASMIKRYDEHHQDLTLLKALVRQQLPEKYKEIFFDQSKNGYAGYIDGGASQEEFYKFIKPILEKMDGTEELLVKLNREDLLRKQRTFDNGSIPHQIHLGELHAILRRQEDFYPFLKDNREKIEKILTFRIPYYVGPLARGNSRFAWMTRKSEETITPWNFEEVVDKGASAQSFIERMTNFDKNLPNEKVLPKHSLLYEYFTVYNELTKVKYVTEGMRKPAFLSGEQKKAIVDLLFKTNRKVTVKQLKEDYFKKIECFDSVEISGVEDRFNASLGTYHDLLKIIKDKDFLDNEENEDILEDIVLTLTLFEDREMIEERLKTYAHLFDDKVMKQLKRRRYTGWGRLSRKLINGIRDKQSGKTILDFLKSDGFANRNFMQLIHDDSLTFKEDIQKAQVSGQGDSLHEHIANLAGSPAIKKGILQTVKVVDELVKVMGRHKPENIVIEMARENQTTQKGQKNSRERMKRIEEGIKELGSQILKEHPVENTQLQNEKLYLYYLQNGRDMYVDQELDINRLSDYDVDHIVPQSFLKDDSIDNKVLTRSDKARGKSDNVPSEEVVKKMKNYWRQLLNAKLITQRKFDNLTKAERGGLSELDKAGFIKRQLVETRQITKHVAQILDSRMNTKYDENDKLIREVKVITLKSKLVSDFRKDFQFYKVREINNYHHAHDAYLNAVVGTALIKKYPKLESEFVYGDYKVYDVRKMIAKSEQEIGKATAKYFFYSNIMNFFKTEITLANGEIRKRPLIETNGETGEIVWDKGRDFATVRKVLSMPQVNIVKKTEVQTGGFSKESILPKRNSDKLIARKKDWDPKKYGGFDSPTVAYSVLVVAKVEKGKSKKLKSVKELLGITIMERSSFEKNPIDFLEAKGYKEVKKDLIIKLPKYSLFELENGRKRMLASAGELQKGNELALPSKYVNFLYLASHYEKLKGSPEDNEQKQLFVEQHKHYLDEIIEQISEFSKRVILADANLDKVLSAYNKHRDKPIREQAENIIHLFTLTNLGAPAAFKYFDTTIDRKRYTSTKEVLDATLIHQSITGLYETRIDLSQLGGDGGGGGEAAAKGGSGGTLNIEDEHRLHETSKEPDVSLGSTWLSDFPQAWAETGGMGLAVRQAPLIIPLKATSTPVSIKQYPMSQEARLGIKPHIQRLLDQGILVPCQSPWNTPLLPVKKPGTNDYRPVQDLREVNKRVEDIHPTVPNPYNLLSGLPPSHQWYTVLDLKDAFFCLRLHPTSQPLFAFEWRDPEMGISGQLTWTRLPQGFKNSPTLFNEALHRDLADFRIQHPDLILLQYVDDLLLAATSELDCQQGTRALLQTLGNLGYRASAKKAQICQKQVKYLGYLLKEGQRWLTEARKETVMGQPTPKTPRQLREFLGKAGFCRLFIPGFAEMAAPLYPLTKPGTLFNWGPDQQKAYQEIKQALLTAPALGLPDLTKPFELFVDEKQGYAKGVLTQKLGPWRRPVAYLSKKLDPVAAGWPPCLRMVAAIAVLTKDAGKLTMGQPLVILAPHAVEALVKQPPDRWLSNARMTHYQALLLDTDRVQFGPVVALNPATLLPLPEEGLQHNCLDILAEAHGTRPDLTDQPLPDADHTWYTDGSSLLQEGQRKAGAAVTTETEVIWAKALPAGTSAQRAELIALTQALKMAEGKKLNVYTDSRYAFATAHIHGEIYRRRGWLTSEGKEIKNKDEILALLKALFLPKRLSIIHCPGHQKGHSAEARGNRMADQAARKAAITETPDTSTLLAGKRTADGSEFEKRTADGSEFESPKKKAKVE

SEQ ID NO: 3046 - protein, 2096 aa, synthetic construct; identical to SEQ ID NO: 2829

SEQ ID NO: 3047 - protein, 2094 aa, synthetic construct
MPAAKRVKLDGGDKKYSIGLDIGTNSVGWAVITDEYKVPSKKFKVLGNTDRHSIKKNLIGALLFDSGETAEATRLKRTARRRYTRRKNRICYLQEIFSNEMAKVDDSFFHRLEESFLVEEDKKHERHPIFGNIVDEVAYHEKYPTIYHLRKKLVDSTDKADLRLIYLALAHMIKFRGHFLIEGDLNPDNSDVDKLFIQLVQTYNQLFEENPINASGVDAKAILSARLSKSRRLENLIAQLPGEKKNGLFGNLIALSLGLTPNFKSNFDLAEDAKLQLSKDTYDDDLDNLLAQIGDQYADLFLAAKNLSDAILLSDILRVNTEITKAPLSASMIKRYDEHHQDLTLLKALVRQQLPEKYKEIFFDQSKNGYAGYIDGGASQEEFYKFIKPILEKMDGTEELLVKLNREDLLRKQRTFDNGSIPHQIHLGELHAILRRQEDFYPFLKDNREKIEKILTFRIPYYVGPLARGNSRFAWMTRKSEETITPWNFEEVVDKGASAQSFIERMTNFDKNLPNEKVLPKHSLLYEYFTVYNELTKVKYVTEGMRKPAFLSGEQKKAIVDLLFKTNRKVTVKQLKEDYFKKIECFDSVEISGVEDRFNASLGTYHDLLKIIKDKDFLDNEENEDILEDIVLTLTLFEDREMIEERLKTYAHLFDDKVMKQLKRRRYTGWGRLSRKLINGIRDKQSGKTILDFLKSDGFANRNFMQLIHDDSLTFKEDIQKAQVSGQGDSLHEHIANLAGSPAIKKGILQTVKVVDELVKVMGRHKPENIVIEMARENQTTQKGQKNSRERMKRIEEGIKELGSQILKEHPVENTQLQNEKLYLYYLQNGRDMYVDQELDINRLSDYDVDHIVPQSFLKDDSIDNKVLTRSDKARGKSDNVPSEEVVKKMKNYWRQLLNAKLITQRKFDNLTKAERGGLSELDKAGFIKRQLVETRQITKHVAQILDSRMNTKYDENDKLIREVKVITLKSKLVSDFRKDFQFYKVREINNYHHAHDAYLNAVVGTALIKKYPKLESEFVYGDYKVYDVRKMIAKSEQEIGKATAKYFFYSNIMNFFKTEITLANGEIRKRPLIETNGETGEIVWDKGRDFATVRKVLSMPQVNIVKKTEVQTGGFSKESILPKRNSDKLIARKKDWDPKKYGGFDSPTVAYSVLVVAKVEKGKSKKLKSVKELLGITIMERSSFEKNPIDFLEAKGYKEVKKDLIIKLPKYSLFELENGRKRMLASAGELQKGNELALPSKYVNFLYLASHYEKLKGSPEDNEQKQLFVEQHKHYLDEIIEQISEFSKRVILADANLDKVLSAYNKHRDKPIREQAENIIHLFTLTNLGAPAAFKYFDTTIDRKRYTSTKEVLDATLIHQSITGLYETRIDLSQLGGDGGGSSGGGGGSGGTLNIEDEHRLHETSKEPDVSLGSTWLSDFPQAWAETGGMGLAVRQAPLIIPLKATSTPVSIKQYPMSQEARLGIKPHIQRLLDQGILVPCQSPWNTPLLPVKKPGTNDYRPVQDLREVNKRVEDIHPTVPNPYNLLSGLPPSHQWYTVLDLKDAFFCLRLHPTSQPLFAFEWRDPEMGISGQLTWTRLPQGFKNSPTLFNEALHRDLADFRIQHPDLILLQYVDDLLLAATSELDCQQGTRALLQTLGNLGYRASAKKAQICQKQVKYLGYLLKEGQRWLTEARKETVMGQPTPKTPRQLREFLGKAGFCRLFIPGFAEMAAPLYPLTKPGTLFNWGPDQQKAYQEIKQALLTAPALGLPDLTKPFELFVDEKQGYAKGVLTQKLGPWRRPVAYLSKKLDPVAAGWPPCLRMVAAIAVLTKDAGKLTMGQPLVILAPHAVEALVKQPPDRWLSNARMTHYQALLLDTDRVQFGPVVALNPATLLPLPEEGLQHNCLDILAEAHGTRPDLTDQPLPDADHTWYTDGSSLLQEGQRKAGAAVTTETEVIWAKALPAGTSAQRAELIALTQALKMAEGKKLNVYTDSRYAFATAHIHGEIYRRRGWLTSEGKEIKNKDEILALLKALFLPKRLSIIHCPGHQKGHSAEARGNRMADQAARKAAITETPDTSTLLAGKRTADGSEFEKRTADGSEFESPKKKAKVE

SEQ ID NO: 3048 - protein, 2094 aa, synthetic construct; identical to SEQ ID NO: 2852

SEQ ID NO: 3049 - protein, 2097 aa, synthetic construct; identical to SEQ ID NO: 2814

SEQ ID NO: 3050 - protein, 2096 aa, synthetic construct
MPAAKRVKLDGGDKKYSIGLDIGTNSVGWAVITDEYKVPSKKFKVLGNTDRHSIKKNLIGALLFDSGETAEATRLKRTARRRYTRRKNRICYLQEIFSNEMAKVDDSFFHRLEESFLVEEDKKHERHPIFGNIVDEVAYHEKYPTIYHLRKKLVDSTDKADLRLIYLALAHMIKFRGHFLIEGDLNPDNSDVDKLFIQLVQTYNQLFEENPINASGVDAKAILSARLSKSRRLENLIAQLPGEKKNGLFGNLIALSLGLTPNFKSNFDLAEDAKLQLSKDTYDDDLDNLLAQIGDQYADLFLAAKNLSDAILLSDILRVNTEITKAPLSASMIKRYDEHHQDLTLLKALVRQQLPEKYKEIFFDQSKNGYAGYIDGGASQEEFYKFIKPILEKMDGTEELLVKLNREDLLRKQRTFDNGSIPHQIHLGELHAILRRQEDFYPFLKDNREKIEKILTFRIPYYVGPLARGNSRFAWMTRKSEETITPWNFEEVVDKGASAQSFIERMTNFDKNLPNEKVLPKHSLLYEYFTVYNELTKVKYVTEGMRKPAFLSGEQKKAIVDLLFKTNRKVTVKQLKEDYFKKIECFDSVEISGVEDRFNASLGTYHDLLKIIKDKDFLDNEENEDILEDIVLTLTLFEDREMIEERLKTYAHLFDDKVMKQLKRRRYTGWGRLSRKLINGIRDKQSGKTILDFLKSDGFANRNFMQLIHDDSLTFKEDIQKAQVSGQGDSLHEHIANLAGSPAIKKGILQTVKVVDELVKVMGRHKPENIVIEMARENQTTQKGQKNSRERMKRIEEGIKELGSQILKEHPVENTQLQNEKLYLYYLQNGRDMYVDQELDINRLSDYDVDHIVPQSFLKDDSIDNKVLTRSDKARGKSDNVPSEEVVKKMKNYWRQLLNAKLITQRKFDNLTKAERGGLSELDKAGFIKRQLVETRQITKHVAQILDSRMNTKYDENDKLIREVKVITLKSKLVSDFRKDFQFYKVREINNYHHAHDAYLNAVVGTALIKKYPKLESEFVYGDYKVYDVRKMIAKSEQEIGKATAKYFFYSNIMNFFKTEITLANGEIRKRPLIETNGETGEIVWDKGRDFATVRKVLSMPQVNIVKKTEVQTGGFSKESILPKRNSDKLIARKKDWDPKKYGGFDSPTVAYSVLVVAKVEKGKSKKLKSVKELLGITIMERSSFEKNPIDFLEAKGYKEVKKDLIIKLPKYSLFELENGRKRMLASAGELQKGNELALPSKYVNFLYLASHYEKLKGSPEDNEQKQLFVEQHKHYLDEIIEQISEFSKRVILADANLDKVLSAYNKHRDKPIREQAENIIHLFTLTNLGAPAAFKYFDTTIDRKRYTSTKEVLDATLIHQSITGLYETRIDLSQLGGDGGGGGEAAAKGSSGGTLNIEDEHRLHETSKEPDVSLGSTWLSDFPQAWAETGGMGLAVRQAPLIIPLKATSTPVSIKQYPMSQEARLGIKPHIQRLLDQGILVPCQSPWNTPLLPVKKPGTNDYRPVQDLREVNKRVEDIHPTVPNPYNLLSGLPPSHQWYTVLDLKDAFFCLRLHPTSQPLFAFEWRDPEMGISGQLTWTRLPQGFKNSPTLFNEALHRDLADFRIQHPDLILLQYVDDLLLAATSELDCQQGTRALLQTLGNLGYRASAKKAQICQKQVKYLGYLLKEGQRWLTEARKETVMGQPTPKTPRQLREFLGKAGFCRLFIPGFAEMAAPLYPLTKPGTLFNWGPDQQKAYQEIKQALLTAPALGLPDLTKPFELFVDEKQGYAKGVLTQKLGPWRRPVAYLSKKLDPVAAGWPPCLRMVAAIAVLTKDAGKLTMGQPLVILAPHAVEALVKQPPDRWLSNARMTHYQALLLDTDRVQFGPVVALNPATLLPLPEEGLQHNCLDILAEAHGTRPDLTDQPLPDADHTWYTDGSSLLQEGQRKAGAAVTTETEVIWAKALPAGTSAQRAELIALTQALKMAEGKKLNVYTDSRYAFATAHIHGEIYRRRGWLTSEGKEIKNKDEILALLKALFLPKRLSIIHCPGHQKGHSAEARGNRMADQAARKAAITETPDTSTLLAGKRTADGSEFEKRTADGSEFESPKKKAKVE

SEQ ID NO: 3051 - protein, 2096 aa, synthetic construct; identical to SEQ ID NO: 2785

SEQ ID NO: 3052 - protein, 2096 aa, synthetic construct; identical to SEQ ID NO: 2822

SEQ ID NO: 3053 - protein, 2096 aa, synthetic construct; identical to SEQ ID NO: 2817

SEQ ID NO: 3054 - protein, 2096 aa, synthetic construct; identical to SEQ ID NO: 2851

SEQ ID NO: 3055 - protein, 2091 aa, synthetic construct
MPAAKRVKLDGGDKKYSIGLDIGTNSVGWAVITDEYKVPSKKFKVLGNTDRHSIKKNLIGALLFDSGETAEATRLKRTARRRYTRRKNRICYLQEIFSNEMAKVDDSFFHRLEESFLVEEDKKHERHPIFGNIVDEVAYHEKYPTIYHLRKKLVDSTDKADLRLIYLALAHMIKFRGHFLIEGDLNPDNSDVDKLFIQLVQTYNQLFEENPINASGVDAKAILSARLSKSRRLENLIAQLPGEKKNGLFGNLIALSLGLTPNFKSNFDLAEDAKLQLSKDTYDDDLDNLLAQIGDQYADLFLAAKNLSDAILLSDILRVNTEITKAPLSASMIKRYDEHHQDLTLLKALVRQQLPEKYKEIFFDQSKNGYAGYIDGGASQEEFYKFIKPILEKMDGTEELLVKLNREDLLRKQRTFDNGSIPHQIHLGELHAILRRQEDFYPFLKDNREKIEKILTFRIPYYVGPLARGNSRFAWMTRKSEETITPWNFEEVVDKGASAQSFIERMTNFDKNLPNEKVLPKHSLLYEYFTVYNELTKVKYVTEGMRKPAFLSGEQKKAIVDLLFKTNRKVTVKQLKEDYFKKIECFDSVEISGVEDRFNASLGTYHDLLKIIKDKDFLDNEENEDILEDIVLTLTLFEDREMIEERLKTYAHLFDDKVMKQLKRRRYTGWGRLSRKLINGIRDKQSGKTILDFLKSDGFANRNFMQLIHDDSLTFKEDIQKAQVSGQGDSLHEHIANLAGSPAIKKGILQTVKVVDELVKVMGRHKPENIVIEMARENQTTQKGQKNSRERMKRIEEGIKELGSQILKEHPVENTQLQNEKLYLYYLQNGRDMYVDQELDINRLSDYDVDHIVPQSFLKDDSIDNKVLTRSDKARGKSDNVPSEEVVKKMKNYWRQLLNAKLITQRKFDNLTKAERGGLSELDKAGFIKRQLVETRQITKHVAQILDSRMNTKYDENDKLIREVKVITLKSKLVSDFRKDFQFYKVREINNYHHAHDAYLNAVVGTALIKKYPKLESEFVYGDYKVYDVRKMIAKSEQEIGKATAKYFFYSNIMNFFKTEITLANGEIRKRPLIETNGETGEIVWDKGRDFATVRKVLSMPQVNIVKKTEVQTGGFSKESILPKRNSDKLIARKKDWDPKKYGGFDSPTVAYSVLVVAKVEKGKSKKLKSVKELLGITIMERSSFEKNPIDFLEAKGYKEVKKDLIIKLPKYSLFELENGRKRMLASAGELQKGNELALPSKYVNFLYLASHYEKLKGSPEDNEQKQLFVEQHKHYLDEIIEQISEFSKRVILADANLDKVLSAYNKHRDKPIREQAENIIHLFTLTNLGAPAAFKYFDTTIDRKRYTSTKEVLDATLIHQSITGLYETRIDLSQLGGDGGGSSPAPGGTLNIEDEHRLHETSKEPDVSLGSTWLSDFPQAWAETGGMGLAVRQAPLIIPLKATSTPVSIKQYPMSQEARLGIKPHIQRLLDQGILVPCQSPWNTPLLPVKKPGTNDYRPVQDLREVNKRVEDIHPTVPNPYNLLSGLPPSHQWYTVLDLKDAFFCLRLHPTSQPLFAFEWRDPEMGISGQLTWTRLPQGFKNSPTLFNEALHRDLADFRIQHPDLILLQYVDDLLLAATSELDCQQGTRALLQTLGNLGYRASAKKAQICQKQVKYLGYLLKEGQRWLTEARKETVMGQPTPKTPRQLREFLGKAGFCRLFIPGFAEMAAPLYPLTKPGTLFNWGPDQQKAYQEIKQALLTAPALGLPDLTKPFELFVDEKQGYAKGVLTQKLGPWRRPVAYLSKKLDPVAAGWPPCLRMVAAIAVLTKDAGKLTMGQPLVILAPHAVEALVKQPPDRWLSNARMTHYQALLLDTDRVQFGPVVALNPATLLPLPEEGLQHNCLDILAEAHGTRPDLTDQPLPDADHTWYTDGSSLLQEGQRKAGAAVTTETEVIWAKALPAGTSAQRAELIALTQALKMAEGKKLNVYTDSRYAFATAHIHGEIYRRRGWLTSEGKEIKNKDEILALLKALFLPKRLSIIHCPGHQKGHSAEARGNRMADQAARKAAITETPDTSTLLAGKRTADGSEFEKRTADGSEFESPKKKAKVE

SEQ ID NO: 3056 - protein, 2094 aa, synthetic construct
MPAAKRVKLDGGDKKYSIGLDIGTNSVGWAVITDEYKVPSKKFKVLGNTDRHSIKKNLIGALLFDSGETAEATRLKRTARRRYTRRKNRICYLQEIFSNEMAKVDDSFFHRLEESFLVEEDKKHERHPIFGNIVDEVAYHEKYPTIYHLRKKLVDSTDKADLRLIYLALAHMIKFRGHFLIEGDLNPDNSDVDKLFIQLVQTYNQLFEENPINASGVDAKAILSARLSKSRRLENLIAQLPGEKKNGLFGNLIALSLGLTPNFKSNFDLAEDAKLQLSKDTYDDDLDNLLAQIGDQYADLFLAAKNLSDAILLSDILRVNTEITKAPLSASMIKRYDEHHQDLTLLKALVRQQLPEKYKEIFFDQSKNGYAGYIDGGASQEEFYKFIKPILEKMDGTEELLVKLNREDLLRKQRTFDNGSIPHQIHLGELHAILRRQEDFYPFLKDNREKIEKILTFRIPYYVGPLARGNSRFAWMTRKSEETITPWNFEEVVDKGASAQSFIERMTNFDKNLPNEKVLPKHSLLYEYFTVYNELTKVKYVTEGMRKPAFLSGEQKKAIVDLLFKTNRKVTVKQLKEDYFKKIECFDSVEISGVEDRFNASLGTYHDLLKIIKDKDFLDNEENEDILEDIVLTLTLFEDREMIEERLKTYAHLFDDKVMKQLKRRRYTGWGRLSRKLINGIRDKQSGKTILDFLKSDGFANRNFMQLIHDDSLTFKEDIQKAQVSGQGDSLHEHIANLAGSPAIKKGILQTVKVVDELVKVMGRHKPENIVIEMARENQTTQKGQKNSRERMKRIEEGIKELGSQILKEHPVENTQLQNEKLYLYYLQNGRDMYVDQELDINRLSDYDVDHIVPQSFLKDDSIDNKVLTRSDKARGKSDNVPSEEVVKKMKNYWRQLLNAKLITQRKFDNLTKAERGGLSELDKAGFIKRQLVETRQITKHVAQILDSRMNTKYDENDKLIREVKVITLKSKLVSDFRKDFQFYKVREINNYHHAHDAYLNAVVGTALIKKYPKLESEFVYGDYKVYDVRKMIAKSEQEIGKATAKYFFYSNIMNFFKTEITLANGEIRKRPLIETNGETGEIVWDKGRDFATVRKVLSMPQVNIVKKTEVQTGGFSKESILPKRNSDKLIARKKDWDPKKYGGFDSPTVAYSVLVVAKVEKGKSKKLKSVKELLGITIMERSSFEKNPIDFLEAKGYKEVKKDLIIKLPKYSLFELENGRKRMLASAGELQKGNELALPSKYVNFLYLASHYEKLKGSPEDNEQKQLFVEQHKHYLDEIIEQISEFSKRVILADANLDKVLSAYNKHRDKPIREQAENIIHLFTLTNLGAPAAFKYFDTTIDRKRYTSTKEVLDATLIHQSITGLYETRIDLSQLGGDGGGSSGGGPAPGGTLNIEDEHRLHETSKEPDVSLGSTWLSDFPQAWAETGGMGLAVRQAPLIIPLKATSTPVSIKQYPMSQEARLGIKPHIQRLLDQGILVPCQSPWNTPLLPVKKPGTNDYRPVQDLREVNKRVEDIHPTVPNPYNLLSGLPPSHQWYTVLDLKDAFFCLRLHPTSQPLFAFEWRDPEMGISGQLTWTRLPQGFKNSPTLFNEALHRDLADFRIQHPDLILLQYVDDLLLAATSELDCQQGTRALLQTLGNLGYRASAKKAQICQKQVKYLGYLLKEGQRWLTEARKETVMGQPTPKTPRQLREFLGKAGFCRLFIPGFAEMAAPLYPLTKPGTLFNWGPDQQKAYQEIKQALLTAPALGLPDLTKPFELFVDEKQGYAKGVLTQKLGPWRRPVAYLSKKLDPVAAGWPPCLRMVAAIAVLTKDAGKLTMGQPLVILAPHAVEALVKQPPDRWLSNARMTHYQALLLDTDRVQFGPVVALNPATLLPLPEEGLQHNCLDILAEAHGTRPDLTDQPLPDADHTWYTDGSSLLQEGQRKAGAAVTTETEVIWAKALPAGTSAQRAELIALTQALKMAEGKKLNVYTDSRYAFATAHIHGEIYRRRGWLTSEGKEIKNKDEILALLKALFLPKRLSIIHCPGHQKGHSAEARGNRMADQAARKAAITETPDTSTLLAGKRTADGSEFEKRTADGSEFESPKKKAKVE

SEQ ID NO: 3057 - protein, 2096 aa, synthetic construct; identical to SEQ ID NO: 2810

SEQ ID NO: 3058 - protein, 2091 aa, synthetic construct
MPAAKRVKLDGGDKKYSIGLDIGTNSVGWAVITDEYKVPSKKFKVLGNTDRHSIKKNLIGALLFDSGETAEATRLKRTARRRYTRRKNRICYLQEIFSNEMAKVDDSFFHRLEESFLVEEDKKHERHPIFGNIVDEVAYHEKYPTIYHLRKKLVDSTDKADLRLIYLALAHMIKFRGHFLIEGDLNPDNSDVDKLFIQLVQTYNQLFEENPINASGVDAKAILSARLSKSRRLENLIAQLPGEKKNGLFGNLIALSLGLTPNFKSNFDLAEDAKLQLSKDTYDDDLDNLLAQIGDQYADLFLAAKNLSDAILLSDILRVNTEITKAPLSASMIKRYDEHHQDLTLLKALVRQQLPEKYKEIFFDQSKNGYAGYIDGGASQEEFYKFIKPILEKMDGTEELLVKLNREDLLRKQRTFDNGSIPHQIHLGELHAILRRQEDFYPFLKDNREKIEKILTFRIPYYVGPLARGNSRFAWMTRKSEETITPWNFEEVVDKGASAQSFIERMTNFDKNLPNEKVLPKHSLLYEYFTVYNELTKVKYVTEGMRKPAFLSGEQKKAIVDLLFKTNRKVTVKQLKEDYFKKIECFDSVEISGVEDRFNASLGTYHDLLKIIKDKDFLDNEENEDILEDIVLTLTLFEDREMIEERLKTYAHLFDDKVMKQLKRRRYTGWGRLSRKLINGIRDKQSGKTILDFLKSDGFANRNFMQLIHDDSLTFKEDIQKAQVSGQGDSLHEHIANLAGSPAIKKGILQTVKVVDELVKVMGRHKPENIVIEMARENQTTQKGQKNSRERMKRIEEGIKELGSQILKEHPVENTQLQNEKLYLYYLQNGRDMYVDQELDINRLSDYDVDHIVPQSFLKDDSIDNKVLTRSDKARGKSDNVPSEEVVKKMKNYWRQLLNAKLITQRKFDNLTKAERGGLSELDKAGFIKRQLVETRQITKHVAQILDSRMNTKYDENDKLIREVKVITLKSKLVSDFRKDFQFYKVREINNYHHAHDAYLNAVVGTALIKKYPKLESEFVYGDYKVYDVRKMIAKSEQEIGKATAKYFFYSNIMNFFKTEITLANGEIRKRPLIETNGETGEIVWDKGRDFATVRKVLSMPQVNIVKKTEVQTGGFSKESILPKRNSDKLIARKKDWDPKKYGGFDSPTVAYSVLVVAKVEKGKSKKLKSVKELLGITIMERSSFEKNPIDFLEAKGYKEVKKDLIIKLPKYSLFELENGRKRMLASAGELQKGNELALPSKYVNFLYLASHYEKLKGSPEDNEQKQLFVEQHKHYLDEIIEQISEFSKRVILADANLDKVLSAYNKHRDKPIREQAENIIHLFTLTNLGAPAAFKYFDTTIDRKRYTSTKEVLDATLIHQSITGLYETRIDLSQLGGDGGGSSGGGGGTLNIEDEHRLHETSKEPDVSLGSTWLSDFPQAWAETGGMGLAVRQAPLIIPLKATSTPVSIKQYPMSQEARLGIKPHIQRLLDQGILVPCQSPWNTPLLPVKKPGTNDYRPVQDLREVNKRVEDIHPTVPNPYNLLSGLPPSHQWYTVLDLKDAFFCLRLHPTSQPLFAFEWRDPEMGISGQLTWTRLPQGFKNSPTLFNEALHRDLADFRIQHPDLILLQYVDDLLLAATSELDCQQGTRALLQTLGNLGYRASAKKAQICQKQVKYLGYLLKEGQRWLTEARKETVMGQPTPKTPRQLREFLGKAGFCRLFIPGFAEMAAPLYPLTKPGTLFNWGPDQQKAYQEIKQALLTAPALGLPDLTKPFELFVDEKQGYAKGVLTQKLGPWRRPVAYLSKKLDPVAAGWPPCLRMVAAIAVLTKDAGKLTMGQPLVILAPHAVEALVKQPPDRWLSNARMTHYQALLLDTDRVQFGPVVALNPATLLPLPEEGLQHNCLDILAEAHGTRPDLTDQPLPDADHTWYTDGSSLLQEGQRKAGAAVTTETEVIWAKALPAGTSAQRAELIALTQALKMAEGKKLNVYTDSRYAFATAHIHGEIYRRRGWLTSEGKEIKNKDEILALLKALFLPKRLSIIHCPGHQKGHSAEARGNRMADQAARKAAITETPDTSTLLAGKRTADGSEFEKRTADGSEFESPKKKAKVE

SEQ ID NO: 3059 - protein, 2094 aa, synthetic construct; identical to SEQ ID NO: 2804

SEQ ID NO: 3060 - protein, 2091 aa, synthetic construct
MPAAKRVKLDGGDKKYSIGLDIGTNSVGWAVITDEYKVPSKKFKVLGNTDRHSIKKNLIGALLFDSGETAEATRLKRTARRRYTRRKNRICYLQEIFSNEMAKVDDSFFHRLEESFLVEEDKKHERHPIFGNIVDEVAYHEKYPTIYHLRKKLVDSTDKADLRLIYLALAHMIKFRGHFLIEGDLNPDNSDVDKLFIQLVQTYNQLFEENPINASGVDAKAILSARLSKSRRLENLIAQLPGEKKNGLFGNLIALSLGLTPNFKSNFDLAEDAKLQLSKDTYDDDLDNLLAQIGDQYADLFLAAKNLSDAILLSDILRVNTEITKAPLSASMIKRYDEHHQDLTLLKALVRQQLPEKYKEIFFDQSKNGYAGYIDGGASQEEFYKFIKPILEKMDGTEELLVKLNREDLLRKQRTFDNGSIPHQIHLGELHAILRRQEDFYPFLKDNREKIEKILTFRIPYYVGPLARGNSRFAWMTRKSEETITPWNFEEVVDKGASAQSFIERMTNFDKNLPNEKVLPKHSLLYEYFTVYNELTKVKYVTEGMRKPAFLSGEQKKAIVDLLFKTNRKVTVKQLKEDYFKKIECFDSVEISGVEDRFNASLGTYHDLLKIIKDKDFLDNEENEDILEDIVLTLTLFEDREMIEERLKTYAHLFDDKVMKQLKRRRYTGWGRLSRKLINGIRDKQSGKTILDFLKSDGFANRNFMQLIHDDSLTFKEDIQKAQVSGQGDSLHEHIANLAGSPAIKKGILQTVKVVDELVKVMGRHKPENIVIEMARENQTTQKGQKNSRERMKRIEEGIKELGSQILKEHPVENTQLQNEKLYLYYLQNGRDMYVDQELDINRLSDYDVDHIVPQSFLKDDSIDNKVLTRSDKARGKSDNVPSEEVVKKMKNYWRQLLNAKLITQRKFDNLTKAERGGLSELDKAGFIKRQLVETRQITKHVAQILDSRMNTKYDENDKLIREVKVITLKSKLVSDFRKDFQFYKVREINNYHHAHDAYLNAVVGTALIKKYPKLESEFVYGDYKVYDVRKMIAKSEQEIGKATAKYFFYSNIMNFFKTEITLANGEIRKRPLIETNGETGEIVWDKGRDFATVRKVLSMPQVNIVKKTEVQTGGFSKESILPKRNSDKLIARKKDWDPKKYGGFDSPTVAYSVLVVAKVEKGKSKKLKSVKELLGITIMERSSFEKNPIDFLEAKGYKEVKKDLIIKLPKYSLFELENGRKRMLASAGELQKGNELALPSKYVNFLYLASHYEKLKGSPEDNEQKQLFVEQHKHYLDEIIEQISEFSKRVILADANLDKVLSAYNKHRDKPIREQAENIIHLFTLTNLGAPAAFKYFDTTIDRKRYTSTKEVLDATLIHQSITGLYETRIDLSQLGGDGGPAPGGSGGTLNIEDEHRLHETSKEPDVSLGSTWLSDFPQAWAETGGMGLAVRQAPLIIPLKATSTPVSIKQYPMSQEARLGIKPHIQRLLDQGILVPCQSPWNTPLLPVKKPGTNDYRPVQDLREVNKRVEDIHPTVPNPYNLLSGLPPSHQWYTVLDLKDAFFCLRLHPTSQPLFAFEWRDPEMGISGQLTWTRLPQGFKNSPTLFNEALHRDLADFRIQHPDLILLQYVDDLLLAATSELDCQQGTRALLQTLGNLGYRASAKKAQICQKQVKYLGYLLKEGQRWLTEARKETVMGQPTPKTPRQLREFLGKAGFCRLFIPGFAEMAAPLYPLTKPGTLFNWGPDQQKAYQEIKQALLTAPALGLPDLTKPFELFVDEKQGYAKGVLTQKLGPWRRPVAYLSKKLDPVAAGWPPCLRMVAAIAVLTKDAGKLTMGQPLVILAPHAVEALVKQPPDRWLSNARMTHYQALLLDTDRVQFGPVVALNPATLLPLPEEGLQHNCLDILAEAHGTRPDLTDQPLPDADHTWYTDGSSLLQEGQRKAGAAVTTETEVIWAKALPAGTSAQRAELIALTQALKMAEGKKLNVYTDSRYAFATAHIHGEIYRRRGWLTSEGKEIKNKDEILALLKALFLPKRLSIIHCPGHQKGHSAEARGNRMADQAARKAAITETPDTSTLLAGKRTADGSEFEKRTADGSEFESPKKKAKVE

SEQ ID NO: 3061 - protein, 2093 aa, synthetic construct
MPAAKRVKLDGGDKKYSIGLDIGTNSVGWAVITDEYKVPSKKFKVLGNTDRHSIKKNLIGALLFDSGETAEATRLKRTARRRYTRRKNRICYLQEIFSNEMAKVDDSFFHRLEESFLVEEDKKHERHPIFGNIVDEVAYHEKYPTIYHLRKKLVDSTDKADLRLIYLALAHMIKFRGHFLIEGDLNPDNSDVDKLFIQLVQTYNQLFEENPINASGVDAKAILSARLSKSRRLENLIAQLPGEKKNGLFGNLIALSLGLTPNFKSNFDLAEDAKLQLSKDTYDDDLDNLLAQIGDQYADLFLAAKNLSDAILLSDILRVNTEITKAPLSASMIKRYDEHHQDLTLLKALVRQQLPEKYKEIFFDQSKNGYAGYIDGGASQEEFYKFIKPILEKMDGTEELLVKLNREDLLRKQRTFDNGSIPHQIHLGELHAILRRQEDFYPFLKDNREKIEKILTFRIPYYVGPLARGNSRFAWMTRKSEETITPWNFEEVVDKGASAQSFIERMTNFDKNLPNEKVLPKHSLLYEYFTVYNELTKVKYVTEGMRKPAFLSGEQKKAIVDLLFKTNRKVTVKQLKEDYFKKIECFDSVEISGVEDRFNASLGTYHDLLKIIKDKDFLDNEENEDILEDIVLTLTLFEDREMIEERLKTYAHLFDDKVMKQLKRRRYTGWGRLSRKLINGIRDKQSGKTILDFLKSDGFANRNFMQLIHDDSLTFKEDIQKAQVSGQGDSLHEHIANLAGSPAIKKGILQTVKVVDELVKVMGRHKPENIVIEMARENQTTQKGQKNSRERMKRIEEGIKELGSQILKEHPVENTQLQNEKLYLYYLQNGRDMYVDQELDINRLSDYDVDHIVPQSFLKDDSIDNKVLTRSDKARGKSDNVPSEEVVKKMKNYWRQLLNAKLITQRKFDNLTKAERGGLSELDKAGFIKRQLVETRQITKHVAQILDSRMNTKYDENDKLIREVKVITLKSKLVSDFRKDFQFYKVREINNYHHAHDAYLNAVVGTALIKKYPKLESEFVYGDYKVYDVRKMIAKSEQEIGKATAKYFFYSNIMNFFKTEITLANGEIRKRPLIETNGETGEIVWDKGRDFATVRKVLSMPQVNIVKKTEVQTGGFSKESILPKRNSDKLIARKKDWDPKKYGGFDSPTVAYSVLVVAKVEKGKSKKLKSVKELLGITIMERSSFEKNPIDFLEAKGYKEVKKDLIIKLPKYSLFELENGRKRMLASAGELQKGNELALPSKYVNFLYLASHYEKLKGSPEDNEQKQLFVEQHKHYLDEIIEQISEFSKRVILADANLDKVLSAYNKHRDKPIREQAENIIHLFTLTNLGAPAAFKYFDTTIDRKRYTSTKEVLDATLIHQSITGLYETRIDLSQLGGDGGPAPEAAAKGGTLNIEDEHRLHETSKEPDVSLGSTWLSDFPQAWAETGGMGLAVRQAPLIIPLKATSTPVSIKQYPMSQEARLGIKPHIQRLLDQGILVPCQSPWNTPLLPVKKPGTNDYRPVQDLREVNKRVEDIHPTVPNPYNLLSGLPPSHQWYTVLDLKDAFFCLRLHPTSQPLFAFEWRDPEMGISGQLTWTRLPQGFKNSPTLFNEALHRDLADFRIQHPDLILLQYVDDLLLAATSELDCQQGTRALLQTLGNLGYRASAKKAQICQKQVKYLGYLLKEGQRWLTEARKETVMGQPTPKTPRQLREFLGKAGFCRLFIPGFAEMAAPLYPLTKPGTLFNWGPDQQKAYQEIKQALLTAPALGLPDLTKPFELFVDEKQGYAKGVLTQKLGPWRRPVAYLSKKLDPVAAGWPPCLRMVAAIAVLTKDAGKLTMGQPLVILAPHAVEALVKQPPDRWLSNARMTHYQALLLDTDRVQFGPVVALNPATLLPLPEEGLQHNCLDILAEAHGTRPDLTDQPLPDADHTWYTDGSSLLQEGQRKAGAAVTTETEVIWAKALPAGTSAQRAELIALTQALKMAEGKKLNVYTDSRYAFATAHIHGEIYRRRGWLTSEGKEIKNKDEILALLKALFLPKRLSIIHCPGHQKGHSAEARGNRMADQAARKAAITETPDTSTLLAGKRTADGSEFEKRTADGSEFESPKKKAKVE

SEQ ID NO: 3062 - protein, 2093 aa, synthetic construct; identical to SEQ ID NO: 2828

SEQ ID NO: 3063 - protein, 2105 aa, synthetic construct
MPAAKRVKLDGGDKKYSIGLDIGTNSVGWAVITDEYKVPSKKFKVLGNTDRHSIKKNLIGALLFDSGETAEATRLKRTARRRYTRRKNRICYLQEIFSNEMAKVDDSFFHRLEESFLVEEDKKHERHPIFGNIVDEVAYHEKYPTIYHLRKKLVDSTDKADLRLIYLALAHMIKFRGHFLIEGDLNPDNSDVDKLFIQLVQTYNQLFEENPINASGVDAKAILSARLSKSRRLENLIAQLPGEKKNGLFGNLIALSLGLTPNFKSNFDLAEDAKLQLSKDTYDDDLDNLLAQIGDQYADLFLAAKNLSDAILLSDILRVNTEITKAPLSASMIKRYDEHHQDLTLLKALVRQQLPEKYKEIFFDQSKNGYAGYIDGGASQEEFYKFIKPILEKMDGTEELLVKLNREDLLRKQRTFDNGSIPHQIHLGELHAILRRQEDFYPFLKDNREKIEKILTFRIPYYVGPLARGNSRFAWMTRKSEETITPWNFEEVVDKGASAQSFIERMTNFDKNLPNEKVLPKHSLLYEYFTVYNELTKVKYVTEGMRKPAFLSGEQKKAIVDLLFKTNRKVTVKQLKEDYFKKIECFDSVEISGVEDRFNASLGTYHDLLKIIKDKDFLDNEENEDILEDIVLTLTLFEDREMIEERLKTYAHLFDDKVMKQLKRRRYTGWGRLSRKLINGIRDKQSGKTILDFLKSDGFANRNFMQLIHDDSLTFKEDIQKAQVSGQGDSLHEHIANLAGSPAIKKGILQTVKVVDELVKVMGRHKPENIVIEMARENQTTQKGQKNSRERMKRIEEGIKELGSQILKEHPVENTQLQNEKLYLYYLQNGRDMYVDQELDINRLSDYDVDHIVPQSFLKDDSIDNKVLTRSDKARGKSDNVPSEEVVKKMKNYWRQLLNAKLITQRKFDNLTKAERGGLSELDKAGFIKRQLVETRQITKHVAQILDSRMNTKYDENDKLIREVKVITLKSKLVSDFRKDFQFYKVREINNYHHAHDAYLNAVVGTALIKKYPKLESEFVYGDYKVYDVRKMIAKSEQEIGKATAKYFFYSNIMNFFKTEITLANGEIRKRPLIETNGETGEIVWDKGRDFATVRKVLSMPQVNIVKKTEVQTGGFSKESILPKRNSDKLIARKKDWDPKKYGGFDSPTVAYSVLVVAKVEKGKSKKLKSVKELLGITIMERSSFEKNPIDFLEAKGYKEVKKDLIIKLPKYSLFELENGRKRMLASAGELQKGNELALPSKYVNFLYLASHYEKLKGSPEDNEQKQLFVEQHKHYLDEIIEQISEFSKRVILADANLDKVLSAYNKHRDKPIREQAENIIHLFTLTNLGAPAAFKYFDTTIDRKRYTSTKEVLDATLIHQSITGLYETRIDLSQLGGDGGGGGGSGGGGSGGGGSGGGGSGGTLNIEDEHRLHETSKEPDVSLGSTWLSDFPQAWAETGGMGLAVRQAPLIIPLKATSTPVSIKQYPMSQEARLGIKPHIQRLLDQGILVPCQSPWNTPLLPVKKPGTNDYRPVQDLREVNKRVEDIHPTVPNPYNLLSGLPPSHQWYTVLDLKDAFFCLRLHPTSQPLFAFEWRDPEMGISGQLTWTRLPQGFKNSPTLFNEALHRDLADFRIQHPDLILLQYVDDLLLAATSELDCQQGTRALLQTLGNLGYRASAKKAQICQKQVKYLGYLLKEGQRWLTEARKETVMGQPTPKTPRQLREFLGKAGFCRLFIPGFAEMAAPLYPLTKPGTLFNWGPDQQKAYQEIKQALLTAPALGLPDLTKPFELFVDEKQGYAKGVLTQKLGPWRRPVAYLSKKLDPVAAGWPPCLRMVAAIAVLTKDAGKLTMGQPLVILAPHAVEALVKQPPDRWLSNARMTHYQALLLDTDRVQFGPVVALNPATLLPLPEEGLQHNCLDILAEAHGTRPDLTDQPLPDADHTWYTDGSSLLQEGQRKAGAAVTTETEVIWAKALPAGTSAQRAELIALTQALKMAEGKKLNVYTDSRYAFATAHIHGEIYRRRGWLTSEGKEIKNKDEILALLKALFLPKRLSIIHCPGHQKGHSAEARGNRMADQAARKAAITETPDTSTLLAGKRTADGSEFEKRTADGSEFESPKKKAKVE

SEQ ID NO: 3064 - protein, 2094 aa, synthetic construct
MPAAKRVKLDGGDKKYSIGLDIGTNSVGWAVITDEYKVPSKKFKVLGNTDRHSIKKNLIGALLFDSGETAEATRLKRTARRRYTRRKNRICYLQEIFSNEMAKVDDSFFHRLEESFLVEEDKKHERHPIFGNIVDEVAYHEKYPTIYHLRKKLVDSTDKADLRLIYLALAHMIKFRGHFLIEGDLNPDNSDVDKLFIQLVQTYNQLFEENPINASGVDAKAILSARLSKSRRLENLIAQLPGEKKNGLFGNLIALSLGLTPNFKSNFDLAEDAKLQLSKDTYDDDLDNLLAQIGDQYADLFLAAKNLSDAILLSDILRVNTEITKAPLSASMIKRYDEHHQDLTLLKALVRQQLPEKYKEIFFDQSKNGYAGYIDGGASQEEFYKFIKPILEKMDGTEELLVKLNREDLLRKQRTFDNGSIPHQIHLGELHAILRRQEDFYPFLKDNREKIEKILTFRIPYYVGPLARGNSRFAWMTRKSEETITPWNFEEVVDKGASAQSFIERMTNFDKNLPNEKVLPKHSLLYEYFTVYNELTKVKYVTEGMRKPAFLSGEQKKAIVDLLFKTNRKVTVKQLKEDYFKKIECFDSVEISGVEDRFNASLGTYHDLLKIIKDKDFLDNEENEDILEDIVLTLTLFEDREMIEERLKTYAHLFDDKVMKQLKRRRYTGWGRLSRKLINGIRDKQSGKTILDFLKSDGFANRNFMQLIHDDSLTFKEDIQKAQVSGQGDSLHEHIANLAGSPAIKKGILQTVKVVDELVKVMGRHKPENIVIEMARENQTTQKGQKNSRERMKRIEEGIKELGSQILKEHPVENTQLQNEKLYLYYLQNGRDMYVDQELDINRLSDYDVDHIVPQSFLKDDSIDNKVLTRSDKARGKSDNVPSEEVVKKMKNYWRQLLNAKLITQRKFDNLTKAERGGLSELDKAGFIKRQLVETRQITKHVAQILDSRMNTKYDENDKLIREVKVITLKSKLVSDFRKDFQFYKVREINNYHHAHDAYLNAVVGTALIKKYPKLESEFVYGDYKVYDVRKMIAKSEQEIGKATAKYFFYSNIMNFFKTEITLANGEIRKRPLIETNGETGEIVWDKGRDFATVRKVLSMPQVNIVKKTEVQTGGFSKESILPKRNSDKLIARKKDWDPKKYGGFDSPTVAYSVLVVAKVEKGKSKKLKSVKELLGITIMERSSFEKNPIDFLEAKGYKEVKKDLIIKLPKYSLFELENGRKRMLASAGELQKGNELALPSKYVNFLYLASHYEKLKGSPEDNEQKQLFVEQHKHYLDEIIEQISEFSKRVILADANLDKVLSAYNKHRDKPIREQAENIIHLFTLTNLGAPAAFKYFDTTIDRKRYTSTKEVLDATLIHQSITGLYETRIDLSQLGGDGGPAPGGSGSSGGTLNIEDEHRLHETSKEPDVSLGSTWLSDFPQAWAETGGMGLAVRQAPLIIPLKATSTPVSIKQYPMSQEARLGIKPHIQRLLDQGILVPCQSPWNTPLLPVKKPGTNDYRPVQDLREVNKRVEDIHPTVPNPYNLLSGLPPSHQWYTVLDLKDAFFCLRLHPTSQPLFAFEWRDPEMGISGQLTWTRLPQGFKNSPTLFNEALHRDLADFRIQHPDLILLQYVDDLLLAATSELDCQQGTRALLQTLGNLGYRASAKKAQICQKQVKYLGYLLKEGQRWLTEARKETVMGQPTPKTPRQLREFLGKAGFCRLFIPGFAEMAAPLYPLTKPGTLFNWGPDQQKAYQEIKQALLTAPALGLPDLTKPFELFVDEKQGYAKGVLTQKLGPWRRPVAYLSKKLDPVAAGWPPCLRMVAAIAVLTKDAGKLTMGQPLVILAPHAVEALVKQPPDRWLSNARMTHYQALLLDTDRVQFGPVVALNPATLLPLPEEGLQHNCLDILAEAHGTRPDLTDQPLPDADHTWYTDGSSLLQEGQRKAGAAVTTETEVIWAKALPAGTSAQRAELIALTQALKMAEGKKLNVYTDSRYAFATAHIHGEIYRRRGWLTSEGKEIKNKDEILALLKALFLPKRLSIIHCPGHQKGHSAEARGNRMADQAARKAAITETPDTSTLLAGKRTADGSEFEKRTADGSEFESPKKKAKVE

SEQ ID NO: 3065 - protein, 2090 aa, synthetic construct; identical to SEQ ID NO: 2825

SEQ ID NO: 3066 - protein, 2090 aa, synthetic construct
MPAAKRVKLDGGDKKYSIGLDIGTNSVGWAVITDEYKVPSKKFKVLGNTDRHSIKKNLIGALLFDSGETAEATRLKRTARRRYTRRKNRICYLQEIFSNEMAKVDDSFFHRLEESFLVEEDKKHERHPIFGNIVDEVAYHEKYPTIYHLRKKLVDSTDKADLRLIYLALAHMIKFRGHFLIEGDLNPDNSDVDKLFIQLVQTYNQLFEENPINASGVDAKAILSARLSKSRRLENLIAQLPGEKKNGLFGNLIALSLGLTPNFKSNFDLAEDAKLQLSKDTYDDDLDNLLAQIGDQYADLFLAAKNLSDAILLSDILRVNTEITKAPLSASMIKRYDEHHQDLTLLKALVRQQLPEKYKEIFFDQSKNGYAGYIDGGASQEEFYKFIKPILEKMDGTEELLVKLNREDLLRKQRTFDNGSIPHQIHLGELHAILRRQEDFYPFLKDNREKIEKILTFRIPYYVGPLARGNSRFAWMTRKSEETITPWNFEEVVDKGASAQSFIERMTNFDKNLPNEKVLPKHSLLYEYFTVYNELTKVKYVTEGMRKPAFLSGEQKKAIVDLLFKTNRKVTVKQLKEDYFKKIECFDSVEISGVEDRFNASLGTYHDLLKIIKDKDFLDNEENEDILEDIVLTLTLFEDREMIEERLKTYAHLFDDKVMKQLKRRRYTGWGRLSRKLINGIRDKQSGKTILDFLKSDGFANRNFMQLIHDDSLTFKEDIQKAQVSGQGDSLHEHIANLAGSPAIKKGILQTVKVVDELVKVMGRHKPENIVIEMARENQTTQKGQKNSRERMKRIEEGIKELGSQILKEHPVENTQLQNEKLYLYYLQNGRDMYVDQELDINRLSDYDVDHIVPQSFLKDDSIDNKVLTRSDKARGKSDNVPSEEVVKKMKNYWRQLLNAKLITQRKFDNLTKAERGGLSELDKAGFIKRQLVETRQITKHVAQILDSRMNTKYDENDKLIREVKVITLKSKLVSDFRKDFQFYKVREINNYHHAHDAYLNAVVGTALIKKYPKLESEFVYGDYKVYDVRKMIAKSEQEIGKATAKYFFYSNIMNFFKTEITLANGEIRKRPLIETNGETGEIVWDKGRDFATVRKVLSMPQVNIVKKTEVQTGGFSKESILPKRNSDKLIARKKDWDPKKYGGFDSPTVAYSVLVVAKVEKGKSKKLKSVKELLGITIMERSSFEKNPIDFLEAKGYKEVKKDLIIKLPKYSLFELENGRKRMLASAGELQKGNELALPSKYVNFLYLASHYEKLKGSPEDNEQKQLFVEQHKHYLDEIIEQISEFSKRVILADANLDKVLSAYNKHRDKPIREQAENIIHLFTLTNLGAPAAFKYFDTTIDRKRYTSTKEVLDATLIHQSITGLYETRIDLSQLGGDGGPAPAPGGTLNIEDEHRLHETSKEPDVSLGSTWLSDFPQAWAETGGMGLAVRQAPLIIPLKATSTPVSIKQYPMSQEARLGIKPHIQRLLDQGILVPCQSPWNTPLLPVKKPGTNDYRPVQDLREVNKRVEDIHPTVPNPYNLLSGLPPSHQWYTVLDLKDAFFCLRLHPTSQPLFAFEWRDPEMGISGQLTWTRLPQGFKNSPTLFNEALHRDLADFRIQHPDLILLQYVDDLLLAATSELDCQQGTRALLQTLGNLGYRASAKKAQICQKQVKYLGYLLKEGQRWLTEARKETVMGQPTPKTPRQLREFLGKAGFCRLFIPGFAEMAAPLYPLTKPGTLFNWGPDQQKAYQEIKQALLTAPALGLPDLTKPFELFVDEKQGYAKGVLTQKLGPWRRPVAYLSKKLDPVAAGWPPCLRMVAAIAVLTKDAGKLTMGQPLVILAPHAVEALVKQPPDRWLSNARMTHYQALLLDTDRVQFGPVVALNPATLLPLPEEGLQHNCLDILAEAHGTRPDLTDQPLPDADHTWYTDGSSLLQEGQRKAGAAVTTETEVIWAKALPAGTSAQRAELIALTQALKMAEGKKLNVYTDSRYAFATAHIHGEIYRRRGWLTSEGKEIKNKDEILALLKALFLPKRLSIIHCPGHQKGHSAEARGNRMADQAARKAAITETPDTSTLLAGKRTADGSEFEKRTADGSEFESPKKKAKVE

SEQ ID NO: 3067 - protein, 2096 aa, synthetic construct; identical to SEQ ID NO: 2787

SEQ ID NO: 3068 - protein, 2096 aa, synthetic construct
MPAAKRVKLDGGDKKYSIGLDIGTNSVGWAVITDEYKVPSKKFKVLGNTDRHSIKKNLIGALLFDSGETAEATRLKRTARRRYTRRKNRICYLQEIFSNEMAKVDDSFFHRLEESFLVEEDKKHERHPIFGNIVDEVAYHEKYPTIYHLRKKLVDSTDKADLRLIYLALAHMIKFRGHFLIEGDLNPDNSDVDKLFIQLVQTYNQLFEENPINASGVDAKAILSARLSKSRRLENLIAQLPGEKKNGLFGNLIALSLGLTPNFKSNFDLAEDAKLQLSKDTYDDDLDNLLAQIGDQYADLFLAAKNLSDAILLSDILRVNTEITKAPLSASMIKRYDEHHQDLTLLKALVRQQLPEKYKEIFFDQSKNGYAGYIDGGASQEEFYKFIKPILEKMDGTEELLVKLNREDLLRKQRTFDNGSIPHQIHLGELHAILRRQEDFYPFLKDNREKIEKILTFRIPYYVGPLARGNSRFAWMTRKSEETITPWNFEEVVDKGASAQSFIERMTNFDKNLPNEKVLPKHSLLYEYFTVYNELTKVKYVTEGMRKPAFLSGEQKKAIVDLLFKTNRKVTVKQLKEDYFKKIECFDSVEISGVEDRFNASLGTYHDLLKIIKDKDFLDNEENEDILEDIVLTLTLFEDREMIEERLKTYAHLFDDKVMKQLKRRRYTGWGRLSRKLINGIRDKQSGKTILDFLKSDGFANRNFMQLIHDDSLTFKEDIQKAQVSGQGDSLHEHIANLAGSPAIKKGILQTVKVVDELVKVMGRHKPENIVIEMARENQTTQKGQKNSRERMKRIEEGIKELGSQILKEHPVENTQLQNEKLYLYYLQNGRDMYVDQELDINRLSDYDVDHIVPQSFLKDDSIDNKVLTRSDKARGKSDNVPSEEVVKKMKNYWRQLLNAKLITQRKFDNLTKAERGGLSELDKAGFIKRQLVETRQITKHVAQILDSRMNTKYDENDKLIREVKVITLKSKLVSDFRKDFQFYKVREINNYHHAHDAYLNAVVGTALIKKYPKLESEFVYGDYKVYDVRKMIAKSEQEIGKATAKYFFYSNIMNFFKTEITLANGEIRKRPLIETNGETGEIVWDKGRDFATVRKVLSMPQVNIVKKTEVQTGGFSKESILPKRNSDKLIARKKDWDPKKYGGFDSPTVAYSVLVVAKVEKGKSKKLKSVKELLGITIMERSSFEKNPIDFLEAKGYKEVKKDLIIKLPKYSLFELENGRKRMLASAGELQKGNELALPSKYVNFLYLASHYEKLKGSPEDNEQKQLFVEQHKHYLDEIIEQISEFSKRVILADANLDKVLSAYNKHRDKPIREQAENIIHLFTLTNLGAPAAFKYFDTTIDRKRYTSTKEVLDATLIHQSITGLYETRIDLSQLGGDGGPAPEAAAKGGGGGTLNIEDEHRLHETSKEPDVSLGSTWLSDFPQAWAETGGMGLAVRQAPLIIPLKATSTPVSIKQYPMSQEARLGIKPHIQRLLDQGILVPCQSPWNTPLLPVKKPGTNDYRPVQDLREVNKRVEDIHPTVPNPYNLLSGLPPSHQWYTVLDLKDAFFCLRLHPTSQPLFAFEWRDPEMGISGQLTWTRLPQGFKNSPTLFNEALHRDLADFRIQHPDLILLQYVDDLLLAATSELDCQQGTRALLQTLGNLGYRASAKKAQICQKQVKYLGYLLKEGQRWLTEARKETVMGQPTPKTPRQLREFLGKAGFCRLFIPGFAEMAAPLYPLTKPGTLFNWGPDQQKAYQEIKQALLTAPALGLPDLTKPFELFVDEKQGYAKGVLTQKLGPWRRPVAYLSKKLDPVAAGWPPCLRMVAAIAVLTKDAGKLTMGQPLVILAPHAVEALVKQPPDRWLSNARMTHYQALLLDTDRVQFGPVVALNPATLLPLPEEGLQHNCLDILAEAHGTRPDLTDQPLPDADHTWYTDGSSLLQEGQRKAGAAVTTETEVIWAKALPAGTSAQRAELIALTQALKMAEGKKLNVYTDSRYAFATAHIHGEIYRRRGWLTSEGKEIKNKDEILALLKALFLPKRLSIIHCPGHQKGHSAEARGNRMADQAARKAAITETPDTSTLLAGKRTADGSEFEKRTADGSEFESPKKKAKVE

SEQ ID NO: 3069 - protein, 2088 aa, synthetic construct
MPAAKRVKLDGGDKKYSIGLDIGTNSVGWAVITDEYKVPSKKFKVLGNTDRHSIKKNLIGALLFDSGETAEATRLKRTARRRYTRRKNRICYLQEIFSNEMAKVDDSFFHRLEESFLVEEDKKHERHPIFGNIVDEVAYHEKYPTIYHLRKKLVDSTDKADLRLIYLALAHMIKFRGHFLIEGDLNPDNSDVDKLFIQLVQTYNQLFEENPINASGVDAKAILSARLSKSRRLENLIAQLPGEKKNGLFGNLIALSLGLTPNFKSNFDLAEDAKLQLSKDTYDDDLDNLLAQIGDQYADLFLAAKNLSDAILLSDILRVNTEITKAPLSASMIKRYDEHHQDLTLLKALVRQQLPEKYKEIFFDQSKNGYAGYIDGGASQEEFYKFIKPILEKMDGTEELLVKLNREDLLRKQRTFDNGSIPHQIHLGELHAILRRQEDFYPFLKDNREKIEKILTFRIPYYVGPLARGNSRFAWMTRKSEETITPWNFEEVVDKGASAQSFIERMTNFDKNLPNEKVLPKHSLLYEYFTVYNELTKVKYVTEGMRKPAFLSGEQKKAIVDLLFKTNRKVTVKQLKEDYFKKIECFDSVEISGVEDRFNASLGTYHDLLKIIKDKDFLDNEENEDILEDIVLTLTLFEDREMIEERLKTYAHLFDDKVMKQLKRRRYTGWGRLSRKLINGIRDKQSGKTILDFLKSDGFANRNFMQLIHDDSLTFKEDIQKAQVSGQGDSLHEHIANLAGSPAIKKGILQTVKVVDELVKVMGRHKPENIVIEMARENQTTQKGQKNSRERMKRIEEGIKELGSQILKEHPVENTQLQNEKLYLYYLQNGRDMYVDQELDINRLSDYDVDHIVPQSFLKDDSIDNKVLTRSDKARGKSDNVPSEEVVKKMKNYWRQLLNAKLITQRKFDNLTKAERGGLSELDKAGFIKRQLVETRQITKHVAQILDSRMNTKYDENDKLIREVKVITLKSKLVSDFRKDFQFYKVREINNYHHAHDAYLNAVVGTALIKKYPKLESEFVYGDYKVYDVRKMIAKSEQEIGKATAKYFFYSNIMNFFKTEITLANGEIRKRPLIETNGETGEIVWDKGRDFATVRKVLSMPQVNIVKKTEVQTGGFSKESILPKRNSDKLIARKKDWDPKKYGGFDSPTVAYSVLVVAKVEKGKSKKLKSVKELLGITIMERSSFEKNPIDFLEAKGYKEVKKDLIIKLPKYSLFELENGRKRMLASAGELQKGNELALPSKYVNFLYLASHYEKLKGSPEDNEQKQLFVEQHKHYLDEIIEQISEFSKRVILADANLDKVLSAYNKHRDKPIREQAENIIHLFTLTNLGAPAAFKYFDTTIDRKRYTSTKEVLDATLIHQSITGLYETRIDLSQLGGDGGGSSGGTLNIEDEHRLHETSKEPDVSLGSTWLSDFPQAWAETGGMGLAVRQAPLIIPLKATSTPVSIKQYPMSQEARLGIKPHIQRLLDQGILVPCQSPWNTPLLPVKKPGTNDYRPVQDLREVNKRVEDIHPTVPNPYNLLSGLPPSHQWYTVLDLKDAFFCLRLHPTSQPLFAFEWRDPEMGISGQLTWTRLPQGFKNSPTLFNEALHRDLADFRIQHPDLILLQYVDDLLLAATSELDCQQGTRALLQTLGNLGYRASAKKAQICQKQVKYLGYLLKEGQRWLTEARKETVMGQPTPKTPRQLREFLGKAGFCRLFIPGFAEMAAPLYPLTKPGTLFNWGPDQQKAYQEIKQALLTAPALGLPDLTKPFELFVDEKQGYAKGVLTQKLGPWRRPVAYLSKKLDPVAAGWPPCLRMVAAIAVLTKDAGKLTMGQPLVILAPHAVEALVKQPPDRWLSNARMTHYQALLLDTDRVQFGPVVALNPATLLPLPEEGLQHNCLDILAEAHGTRPDLTDQPLPDADHTWYTDGSSLLQEGQRKAGAAVTTETEVIWAKALPAGTSAQRAELIALTQALKMAEGKKLNVYTDSRYAFATAHIHGEIYRRRGWLTSEGKEIKNKDEILALLKALFLPKRLSIIHCPGHQKGHSAEARGNRMADQAARKAAITETPDTSTLLAGKRTADGSEFEKRTADGSEFESPKKKAKVE

SEQ ID NO: 3070 - protein, 2094 aa, synthetic construct; identical to SEQ ID NO: 2809

SEQ ID NO: 3071 - protein, 2097 aa, synthetic construct; identical to SEQ ID NO: 2806

SEQ ID NO: 3072 - protein, 2096 aa, synthetic construct
MPAAKRVKLDGGDKKYSIGLDIGTNSVGWAVITDEYKVPSKKFKVLGNTDRHSIKKNLIGALLFDSGETAEATRLKRTARRRYTRRKNRICYLQEIFSNEMAKVDDSFFHRLEESFLVEEDKKHERHPIFGNIVDEVAYHEKYPTIYHLRKKLVDSTDKADLRLIYLALAHMIKFRGHFLIEGDLNPDNSDVDKLFIQLVQTYNQLFEENPINASGVDAKAILSARLSKSRRLENLIAQLPGEKKNGLFGNLIALSLGLTPNFKSNFDLAEDAKLQLSKDTYDDDLDNLLAQIGDQYADLFLAAKNLSDAILLSDILRVNTEITKAPLSASMIKRYDEHHQDLTLLKALVRQQLPEKYKEIFFDQSKNGYAGYIDGGASQEEFYKFIKPILEKMDGTEELLVKLNREDLLRKQRTFDNGSIPHQIHLGELHAILRRQEDFYPFLKDNREKIEKILTFRIPYYVGPLARGNSRFAWMTRKSEETITPWNFEEVVDKGASAQSFIERMTNFDKNLPNEKVLPKHSLLYEYFTVYNELTKVKYVTEGMRKPAFLSGEQKKAIVDLLFKTNRKVTVKQLKEDYFKKIECFDSVEISGVEDRFNASLGTYHDLLKIIKDKDFLDNEENEDILEDIVLTLTLFEDREMIEERLKTYAHLFDDKVMKQLKRRRYTGWGRLSRKLINGIRDKQSGKTILDFLKSDGFANRNFMQLIHDDSLTFKEDIQKAQVSGQGDSLHEHIANLAGSPAIKKGILQTVKVVDELVKVMGRHKPENIVIEMARENQTTQKGQKNSRERMKRIEEGIKELGSQILKEHPVENTQLQNEKLYLYYLQNGRDMYVDQELDINRLSDYDVDHIVPQSFLKDDSIDNKVLTRSDKARGKSDNVPSEEVVKKMKNYWRQLLNAKLITQRKFDNLTKAERGGLSELDKAGFIKRQLVETRQITKHVAQILDSRMNTKYDENDKLIREVKVITLKSKLVSDFRKDFQFYKVREINNYHHAHDAYLNAVVGTALIKKYPKLESEFVYGDYKVYDVRKMIAKSEQEIGKATAKYFFYSNIMNFFKTEITLANGEIRKRPLIETNGETGEIVWDKGRDFATVRKVLSMPQVNIVKKTEVQTGGFSKESILPKRNSDKLIARKKDWDPKKYGGFDSPTVAYSVLVVAKVEKGKSKKLKSVKELLGITIMERSSFEKNPIDFLEAKGYKEVKKDLIIKLPKYSLFELENGRKRMLASAGELQKGNELALPSKYVNFLYLASHYEKLKGSPEDNEQKQLFVEQHKHYLDEIIEQISEFSKRVILADANLDKVLSAYNKHRDKPIREQAENIIHLFTLTNLGAPAAFKYFDTTIDRKRYTSTKEVLDATLIHQSITGLYETRIDLSQLGGDGGGSSEAAAKGGGGGTLNIEDEHRLHETSKEPDVSLGSTWLSDFPQAWAETGGMGLAVRQAPLIIPLKATSTPVSIKQYPMSQEARLGIKPHIQRLLDQGILVPCQSPWNTPLLPVKKPGTNDYRPVQDLREVNKRVEDIHPTVPNPYNLLSGLPPSHQWYTVLDLKDAFFCLRLHPTSQPLFAFEWRDPEMGISGQLTWTRLPQGFKNSPTLFNEALHRDLADFRIQHPDLILLQYVDDLLLAATSELDCQQGTRALLQTLGNLGYRASAKKAQICQKQVKYLGYLLKEGQRWLTEARKETVMGQPTPKTPRQLREFLGKAGFCRLFIPGFAEMAAPLYPLTKPGTLFNWGPDQQKAYQEIKQALLTAPALGLPDLTKPFELFVDEKQGYAKGVLTQKLGPWRRPVAYLSKKLDPVAAGWPPCLRMVAAIAVLTKDAGKLTMGQPLVILAPHAVEALVKQPPDRWLSNARMTHYQALLLDTDRVQFGPVVALNPATLLPLPEEGLQHNCLDILAEAHGTRPDLTDQPLPDADHTWYTDGSSLLQEGQRKAGAAVTTETEVIWAKALPAGTSAQRAELIALTQALKMAEGKKLNVYTDSRYAFATAHIHGEIYRRRGWLTSEGKEIKNKDEILALLKALFLPKRLSIIHCPGHQKGHSAEARGNRMADQAARKAAITETPDTSTLLAGKRTADGSEFEKRTADGSEFESPKKKAKVE

SEQ ID NO: 3073 - protein, 2091 aa, synthetic construct
MPAAKRVKLDGGDKKYSIGLDIGTNSVGWAVITDEYKVPSKKFKVLGNTDRHSIKKNLIGALLFDSGETAEATRLKRTARRRYTRRKNRICYLQEIFSNEMAKVDDSFFHRLEESFLVEEDKKHERHPIFGNIVDEVAYHEKYPTIYHLRKKLVDSTDKADLRLIYLALAHMIKFRGHFLIEGDLNPDNSDVDKLFIQLVQTYNQLFEENPINASGVDAKAILSARLSKSRRLENLIAQLPGEKKNGLFGNLIALSLGLTPNFKSNFDLAEDAKLQLSKDTYDDDLDNLLAQIGDQYADLFLAAKNLSDAILLSDILRVNTEITKAPLSASMIKRYDEHHQDLTLLKALVRQQLPEKYKEIFFDQSKNGYAGYIDGGASQEEFYKFIKPILEKMDGTEELLVKLNREDLLRKQRTFDNGSIPHQIHLGELHAILRRQEDFYPFLKDNREKIEKILTFRIPYYVGPLARGNSRFAWMTRKSEETITPWNFEEVVDKGASAQSFIERMTNFDKNLPNEKVLPKHSLLYEYFTVYNELTKVKYVTEGMRKPAFLSGEQKKAIVDLLFKTNRKVTVKQLKEDYFKKIECFDSVEISGVEDRFNASLGTYHDLLKIIKDKDFLDNEENEDILEDIVLTLTLFEDREMIEERLKTYAHLFDDKVMKQLKRRRYTGWGRLSRKLINGIRDKQSGKTILDFLKSDGFANRNFMQLIHDDSLTFKEDIQKAQVSGQGDSLHEHIANLAGSPAIKKGILQTVKVVDELVKVMGRHKPENIVIEMARENQTTQKGQKNSRERMKRIEEGIKELGSQILKEHPVENTQLQNEKLYLYYLQNGRDMYVDQELDINRLSDYDVDHIVPQSFLKDDSIDNKVLTRSDKARGKSDNVPSEEVVKKMKNYWRQLLNAKLITQRKFDNLTKAERGGLSELDKAGFIKRQLVETRQITKHVAQILDSRMNTKYDENDKLIREVKVITLKSKLVSDFRKDFQFYKVREINNYHHAHDAYLNAVVGTALIKKYPKLESEFVYGDYKVYDVRKMIAKSEQEIGKATAKYFFYSNIMNFFKTEITLANGEIRKRPLIETNGETGEIVWDKGRDFATVRKVLSMPQVNIVKKTEVQTGGFSKESILPKRNSDKLIARKKDWDPKKYGGFDSPTVAYSVLVVAKVEKGKSKKLKSVKELLGITIMERSSFEKNPIDFLEAKGYKEVKKDLIIKLPKYSLFELENGRKRMLASAGELQKGNELALPSKYVNFLYLASHYEKLKGSPEDNEQKQLFVEQHKHYLDEIIEQISEFSKRVILADANLDKVLSAYNKHRDKPIREQAENIIHLFTLTNLGAPAAFKYFDTTIDRKRYTSTKEVLDATLIHQSITGLYETRIDLSQLGGDGGGGGPAPGGTLNIEDEHRLHETSKEPDVSLGSTWLSDFPQAWAETGGMGLAVRQAPLIIPLKATSTPVSIKQYPMSQEARLGIKPHIQRLLDQGILVPCQSPWNTPLLPVKKPGTNDYRPVQDLREVNKRVEDIHPTVPNPYNLLSGLPPSHQWYTVLDLKDAFFCLRLHPTSQPLFAFEWRDPEMGISGQLTWTRLPQGFKNSPTLFNEALHRDLADFRIQHPDLILLQYVDDLLLAATSELDCQQGTRALLQTLGNLGYRASAKKAQICQKQVKYLGYLLKEGQRWLTEARKETVMGQPTPKTPRQLREFLGKAGFCRLFIPGFAEMAAPLYPLTKPGTLFNWGPDQQKAYQEIKQALLTAPALGLPDLTKPFELFVDEKQGYAKGVLTQKLGPWRRPVAYLSKKLDPVAAGWPPCLRMVAAIAVLTKDAGKLTMGQPLVILAPHAVEALVKQPPDRWLSNARMTHYQALLLDTDRVQFGPVVALNPATLLPLPEEGLQHNCLDILAEAHGTRPDLTDQPLPDADHTWYTDGSSLLQEGQRKAGAAVTTETEVIWAKALPAGTSAQRAELIALTQALKMAEGKKLNVYTDSRYAFATAHIHGEIYRRRGWLTSEGKEIKNKDEILALLKALFLPKRLSIIHCPGHQKGHSAEARGNRMADQAARKAAITETPDTSTLLAGKRTADGSEFEKRTADGSEFESPKKKAKVE

SEQ ID NO: 3074 - protein, 2091 aa, synthetic construct; identical to SEQ ID NO: 2853

SEQ ID NO: 3075 - protein, 2094 aa, synthetic construct
MPAAKRVKLDGGDKKYSIGLDIGTNSVGWAVITDEYKVPSKKFKVLGNTDRHSIKKNLIGALLFDSGETAEATRLKRTARRRYTRRKNRICYLQEIFSNEMAKVDDSFFHRLEESFLVEEDKKHERHPIFGNIVDEVAYHEKYPTIYHLRKKLVDSTDKADLRLIYLALAHMIKFRGHFLIEGDLNPDNSDVDKLFIQLVQTYNQLFEENPINASGVDAKAILSARLSKSRRLENLIAQLPGEKKNGLFGNLIALSLGLTPNFKSNFDLAEDAKLQLSKDTYDDDLDNLLAQIGDQYADLFLAAKNLSDAILLSDILRVNTEITKAPLSASMIKRYDEHHQDLTLLKALVRQQLPEKYKEIFFDQSKNGYAGYIDGGASQEEFYKFIKPILEKMDGTEELLVKLNREDLLRKQRTFDNGSIPHQIHLGELHAILRRQEDFYPFLKDNREKIEKILTFRIPYYVGPLARGNSRFAWMTRKSEETITPWNFEEVVDKGASAQSFIERMTNFDKNLPNEKVLPKHSLLYEYFTVYNELTKVKYVTEGMRKPAFLSGEQKKAIVDLLFKTNRKVTVKQLKEDYFKKIECFDSVEISGVEDRFNASLGTYHDLLKIIKDKDFLDNEENEDILEDIVLTLTLFEDREMIEERLKTYAHLFDDKVMKQLKRRRYTGWGRLSRKLINGIRDKQSGKTILDFLKSDGFANRNFMQLIHDDSLTFKEDIQKAQVSGQGDSLHEHIANLAGSPAIKKGILQTVKVVDELVKVMGRHKPENIVIEMARENQTTQKGQKNSRERMKRIEEGIKELGSQILKEHPVENTQLQNEKLYLYYLQNGRDMYVDQELDINRLSDYDVDHIVPQSFLKDDSIDNKVLTRSDKARGKSDNVPSEEVVKKMKNYWRQLLNAKLITQRKFDNLTKAERGGLSELDKAGFIKRQLVETRQITKHVAQILDSRMNTKYDENDKLIREVKVITLKSKLVSDFRKDFQFYKVREINNYHHAHDAYLNAVVGTALIKKYPKLESEFVYGDYKVYDVRKMIAKSEQEIGKATAKYFFYSNIMNFFKTEITLANGEIRKRPLIETNGETGEIVWDKGRDFATVRKVLSMPQVNIVKKTEVQTGGFSKESILPKRNSDKLIARKKDWDPKKYGGFDSPTVAYSVLVVAKVEKGKSKKLKSVKELLGITIMERSSFEKNPIDFLEAKGYKEVKKDLIIKLPKYSLFELENGRKRMLASAGELQKGNELALPSKYVNFLYLASHYEKLKGSPEDNEQKQLFVEQHKHYLDEIIEQISEFSKRVILADANLDKVLSAYNKHRDKPIREQAENIIHLFTLTNLGAPAAFKYFDTTIDRKRYTSTKEVLDATLIHQSITGLYETRIDLSQLGGDGGGSSGGSPAPGGTLNIEDEHRLHETSKEPDVSLGSTWLSDFPQAWAETGGMGLAVRQAPLIIPLKATSTPVSIKQYPMSQEARLGIKPHIQRLLDQGILVPCQSPWNTPLLPVKKPGTNDYRPVQDLREVNKRVEDIHPTVPNPYNLLSGLPPSHQWYTVLDLKDAFFCLRLHPTSQPLFAFEWRDPEMGISGQLTWTRLPQGFKNSPTLFNEALHRDLADFRIQHPDLILLQYVDDLLLAATSELDCQQGTRALLQTLGNLGYRASAKKAQICQKQVKYLGYLLKEGQRWLTEARKETVMGQPTPKTPRQLREFLGKAGFCRLFIPGFAEMAAPLYPLTKPGTLFNWGPDQQKAYQEIKQALLTAPALGLPDLTKPFELFVDEKQGYAKGVLTQKLGPWRRPVAYLSKKLDPVAAGWPPCLRMVAAIAVLTKDAGKLTMGQPLVILAPHAVEALVKQPPDRWLSNARMTHYQALLLDTDRVQFGPVVALNPATLLPLPEEGLQHNCLDILAEAHGTRPDLTDQPLPDADHTWYTDGSSLLQEGQRKAGAAVTTETEVIWAKALPAGTSAQRAELIALTQALKMAEGKKLNVYTDSRYAFATAHIHGEIYRRRGWLTSEGKEIKNKDEILALLKALFLPKRLSIIHCPGHQKGHSAEARGNRMADQAARKAAITETPDTSTLLAGKRTADGSEFEKRTADGSEFESPKKKAKVE

SEQ ID NO: 3076 - protein, 2091 aa, synthetic construct; identical to SEQ ID NO: 2780

SEQ ID NO: 3077 - protein, 2101 aa, synthetic construct; identical to SEQ ID NO: 2858

SEQ ID NO: 3078 - protein, 2093 aa, synthetic construct; identical to SEQ ID NO: 2821

SEQ ID NO: 3079 - protein, 2100 aa, synthetic construct; identical to SEQ ID NO: 2788

SEQ ID NO: 3080 - protein, 2096 aa, synthetic construct
MPAAKRVKLDGGDKKYSIGLDIGTNSVGWAVITDEYKVPSKKFKVLGNTDRHSIKKNLIGALLFDSGETAEATRLKRTARRRYTRRKNRICYLQEIFSNEMAKVDDSFFHRLEESFLVEEDKKHERHPIFGNIVDEVAYHEKYPTIYHLRKKLVDSTDKADLRLIYLALAHMIKFRGHFLIEGDLNPDNSDVDKLFIQLVQTYNQLFEENPINASGVDAKAILSARLSKSRRLENLIAQLPGEKKNGLFGNLIALSLGLTPNFKSNFDLAEDAKLQLSKDTYDDDLDNLLAQIGDQYADLFLAAKNLSDAILLSDILRVNTEITKAPLSASMIKRYDEHHQDLTLLKALVRQQLPEKYKEIFFDQSKNGYAGYIDGGASQEEFYKFIKPILEKMDGTEELLVKLNREDLLRKQRTFDNGSIPHQIHLGELHAILRRQEDFYPFLKDNREKIEKILTFRIPYYVGPLARGNSRFAWMTRKSEETITPWNFEEVVDKGASAQSFIERMTNFDKNLPNEKVLPKHSLLYEYFTVYNELTKVKYVTEGMRKPAFLSGEQKKAIVDLLFKTNRKVTVKQLKEDYFKKIECFDSVEISGVEDRFNASLGTYHDLLKIIKDKDFLDNEENEDILEDIVLTLTLFEDREMIEERLKTYAHLFDDKVMKQLKRRRYTGWGRLSRKLINGIRDKQSGKTILDFLKSDGFANRNFMQLIHDDSLTFKEDIQKAQVSGQGDSLHEHIANLAGSPAIKKGILQTVKVVDELVKVMGRHKPENIVIEMARENQTTQKGQKNSRERMKRIEEGIKELGSQILKEHPVENTQLQNEKLYLYYLQNGRDMYVDQELDINRLSDYDVDHIVPQSFLKDDSIDNKVLTRSDKARGKSDNVPSEEVVKKMKNYWRQLLNAKLITQRKFDNLTKAERGGLSELDKAGFIKRQLVETRQITKHVAQILDSRMNTKYDENDKLIREVKVITLKSKLVSDFRKDFQFYKVREINNYHHAHDAYLNAVVGTALIKKYPKLESEFVYGDYKVYDVRKMIAKSEQEIGKATAKYFFYSNIMNFFKTEITLANGEIRKRPLIETNGETGEIVWDKGRDFATVRKVLSMPQVNIVKKTEVQTGGFSKESILPKRNSDKLIARKKDWDPKKYGGFDSPTVAYSVLVVAKVEKGKSKKLKSVKELLGITIMERSSFEKNPIDFLEAKGYKEVKKDLIIKLPKYSLFELENGRKRMLASAGELQKGNELALPSKYVNFLYLASHYEKLKGSPEDNEQKQLFVEQHKHYLDEIIEQISEFSKRVILADANLDKVLSAYNKHRDKPIREQAENIIHLFTLTNLGAPAAFKYFDTTIDRKRYTSTKEVLDATLIHQSITGLYETRIDLSQLGGDGGEAAAKPAPGGSGGTLNIEDEHRLHETSKEPDVSLGSTWLSDFPQAWAETGGMGLAVRQAPLIIPLKATSTPVSIKQYPMSQEARLGIKPHIQRLLDQGILVPCQSPWNTPLLPVKKPGTNDYRPVQDLREVNKRVEDIHPTVPNPYNLLSGLPPSHQWYTVLDLKDAFFCLRLHPTSQPLFAFEWRDPEMGISGQLTWTRLPQGFKNSPTLFNEALHRDLADFRIQHPDLILLQYVDDLLLAATSELDCQQGTRALLQTLGNLGYRASAKKAQICQKQVKYLGYLLKEGQRWLTEARKETVMGQPTPKTPRQLREFLGKAGFCRLFIPGFAEMAAPLYPLTKPGTLFNWGPDQQKAYQEIKQALLTAPALGLPDLTKPFELFVDEKQGYAKGVLTQKLGPWRRPVAYLSKKLDPVAAGWPPCLRMVAAIAVLTKDAGKLTMGQPLVILAPHAVEALVKQPPDRWLSNARMTHYQALLLDTDRVQFGPVVALNPATLLPLPEEGLQHNCLDILAEAHGTRPDLTDQPLPDADHTWYTDGSSLLQEGQRKAGAAVTTETEVIWAKALPAGTSAQRAELIALTQALKMAEGKKLNVYTDSRYAFATAHIHGEIYRRRGWLTSEGKEIKNKDEILALLKALFLPKRLSIIHCPGHQKGHSAEARGNRMADQAARKAAITETPDTSTLLAGKRTADGSEFEKRTADGSEFESPKKKAKVE

SEQ ID NO: 3081 - protein, 2115 aa, synthetic construct; identical to SEQ ID NO: 2827

SEQ ID NO: 3082 - protein, 2093 aa, synthetic construct; identical to SEQ ID NO: 2856

SEQ ID NO: 3083 - protein, 2096 aa, synthetic construct; identical to SEQ ID NO: 2786

SEQ ID NO: 3084 - protein, 2098 aa, synthetic construct; identical to SEQ ID NO: 2797

SEQ ID NO: 3085 - protein, 2096 aa, synthetic construct; identical to SEQ ID NO: 2830

SEQ ID NO: 3086 - protein, 2094 aa, synthetic construct
MPAAKRVKLDGGDKKYSIGLDIGTNSVGWAVITDEYKVPSKKFKVLGNTDRHSIKKNLIGALLFDSGETAEATRLKRTARRRYTRRKNRICYLQEIFSNEMAKVDDSFFHRLEESFLVEEDKKHERHPIFGNIVDEVAYHEKYPTIYHLRKKLVDSTDKADLRLIYLALAHMIKFRGHFLIEGDLNPDNSDVDKLFIQLVQTYNQLFEENPINASGVDAKAILSARLSKSRRLENLIAQLPGEKKNGLFGNLIALSLGLTPNFKSNFDLAEDAKLQLSKDTYDDDLDNLLAQIGDQYADLFLAAKNLSDAILLSDILRVNTEITKAPLSASMIKRYDEHHQDLTLLKALVRQQLPEKYKEIFFDQSKNGYAGYIDGGASQEEFYKFIKPILEKMDGTEELLVKLNREDLLRKQRTFDNGSIPHQIHLGELHAILRRQEDFYPFLKDNREKIEKILTFRIPYYVGPLARGNSRFAWMTRKSEETITPWNFEEVVDKGASAQSFIERMTNFDKNLPNEKVLPKHSLLYEYFTVYNELTKVKYVTEGMRKPAFLSGEQKKAIVDLLFKTNRKVTVKQLKEDYFKKIECFDSVEISGVEDRFNASLGTYHDLLKIIKDKDFLDNEENEDILEDIVLTLTLFEDREMIEERLKTYAHLFDDKVMKQLKRRRYTGWGRLSRKLINGIRDKQSGKTILDFLKSDGFANRNFMQLIHDDSLTFKEDIQKAQVSGQGDSLHEHIANLAGSPAIKKGILQTVKVVDELVKVMGRHKPENIVIEMARENQTTQKGQKNSRERMKRIEEGIKELGSQILKEHPVENTQLQNEKLYLYYLQNGRDMYVDQELDINRLSDYDVDHIVPQSFLKDDSIDNKVLTRSDKARGKSDNVPSEEVVKKMKNYWRQLLNAKLITQRKFDNLTKAERGGLSELDKAGFIKRQLVETRQITKHVAQILDSRMNTKYDENDKLIREVKVITLKSKLVSDFRKDFQFYKVREINNYHHAHDAYLNAVVGTALIKKYPKLESEFVYGDYKVYDVRKMIAKSEQEIGKATAKYFFYSNIMNFFKTEITLANGEIRKRPLIETNGETGEIVWDKGRDFATVRKVLSMPQVNIVKKTEVQTGGFSKESILPKRNSDKLIARKKDWDPKKYGGFDSPTVAYSVLVVAKVEKGKSKKLKSVKELLGITIMERSSFEKNPIDFLEAKGYKEVKKDLIIKLPKYSLFELENGRKRMLASAGELQKGNELALPSKYVNFLYLASHYEKLKGSPEDNEQKQLFVEQHKHYLDEIIEQISEFSKRVILADANLDKVLSAYNKHRDKPIREQAENIIHLFTLTNLGAPAAFKYFDTTIDRKRYTSTKEVLDATLIHQSITGLYETRIDLSQLGGDGGPAPAPAPAPGGTLNIEDEHRLHETSKEPDVSLGSTWLSDFPQAWAETGGMGLAVRQAPLIIPLKATSTPVSIKQYPMSQEARLGIKPHIQRLLDQGILVPCQSPWNTPLLPVKKPGTNDYRPVQDLREVNKRVEDIHPTVPNPYNLLSGLPPSHQWYTVLDLKDAFFCLRLHPTSQPLFAFEWRDPEMGISGQLTWTRLPQGFKNSPTLFNEALHRDLADFRIQHPDLILLQYVDDLLLAATSELDCQQGTRALLQTLGNLGYRASAKKAQICQKQVKYLGYLLKEGQRWLTEARKETVMGQPTPKTPRQLREFLGKAGFCRLFIPGFAEMAAPLYPLTKPGTLFNWGPDQQKAYQEIKQALLTAPALGLPDLTKPFELFVDEKQGYAKGVLTQKLGPWRRPVAYLSKKLDPVAAGWPPCLRMVAAIAVLTKDAGKLTMGQPLVILAPHAVEALVKQPPDRWLSNARMTHYQALLLDTDRVQFGPVVALNPATLLPLPEEGLQHNCLDILAEAHGTRPDLTDQPLPDADHTWYTDGSSLLQEGQRKAGAAVTTETEVIWAKALPAGTSAQRAELIALTQALKMAEGKKLNVYTDSRYAFATAHIHGEIYRRRGWLTSEGKEIKNKDEILALLKALFLPKRLSIIHCPGHQKGHSAEARGNRMADQAARKAAITETPDTSTLLAGKRTADGSEFEKRTADGSEFESPKKKAKVE

SEQ ID NO: 3087 - protein, 2091 aa, synthetic construct; identical to SEQ ID NO: 2808

SEQ ID NO: 3088 - protein, 2096 aa, synthetic construct; identical to SEQ ID NO: 2857

SEQ ID NO: 3089 - protein, 2091 aa, synthetic construct; identical to SEQ ID NO: 2855

SEQ ID NO: 3090 - protein, 2094 aa, synthetic construct; identical to SEQ ID NO: 2847

SEQ ID NO: 3091 - protein, 2096 aa, synthetic construct; identical to SEQ ID NO: 2798

SEQ ID NO: 3092 - protein, 2100 aa, synthetic construct; identical to SEQ ID NO: 2819

SEQ ID NO: 3093 - protein, 2094 aa, synthetic construct; identical to SEQ ID NO: 2835

SEQ ID NO: 3094 - protein, 2089 aa, synthetic construct
MPAAKRVKLDGGDKKYSIGLDIGTNSVGWAVITDEYKVPSKKFKVLGNTDRHSIKKNLIGALLFDSGETAEATRLKRTARRRYTRRKNRICYLQEIFSNEMAKVDDSFFHRLEESFLVEEDKKHERHPIFGNIVDEVAYHEKYPTIYHLRKKLVDSTDKADLRLIYLALAHMIKFRGHFLIEGDLNPDNSDVDKLFIQLVQTYNQLFEENPINASGVDAKAILSARLSKSRRLENLIAQLPGEKKNGLFGNLIALSLGLTPNFKSNFDLAEDAKLQLSKDTYDDDLDNLLAQIGDQYADLFLAAKNLSDAILLSDILRVNTEITKAPLSASMIKRYDEHHQDLTLLKALVRQQLPEKYKEIFFDQSKNGYAGYIDGGASQEEFYKFIKPILEKMDGTEELLVKLNREDLLRKQRTFDNGSIPHQIHLGELHAILRRQEDFYPFLKDNREKIEKILTFRIPYYVGPLARGNSRFAWMTRKSEETITPWNFEEVVDKGASAQSFIERMTNFDKNLPNEKVLPKHSLLYEYFTVYNELTKVKYVTEGMRKPAFLSGEQKKAIVDLLFKTNRKVTVKQLKEDYFKKIECFDSVEISGVEDRFNASLGTYHDLLKIIKDKDFLDNEENEDILEDIVLTLTLFEDREMIEERLKTYAHLFDDKVMKQLKRRRYTGWGRLSRKLINGIRDKQSGKTILDFLKSDGFANRNFMQLIHDDSLTFKEDIQKAQVSGQGDSLHEHIANLAGSPAIKKGILQTVKVVDELVKVMGRHKPENIVIEMARENQTTQKGQKNSRERMKRIEEGIKELGSQILKEHPVENTQLQNEKLYLYYLQNGRDMYVDQELDINRLSDYDVDHIVPQSFLKDDSIDNKVLTRSDKARGKSDNVPSEEVVKKMKNYWRQLLNAKLITQRKFDNLTKAERGGLSELDKAGFIKRQLVETRQITKHVAQILDSRMNTKYDENDKLIREVKVITLKSKLVSDFRKDFQFYKVREINNYHHAHDAYLNAVVGTALIKKYPKLESEFVYGDYKVYDVRKMIAKSEQEIGKATAKYFFYSNIMNFFKTEITLANGEIRKRPLIETNGETGEIVWDKGRDFATVRKVLSMPQVNIVKKTEVQTGGFSKESILPKRNSDKLIARKKDWDPKKYGGFDSPTVAYSVLVVAKVEKGKSKKLKSVKELLGITIMERSSFEKNPIDFLEAKGYKEVKKDLIIKLPKYSLFELENGRKRMLASAGELQKGNELALPSKYVNFLYLASHYEKLKGSPEDNEQKQLFVEQHKHYLDEIIEQISEFSKRVILADANLDKVLSAYNKHRDKPIREQAENIIHLFTLTNLGAPAAFKYFDTTIDRKRYTSTKEVLDATLIHQSITGLYETRIDLSQLGGDGGGGGGGGTLNIEDEHRLHETSKEPDVSLGSTWLSDFPQAWAETGGMGLAVRQAPLIIPLKATSTPVSIKQYPMSQEARLGIKPHIQRLLDQGILVPCQSPWNTPLLPVKKPGTNDYRPVQDLREVNKRVEDIHPTVPNPYNLLSGLPPSHQWYTVLDLKDAFFCLRLHPTSQPLFAFEWRDPEMGISGQLTWTRLPQGFKNSPTLFNEALHRDLADFRIQHPDLILLQYVDDLLLAATSELDCQQGTRALLQTLGNLGYRASAKKAQICQKQVKYLGYLLKEGQRWLTEARKETVMGQPTPKTPRQLREFLGKAGFCRLFIPGFAEMAAPLYPLTKPGTLFNWGPDQQKAYQEIKQALLTAPALGLPDLTKPFELFVDEKQGYAKGVLTQKLGPWRRPVAYLSKKLDPVAAGWPPCLRMVAAIAVLTKDAGKLTMGQPLVILAPHAVEALVKQPPDRWLSNARMTHYQALLLDTDRVQFGPVVALNPATLLPLPEEGLQHNCLDILAEAHGTRPDLTDQPLPDADHTWYTDGSSLLQEGQRKAGAAVTTETEVIWAKALPAGTSAQRAELIALTQALKMAEGKKLNVYTDSRYAFATAHIHGEIYRRRGWLTSEGKEIKNKDEILALLKALFLPKRLSIIHCPGHQKGHSAEARGNRMADQAARKAAITETPDTSTLLAGKRTADGSEFEKRTADGSEFESPKKKAKVE

SEQ ID NO: 3095 - protein, 2088 aa, synthetic construct
MPAAKRVKLDGGDKKYSIGLDIGTNSVGWAVITDEYKVPSKKFKVLGNTDRHSIKKNLIGALLFDSGETAEATRLKRTARRRYTRRKNRICYLQEIFSNEMAKVDDSFFHRLEESFLVEEDKKHERHPIFGNIVDEVAYHEKYPTIYHLRKKLVDSTDKADLRLIYLALAHMIKFRGHFLIEGDLNPDNSDVDKLFIQLVQTYNQLFEENPINASGVDAKAILSARLSKSRRLENLIAQLPGEKKNGLFGNLIALSLGLTPNFKSNFDLAEDAKLQLSKDTYDDDLDNLLAQIGDQYADLFLAAKNLSDAILLSDILRVNTEITKAPLSASMIKRYDEHHQDLTLLKALVRQQLPEKYKEIFFDQSKNGYAGYIDGGASQEEFYKFIKPILEKMDGTEELLVKLNREDLLRKQRTFDNGSIPHQIHLGELHAILRRQEDFYPFLKDNREKIEKILTFRIPYYVGPLARGNSRFAWMTRKSEETITPWNFEEVVDKGASAQSFIERMTNFDKNLPNEKVLPKHSLLYEYFTVYNELTKVKYVTEGMRKPAFLSGEQKKAIVDLLFKTNRKVTVKQLKEDYFKKIECFDSVEISGVEDRFNASLGTYHDLLKIIKDKDFLDNEENEDILEDIVLTLTLFEDREMIEERLKTYAHLFDDKVMKQLKRRRYTGWGRLSRKLINGIRDKQSGKTILDFLKSDGFANRNFMQLIHDDSLTFKEDIQKAQVSGQGDSLHEHIANLAGSPAIKKGILQTVKVVDELVKVMGRHKPENIVIEMARENQTTQKGQKNSRERMKRIEEGIKELGSQILKEHPVENTQLQNEKLYLYYLQNGRDMYVDQELDINRLSDYDVDHIVPQSFLKDDSIDNKVLTRSDKARGKSDNVPSEEVVKKMKNYWRQLLNAKLITQRKFDNLTKAERGGLSELDKAGFIKRQLVETRQITKHVAQILDSRMNTKYDENDKLIREVKVITLKSKLVSDFRKDFQFYKVREINNYHHAHDAYLNAVVGTALIKKYPKLESEFVYGDYKVYDVRKMIAKSEQEIGKATAKYFFYSNIMNFFKTEITLANGEIRKRPLIETNGETGEIVWDKGRDFATVRKVLSMPQVNIVKKTEVQTGGFSKESILPKRNSDKLIARKKDWDPKKYGGFDSPTVAYSVLVVAKVEKGKSKKLKSVKELLGITIMERSSFEKNPIDFLEAKGYKEVKKDLIIKLPKYSLFELENGRKRMLASAGELQKGNELALPSKYVNFLYLASHYEKLKGSPEDNEQKQLFVEQHKHYLDEIIEQISEFSKRVILADANLDKVLSAYNKHRDKPIREQAENIIHLFTLTNLGAPAAFKYFDTTIDRKRYTSTKEVLDATLIHQSITGLYETRIDLSQLGGDGGGGSGGTLNIEDEHRLHETSKEPDVSLGSTWLSDFPQAWAETGGMGLAVRQAPLIIPLKATSTPVSIKQYPMSQEARLGIKPHIQRLLDQGILVPCQSPWNTPLLPVKKPGTNDYRPVQDLREVNKRVEDIHPTVPNPYNLLSGLPPSHQWYTVLDLKDAFFCLRLHPTSQPLFAFEWRDPEMGISGQLTWTRLPQGFKNSPTLFNEALHRDLADFRIQHPDLILLQYVDDLLLAATSELDCQQGTRALLQTLGNLGYRASAKKAQICQKQVKYLGYLLKEGQRWLTEARKETVMGQPTPKTPRQLREFLGKAGFCRLFIPGFAEMAAPLYPLTKPGTLFNWGPDQQKAYQEIKQALLTAPALGLPDLTKPFELFVDEKQGYAKGVLTQKLGPWRRPVAYLSKKLDPVAAGWPPCLRMVAAIAVLTKDAGKLTMGQPLVILAPHAVEALVKQPPDRWLSNARMTHYQALLLDTDRVQFGPVVALNPATLLPLPEEGLQHNCLDILAEAHGTRPDLTDQPLPDADHTWYTDGSSLLQEGQRKAGAAVTTETEVIWAKALPAGTSAQRAELIALTQALKMAEGKKLNVYTDSRYAFATAHIHGEIYRRRGWLTSEGKEIKNKDEILALLKALFLPKRLSIIHCPGHQKGHSAEARGNRMADQAARKAAITETPDTSTLLAGKRTADGSEFEKRTADGSEFESPKKKAKVE

SEQ ID NO: 3096 - protein, 2092 aa, synthetic construct; identical to SEQ ID NO: 2790

SEQ ID NO: 3097 - protein, 2093 aa, synthetic construct; identical to SEQ ID NO: 2849

SEQ ID NO: 3098 - protein, 2094 aa, synthetic construct; identical to SEQ ID NO: 2793

SEQ ID NO: 3099 - protein, 2100 aa, synthetic construct; identical to SEQ ID NO: 2836

SEQ ID NO: 3100 - protein, 2092 aa, synthetic construct
MPAAKRVKLDGGDKKYSIGLDIGTNSVGWAVITDEYKVPSKKFKVLGNTDRHSIKKNLIGALLFDSGETAEATRLKRTARRRYTRRKNRICYLQEIFSNEMAKVDDSFFHRLEESFLVEEDKKHERHPIFGNIVDEVAYHEKYPTIYHLRKKLVDSTDKADLRLIYLALAHMIKFRGHFLIEGDLNPDNSDVDKLFIQLVQTYNQLFEENPINASGVDAKAILSARLSKSRRLENLIAQLPGEKKNGLFGNLIALSLGLTPNFKSNFDLAEDAKLQLSKDTYDDDLDNLLAQIGDQYADLFLAAKNLSDAILLSDILRVNTEITKAPLSASMIKRYDEHHQDLTLLKALVRQQLPEKYKEIFFDQSKNGYAGYIDGGASQEEFYKFIKPILEKMDGTEELLVKLNREDLLRKQRTFDNGSIPHQIHLGELHAILRRQEDFYPFLKDNREKIEKILTFRIPYYVGPLARGNSRFAWMTRKSEETITPWNFEEVVDKGASAQSFIERMTNFDKNLPNEKVLPKHSLLYEYFTVYNELTKVKYVTEGMRKPAFLSGEQKKAIVDLLFKTNRKVTVKQLKEDYFKKIECFDSVEISGVEDRFNASLGTYHDLLKIIKDKDFLDNEENEDILEDIVLTLTLFEDREMIEERLKTYAHLFDDKVMKQLKRRRYTGWGRLSRKLINGIRDKQSGKTILDFLKSDGFANRNFMQLIHDDSLTFKEDIQKAQVSGQGDSLHEHIANLAGSPAIKKGILQTVKVVDELVKVMGRHKPENIVIEMARENQTTQKGQKNSRERMKRIEEGIKELGSQILKEHPVENTQLQNEKLYLYYLQNGRDMYVDQELDINRLSDYDVDHIVPQSFLKDDSIDNKVLTRSDKARGKSDNVPSEEVVKKMKNYWRQLLNAKLITQRKFDNLTKAERGGLSELDKAGFIKRQLVETRQITKHVAQILDSRMNTKYDENDKLIREVKVITLKSKLVSDFRKDFQFYKVREINNYHHAHDAYLNAVVGTALIKKYPKLESEFVYGDYKVYDVRKMIAKSEQEIGKATAKYFFYSNIMNFFKTEITLANGEIRKRPLIETNGETGEIVWDKGRDFATVRKVLSMPQVNIVKKTEVQTGGFSKESILPKRNSDKLIARKKDWDPKKYGGFDSPTVAYSVLVVAKVEKGKSKKLKSVKELLGITIMERSSFEKNPIDFLEAKGYKEVKKDLIIKLPKYSLFELENGRKRMLASAGELQKGNELALPSKYVNFLYLASHYEKLKGSPEDNEQKQLFVEQHKHYLDEIIEQISEFSKRVILADANLDKVLSAYNKHRDKPIREQAENIIHLFTLTNLGAPAAFKYFDTTIDRKRYTSTKEVLDATLIHQSITGLYETRIDLSQLGGDGGPAPAPAPGGTLNIEDEHRLHETSKEPDVSLGSTWLSDFPQAWAETGGMGLAVRQAPLIIPLKATSTPVSIKQYPMSQEARLGIKPHIQRLLDQGILVPCQSPWNTPLLPVKKPGTNDYRPVQDLREVNKRVEDIHPTVPNPYNLLSGLPPSHQWYTVLDLKDAFFCLRLHPTSQPLFAFEWRDPEMGISGQLTWTRLPQGFKNSPTLFNEALHRDLADFRIQHPDLILLQYVDDLLLAATSELDCQQGTRALLQTLGNLGYRASAKKAQICQKQVKYLGYLLKEGQRWLTEARKETVMGQPTPKTPRQLREFLGKAGFCRLFIPGFAEMAAPLYPLTKPGTLFNWGPDQQKAYQEIKQALLTAPALGLPDLTKPFELFVDEKQGYAKGVLTQKLGPWRRPVAYLSKKLDPVAAGWPPCLRMVAAIAVLTKDAGKLTMGQPLVILAPHAVEALVKQPPDRWLSNARMTHYQALLLDTDRVQFGPVVALNPATLLPLPEEGLQHNCLDILAEAHGTRPDLTDQPLPDADHTWYTDGSSLLQEGQRKAGAAVTTETEVIWAKALPAGTSAQRAELIALTQALKMAEGKKLNVYTDSRYAFATAHIHGEIYRRRGWLTSEGKEIKNKDEILALLKALFLPKRLSIIHCPGHQKGHSAEARGNRMADQAARKAAITETPDTSTLLAGKRTADGSEFEKRTADGSEFESPKKKAKVE

SEQ ID NO: 3101 - protein, 2094 aa, synthetic construct; identical to SEQ ID NO: 2846

SEQ ID NO: 3102 - protein, 2096 aa, synthetic construct; identical to SEQ ID NO: 2842

SEQ ID NO: 3103 - protein, 2096 aa, synthetic construct; identical to SEQ ID NO: 2815

SEQ ID NO: 3104 - protein, 2096 aa, synthetic construct
MPAAKRVKLDGGDKKYSIGLDIGTNSVGWAVITDEYKVPSKKFKVLGNTDRHSIKKNLIGALLFDSGETAEATRLKRTARRRYTRRKNRICYLQEIFSNEMAKVDDSFFHRLEESFLVEEDKKHERHPIFGNIVDEVAYHEKYPTIYHLRKKLVDSTDKADLRLIYLALAHMIKFRGHFLIEGDLNPDNSDVDKLFIQLVQTYNQLFEENPINASGVDAKAILSARLSKSRRLENLIAQLPGEKKNGLFGNLIALSLGLTPNFKSNFDLAEDAKLQLSKDTYDDDLDNLLAQIGDQYADLFLAAKNLSDAILLSDILRVNTEITKAPLSASMIKRYDEHHQDLTLLKALVRQQLPEKYKEIFFDQSKNGYAGYIDGGASQEEFYKFIKPILEKMDGTEELLVKLNREDLLRKQRTFDNGSIPHQIHLGELHAILRRQEDFYPFLKDNREKIEKILTFRIPYYVGPLARGNSRFAWMTRKSEETITPWNFEEVVDKGASAQSFIERMTNFDKNLPNEKVLPKHSLLYEYFTVYNELTKVKYVTEGMRKPAFLSGEQKKAIVDLLFKTNRKVTVKQLKEDYFKKIECFDSVEISGVEDRFNASLGTYHDLLKIIKDKDFLDNEENEDILEDIVLTLTLFEDREMIEERLKTYAHLFDDKVMKQLKRRRYTGWGRLSRKLINGIRDKQSGKTILDFLKSDGFANRNFMQLIHDDSLTFKEDIQKAQVSGQGDSLHEHIANLAGSPAIKKGILQTVKVVDELVKVMGRHKPENIVIEMARENQTTQKGQKNSRERMKRIEEGIKELGSQILKEHPVENTQLQNEKLYLYYLQNGRDMYVDQELDINRLSDYDVDHIVPQSFLKDDSIDNKVLTRSDKARGKSDNVPSEEVVKKMKNYWRQLLNAKLITQRKFDNLTKAERGGLSELDKAGFIKRQLVETRQITKHVAQILDSRMNTKYDENDKLIREVKVITLKSKLVSDFRKDFQFYKVREINNYHHAHDAYLNAVVGTALIKKYPKLESEFVYGDYKVYDVRKMIAKSEQEIGKATAKYFFYSNIMNFFKTEITLANGEIRKRPLIETNGETGEIVWDKGRDFATVRKVLSMPQVNIVKKTEVQTGGFSKESILPKRNSDKLIARKKDWDPKKYGGFDSPTVAYSVLVVAKVEKGKSKKLKSVKELLGITIMERSSFEKNPIDFLEAKGYKEVKKDLIIKLPKYSLFELENGRKRMLASAGELQKGNELALPSKYVNFLYLASHYEKLKGSPEDNEQKQLFVEQHKHYLDEIIEQISEFSKRVILADANLDKVLSAYNKHRDKPIREQAENIIHLFTLTNLGAPAAFKYFDTTIDRKRYTSTKEVLDATLIHQSITGLYETRIDLSQLGGDGGPAPEAAAKGSSGGTLNIEDEHRLHETSKEPDVSLGSTWLSDFPQAWAETGGMGLAVRQAPLIIPLKATSTPVSIKQYPMSQEARLGIKPHIQRLLDQGILVPCQSPWNTPLLPVKKPGTNDYRPVQDLREVNKRVEDIHPTVPNPYNLLSGLPPSHQWYTVLDLKDAFFCLRLHPTSQPLFAFEWRDPEMGISGQLTWTRLPQGFKNSPTLFNEALHRDLADFRIQHPDLILLQYVDDLLLAATSELDCQQGTRALLQTLGNLGYRASAKKAQICQKQVKYLGYLLKEGQRWLTEARKETVMGQPTPKTPRQLREFLGKAGFCRLFIPGFAEMAAPLYPLTKPGTLFNWGPDQQKAYQEIKQALLTAPALGLPDLTKPFELFVDEKQGYAKGVLTQKLGPWRRPVAYLSKKLDPVAAGWPPCLRMVAAIAVLTKDAGKLTMGQPLVILAPHAVEALVKQPPDRWLSNARMTHYQALLLDTDRVQFGPVVALNPATLLPLPEEGLQHNCLDILAEAHGTRPDLTDQPLPDADHTWYTDGSSLLQEGQRKAGAAVTTETEVIWAKALPAGTSAQRAELIALTQALKMAEGKKLNVYTDSRYAFATAHIHGEIYRRRGWLTSEGKEIKNKDEILALLKALFLPKRLSIIHCPGHQKGHSAEARGNRMADQAARKAAITETPDTSTLLAGKRTADGSEFEKRTADGSEFESPKKKAKVE

SEQ ID NO: 3105 - protein, 2096 aa, synthetic construct
MPAAKRVKLDGGDKKYSIGLDIGTNSVGWAVITDEYKVPSKKFKVLGNTDRHSIKKNLIGALLFDSGETAEATRLKRTARRRYTRRKNRICYLQEIFSNEMAKVDDSFFHRLEESFLVEEDKKHERHPIFGNIVDEVAYHEKYPTIYHLRKKLVDSTDKADLRLIYLALAHMIKFRGHFLIEGDLNPDNSDVDKLFIQLVQTYNQLFEENPINASGVDAKAILSARLSKSRRLENLIAQLPGEKKNGLFGNLIALSLGLTPNFKSNFDLAEDAKLQLSKDTYDDDLDNLLAQIGDQYADLFLAAKNLSDAILLSDILRVNTEITKAPLSASMIKRYDEHHQDLTLLKALVRQQLPEKYKEIFFDQSKNGYAGYIDGGASQEEFYKFIKPILEKMDGTEELLVKLNREDLLRKQRTFDNGSIPHQIHLGELHAILRRQEDFYPFLKDNREKIEKILTFRIPYYVGPLARGNSRFAWMTRKSEETITPWNFEEVVDKGASAQSFIERMTNFDKNLPNEKVLPKHSLLYEYFTVYNELTKVKYVTEGMRKPAFLSGEQKKAIVDLLFKTNRKVTVKQLKEDYFKKIECFDSVEISGVEDRFNASLGTYHDLLKIIKDKDFLDNEENEDILEDIVLTLTLFEDREMIEERLKTYAHLFDDKVMKQLKRRRYTGWGRLSRKLINGIRDKQSGKTILDFLKSDGFANRNFMQLIHDDSLTFKEDIQKAQVSGQGDSLHEHIANLAGSPAIKKGILQTVKVVDELVKVMGRHKPENIVIEMARENQTTQKGQKNSRERMKRIEEGIKELGSQILKEHPVENTQLQNEKLYLYYLQNGRDMYVDQELDINRLSDYDVDHIVPQSFLKDDSIDNKVLTRSDKARGKSDNVPSEEVVKKMKNYWRQLLNAKLITQRKFDNLTKAERGGLSELDKAGFIKRQLVETRQITKHVAQILDSRMNTKYDENDKLIREVKVITLKSKLVSDFRKDFQFYKVREINNYHHAHDAYLNAVVGTALIKKYPKLESEFVYGDYKVYDVRKMIAKSEQEIGKATAKYFFYSNIMNFFKTEITLANGEIRKRPLIETNGETGEIVWDKGRDFATVRKVLSMPQVNIVKKTEVQTGGFSKESILPKRNSDKLIARKKDWDPKKYGGFDSPTVAYSVLVVAKVEKGKSKKLKSVKELLGITIMERSSFEKNPIDFLEAKGYKEVKKDLIIKLPKYSLFELENGRKRMLASAGELQKGNELALPSKYVNFLYLASHYEKLKGSPEDNEQKQLFVEQHKHYLDEIIEQISEFSKRVILADANLDKVLSAYNKHRDKPIREQAENIIHLFTLTNLGAPAAFKYFDTTIDRKRYTSTKEVLDATLIHQSITGLYETRIDLSQLGGDGGGSSEAAAKPAPGGTLNIEDEHRLHETSKEPDVSLGSTWLSDFPQAWAETGGMGLAVRQAPLIIPLKATSTPVSIKQYPMSQEARLGIKPHIQRLLDQGILVPCQSPWNTPLLPVKKPGTNDYRPVQDLREVNKRVEDIHPTVPNPYNLLSGLPPSHQWYTVLDLKDAFFCLRLHPTSQPLFAFEWRDPEMGISGQLTWTRLPQGFKNSPTLFNEALHRDLADFRIQHPDLILLQYVDDLLLAATSELDCQQGTRALLQTLGNLGYRASAKKAQICQKQVKYLGYLLKEGQRWLTEARKETVMGQPTPKTPRQLREFLGKAGFCRLFIPGFAEMAAPLYPLTKPGTLFNWGPDQQKAYQEIKQALLTAPALGLPDLTKPFELFVDEKQGYAKGVLTQKLGPWRRPVAYLSKKLDPVAAGWPPCLRMVAAIAVLTKDAGKLTMGQPLVILAPHAVEALVKQPPDRWLSNARMTHYQALLLDTDRVQFGPVVALNPATLLPLPEEGLQHNCLDILAEAHGTRPDLTDQPLPDADHTWYTDGSSLLQEGQRKAGAAVTTETEVIWAKALPAGTSAQRAELIALTQALKMAEGKKLNVYTDSRYAFATAHIHGEIYRRRGWLTSEGKEIKNKDEILALLKALFLPKRLSIIHCPGHQKGHSAEARGNRMADQAARKAAITETPDTSTLLAGKRTADGSEFEKRTADGSEFESPKKKAKVE

SEQ ID NO: 3106 - protein, 2094 aa, synthetic construct
MPAAKRVKLDGGDKKYSIGLDIGTNSVGWAVITDEYKVPSKKFKVLGNTDRHSIKKNLIGALLFDSGETAEATRLKRTARRRYTRRKNRICYLQEIFSNEMAKVDDSFFHRLEESFLVEEDKKHERHPIFGNIVDEVAYHEKYPTIYHLRKKLVDSTDKADLRLIYLALAHMIKFRGHFLIEGDLNPDNSDVDKLFIQLVQTYNQLFEENPINASGVDAKAILSARLSKSRRLENLIAQLPGEKKNGLFGNLIALSLGLTPNFKSNFDLAEDAKLQLSKDTYDDDLDNLLAQIGDQYADLFLAAKNLSDAILLSDILRVNTEITKAPLSASMIKRYDEHHQDLTLLKALVRQQLPEKYKEIFFDQSKNGYAGYIDGGASQEEFYKFIKPILEKMDGTEELLVKLNREDLLRKQRTFDNGSIPHQIHLGELHAILRRQEDFYPFLKDNREKIEKILTFRIPYYVGPLARGNSRFAWMTRKSEETITPWNFEEVVDKGASAQSFIERMTNFDKNLPNEKVLPKHSLLYEYFTVYNELTKVKYVTEGMRKPAFLSGEQKKAIVDLLFKTNRKVTVKQLKEDYFKKIECFDSVEISGVEDRFNASLGTYHDLLKIIKDKDFLDNEENEDILEDIVLTLTLFEDREMIEERLKTYAHLFDDKVMKQLKRRRYTGWGRLSRKLINGIRDKQSGKTILDFLKSDGFANRNFMQLIHDDSLTFKEDIQKAQVSGQGDSLHEHIANLAGSPAIKKGILQTVKVVDELVKVMGRHKPENIVIEMARENQTTQKGQKNSRERMKRIEEGIKELGSQILKEHPVENTQLQNEKLYLYYLQNGRDMYVDQELDINRLSDYDVDHIVPQSFLKDDSIDNKVLTRSDKARGKSDNVPSEEVVKKMKNYWRQLLNAKLITQRKFDNLTKAERGGLSELDKAGFIKRQLVETRQITKHVAQILDSRMNTKYDENDKLIREVKVITLKSKLVSDFRKDFQFYKVREINNYHHAHDAYLNAVVGTALIKKYPKLESEFVYGDYKVYDVRKMIAKSEQEIGKATAKYFFYSNIMNFFKTEITLANGEIRKRPLIETNGETGEIVWDKGRDFATVRKVLSMPQVNIVKKTEVQTGGFSKESILPKRNSDKLIARKKDWDPKKYGGFDSPTVAYSVLVVAKVEKGKSKKLKSVKELLGITIMERSSFEKNPIDFLEAKGYKEVKKDLIIKLPKYSLFELENGRKRMLASAGELQKGNELALPSKYVNFLYLASHYEKLKGSPEDNEQKQLFVEQHKHYLDEIIEQISEFSKRVILADANLDKVLSAYNKHRDKPIREQAENIIHLFTLTNLGAPAAFKYFDTTIDRKRYTSTKEVLDATLIHQSITGLYETRIDLSQLGGDGGPAPGSSGGSGGTLNIEDEHRLHETSKEPDVSLGSTWLSDFPQAWAETGGMGLAVRQAPLIIPLKATSTPVSIKQYPMSQEARLGIKPHIQRLLDQGILVPCQSPWNTPLLPVKKPGTNDYRPVQDLREVNKRVEDIHPTVPNPYNLLSGLPPSHQWYTVLDLKDAFFCLRLHPTSQPLFAFEWRDPEMGISGQLTWTRLPQGFKNSPTLFNEALHRDLADFRIQHPDLILLQYVDDLLLAATSELDCQQGTRALLQTLGNLGYRASAKKAQICQKQVKYLGYLLKEGQRWLTEARKETVMGQPTPKTPRQLREFLGKAGFCRLFIPGFAEMAAPLYPLTKPGTLFNWGPDQQKAYQEIKQALLTAPALGLPDLTKPFELFVDEKQGYAKGVLTQKLGPWRRPVAYLSKKLDPVAAGWPPCLRMVAAIAVLTKDAGKLTMGQPLVILAPHAVEALVKQPPDRWLSNARMTHYQALLLDTDRVQFGPVVALNPATLLPLPEEGLQHNCLDILAEAHGTRPDLTDQPLPDADHTWYTDGSSLLQEGQRKAGAAVTTETEVIWAKALPAGTSAQRAELIALTQALKMAEGKKLNVYTDSRYAFATAHIHGEIYRRRGWLTSEGKEIKNKDEILALLKALFLPKRLSIIHCPGHQKGHSAEARGNRMADQAARKAAITETPDTSTLLAGKRTADGSEFEKRTADGSEFESPKKKAKVE

SEQ ID NO: 3107 - protein, 2091 aa, synthetic construct; identical to SEQ ID NO: 2820

SEQ ID NO: 3108 - protein, 2096 aa, synthetic construct; identical to SEQ ID NO: 2782

SEQ ID NO: 3109 - protein, 2096 aa, synthetic construct; identical to SEQ ID NO: 2860

SEQ ID NO: 3110 - protein, 2095 aa, synthetic construct
MPAAKRVKLDGGDKKYSIGLDIGTNSVGWAVITDEYKVPSKKFKVLGNTDRHSIKKNLIGALLFDSGETAEATRLKRTARRRYTRRKNRICYLQEIFSNEMAKVDDSFFHRLEESFLVEEDKKHERHPIFGNIVDEVAYHEKYPTIYHLRKKLVDSTDKADLRLIYLALAHMIKFRGHFLIEGDLNPDNSDVDKLFIQLVQTYNQLFEENPINASGVDAKAILSARLSKSRRLENLIAQLPGEKKNGLFGNLIALSLGLTPNFKSNFDLAEDAKLQLSKDTYDDDLDNLLAQIGDQYADLFLAAKNLSDAILLSDILRVNTEITKAPLSASMIKRYDEHHQDLTLLKALVRQQLPEKYKEIFFDQSKNGYAGYIDGGASQEEFYKFIKPILEKMDGTEELLVKLNREDLLRKQRTFDNGSIPHQIHLGELHAILRRQEDFYPFLKDNREKIEKILTFRIPYYVGPLARGNSRFAWMTRKSEETITPWNFEEVVDKGASAQSFIERMTNFDKNLPNEKVLPKHSLLYEYFTVYNELTKVKYVTEGMRKPAFLSGEQKKAIVDLLFKTNRKVTVKQLKEDYFKKIECFDSVEISGVEDRFNASLGTYHDLLKIIKDKDFLDNEENEDILEDIVLTLTLFEDREMIEERLKTYAHLFDDKVMKQLKRRRYTGWGRLSRKLINGIRDKQSGKTILDFLKSDGFANRNFMQLIHDDSLTFKEDIQKAQVSGQGDSLHEHIANLAGSPAIKKGILQTVKVVDELVKVMGRHKPENIVIEMARENQTTQKGQKNSRERMKRIEEGIKELGSQILKEHPVENTQLQNEKLYLYYLQNGRDMYVDQELDINRLSDYDVDHIVPQSFLKDDSIDNKVLTRSDKARGKSDNVPSEEVVKKMKNYWRQLLNAKLITQRKFDNLTKAERGGLSELDKAGFIKRQLVETRQITKHVAQILDSRMNTKYDENDKLIREVKVITLKSKLVSDFRKDFQFYKVREINNYHHAHDAYLNAVVGTALIKKYPKLESEFVYGDYKVYDVRKMIAKSEQEIGKATAKYFFYSNIMNFFKTEITLANGEIRKRPLIETNGETGEIVWDKGRDFATVRKVLSMPQVNIVKKTEVQTGGFSKESILPKRNSDKLIARKKDWDPKKYGGFDSPTVAYSVLVVAKVEKGKSKKLKSVKELLGITIMERSSFEKNPIDFLEAKGYKEVKKDLIIKLPKYSLFELENGRKRMLASAGELQKGNELALPSKYVNFLYLASHYEKLKGSPEDNEQKQLFVEQHKHYLDEIIEQISEFSKRVILADANLDKVLSAYNKHRDKPIREQAENIIHLFTLTNLGAPAAFKYFDTTIDRKRYTSTKEVLDATLIHQSITGLYETRIDLSQLGGDGGGGGGSGGGGSGGTLNIEDEHRLHETSKEPDVSLGSTWLSDFPQAWAETGGMGLAVRQAPLIIPLKATSTPVSIKQYPMSQEARLGIKPHIQRLLDQGILVPCQSPWNTPLLPVKKPGTNDYRPVQDLREVNKRVEDIHPTVPNPYNLLSGLPPSHQWYTVLDLKDAFFCLRLHPTSQPLFAFEWRDPEMGISGQLTWTRLPQGFKNSPTLFNEALHRDLADFRIQHPDLILLQYVDDLLLAATSELDCQQGTRALLQTLGNLGYRASAKKAQICQKQVKYLGYLLKEGQRWLTEARKETVMGQPTPKTPRQLREFLGKAGFCRLFIPGFAEMAAPLYPLTKPGTLFNWGPDQQKAYQEIKQALLTAPALGLPDLTKPFELFVDEKQGYAKGVLTQKLGPWRRPVAYLSKKLDPVAAGWPPCLRMVAAIAVLTKDAGKLTMGQPLVILAPHAVEALVKQPPDRWLSNARMTHYQALLLDTDRVQFGPVVALNPATLLPLPEEGLQHNCLDILAEAHGTRPDLTDQPLPDADHTWYTDGSSLLQEGQRKAGAAVTTETEVIWAKALPAGTSAQRAELIALTQALKMAEGKKLNVYTDSRYAFATAHIHGEIYRRRGWLTSEGKEIKNKDEILALLKALFLPKRLSIIHCPGHQKGHSAEARGNRMADQAARKAAITETPDTSTLLAGKRTADGSEFEKRTADGSEFESPKKKAKVE

SEQ ID NO: 3111 - protein, 2094 aa, synthetic construct; identical to SEQ ID NO: 2800

SEQ ID NO: 3112 - protein, 2096 aa, synthetic construct; identical to SEQ ID NO: 2792

SEQ ID NO: 3113 - protein, 2091 aa, synthetic construct
MPAAKRVKLDGGDKKYSIGLDIGTNSVGWAVITDEYKVPSKKFKVLGNTDRHSIKKNLIGALLFDSGETAEATRLKRTARRRYTRRKNRICYLQEIFSNEMAKVDDSFFHRLEESFLVEEDKKHERHPIFGNIVDEVAYHEKYPTIYHLRKKLVDSTDKADLRLIYLALAHMIKFRGHFLIEGDLNPDNSDVDKLFIQLVQTYNQLFEENPINASGVDAKAILSARLSKSRRLENLIAQLPGEKKNGLFGNLIALSLGLTPNFKSNFDLAEDAKLQLSKDTYDDDLDNLLAQIGDQYADLFLAAKNLSDAILLSDILRVNTEITKAPLSASMIKRYDEHHQDLTLLKALVRQQLPEKYKEIFFDQSKNGYAGYIDGGASQEEFYKFIKPILEKMDGTEELLVKLNREDLLRKQRTFDNGSIPHQIHLGELHAILRRQEDFYPFLKDNREKIEKILTFRIPYYVGPLARGNSRFAWMTRKSEETITPWNFEEVVDKGASAQSFIERMTNFDKNLPNEKVLPKHSLLYEYFTVYNELTKVKYVTEGMRKPAFLSGEQKKAIVDLLFKTNRKVTVKQLKEDYFKKIECFDSVEISGVEDRFNASLGTYHDLLKIIKDKDFLDNEENEDILEDIVLTLTLFEDREMIEERLKTYAHLFDDKVMKQLKRRRYTGWGRLSRKLINGIRDKQSGKTILDFLKSDGFANRNFMQLIHDDSLTFKEDIQKAQVSGQGDSLHEHIANLAGSPAIKKGILQTVKVVDELVKVMGRHKPENIVIEMARENQTTQKGQKNSRERMKRIEEGIKELGSQILKEHPVENTQLQNEKLYLYYLQNGRDMYVDQELDINRLSDYDVDHIVPQSFLKDDSIDNKVLTRSDKARGKSDNVPSEEVVKKMKNYWRQLLNAKLITQRKFDNLTKAERGGLSELDKAGFIKRQLVETRQITKHVAQILDSRMNTKYDENDKLIREVKVITLKSKLVSDFRKDFQFYKVREINNYHHAHDAYLNAVVGTALIKKYPKLESEFVYGDYKVYDVRKMIAKSEQEIGKATAKYFFYSNIMNFFKTEITLANGEIRKRPLIETNGETGEIVWDKGRDFATVRKVLSMPQVNIVKKTEVQTGGFSKESILPKRNSDKLIARKKDWDPKKYGGFDSPTVAYSVLVVAKVEKGKSKKLKSVKELLGITIMERSSFEKNPIDFLEAKGYKEVKKDLIIKLPKYSLFELENGRKRMLASAGELQKGNELALPSKYVNFLYLASHYEKLKGSPEDNEQKQLFVEQHKHYLDEIIEQISEFSKRVILADANLDKVLSAYNKHRDKPIREQAENIIHLFTLTNLGAPAAFKYFDTTIDRKRYTSTKEVLDATLIHQSITGLYETRIDLSQLGGDGGGGSGSSGGTLNIEDEHRLHETSKEPDVSLGSTWLSDFPQAWAETGGMGLAVRQAPLIIPLKATSTPVSIKQYPMSQEARLGIKPHIQRLLDQGILVPCQSPWNTPLLPVKKPGTNDYRPVQDLREVNKRVEDIHPTVPNPYNLLSGLPPSHQWYTVLDLKDAFFCLRLHPTSQPLFAFEWRDPEMGISGQLTWTRLPQGFKNSPTLFNEALHRDLADFRIQHPDLILLQYVDDLLLAATSELDCQQGTRALLQTLGNLGYRASAKKAQICQKQVKYLGYLLKEGQRWLTEARKETVMGQPTPKTPRQLREFLGKAGFCRLFIPGFAEMAAPLYPLTKPGTLFNWGPDQQKAYQEIKQALLTAPALGLPDLTKPFELFVDEKQGYAKGVLTQKLGPWRRPVAYLSKKLDPVAAGWPPCLRMVAAIAVLTKDAGKLTMGQPLVILAPHAVEALVKQPPDRWLSNARMTHYQALLLDTDRVQFGPVVALNPATLLPLPEEGLQHNCLDILAEAHGTRPDLTDQPLPDADHTWYTDGSSLLQEGQRKAGAAVTTETEVIWAKALPAGTSAQRAELIALTQALKMAEGKKLNVYTDSRYAFATAHIHGEIYRRRGWLTSEGKEIKNKDEILALLKALFLPKRLSIIHCPGHQKGHSAEARGNRMADQAARKAAITETPDTSTLLAGKRTADGSEFEKRTADGSEFESPKKKAKVE

SEQ ID NO: 3114 - protein, 2090 aa, synthetic construct; identical to SEQ ID NO: 2834

SEQ ID NO: 3115 - protein, 2096 aa, synthetic construct
MPAAKRVKLDGGDKKYSIGLDIGTNSVGWAVITDEYKVPSKKFKVLGNTDRHSIKKNLIGALLFDSGETAEATRLKRTARRRYTRRKNRICYLQEIFSNEMAKVDDSFFHRLEESFLVEEDKKHERHPIFGNIVDEVAYHEKYPTIYHLRKKLVDSTDKADLRLIYLALAHMIKFRGHFLIEGDLNPDNSDVDKLFIQLVQTYNQLFEENPINASGVDAKAILSARLSKSRRLENLIAQLPGEKKNGLFGNLIALSLGLTPNFKSNFDLAEDAKLQLSKDTYDDDLDNLLAQIGDQYADLFLAAKNLSDAILLSDILRVNTEITKAPLSASMIKRYDEHHQDLTLLKALVRQQLPEKYKEIFFDQSKNGYAGYIDGGASQEEFYKFIKPILEKMDGTEELLVKLNREDLLRKQRTFDNGSIPHQIHLGELHAILRRQEDFYPFLKDNREKIEKILTFRIPYYVGPLARGNSRFAWMTRKSEETITPWNFEEVVDKGASAQSFIERMTNFDKNLPNEKVLPKHSLLYEYFTVYNELTKVKYVTEGMRKPAFLSGEQKKAIVDLLFKTNRKVTVKQLKEDYFKKIECFDSVEISGVEDRFNASLGTYHDLLKIIKDKDFLDNEENEDILEDIVLTLTLFEDREMIEERLKTYAHLFDDKVMKQLKRRRYTGWGRLSRKLINGIRDKQSGKTILDFLKSDGFANRNFMQLIHDDSLTFKEDIQKAQVSGQGDSLHEHIANLAGSPAIKKGILQTVKVVDELVKVMGRHKPENIVIEMARENQTTQKGQKNSRERMKRIEEGIKELGSQILKEHPVENTQLQNEKLYLYYLQNGRDMYVDQELDINRLSDYDVDHIVPQSFLKDDSIDNKVLTRSDKARGKSDNVPSEEVVKKMKNYWRQLLNAKLITQRKFDNLTKAERGGLSELDKAGFIKRQLVETRQITKHVAQILDSRMNTKYDENDKLIREVKVITLKSKLVSDFRKDFQFYKVREINNYHHAHDAYLNAVVGTALIKKYPKLESEFVYGDYKVYDVRKMIAKSEQEIGKATAKYFFYSNIMNFFKTEITLANGEIRKRPLIETNGETGEIVWDKGRDFATVRKVLSMPQVNIVKKTEVQTGGFSKESILPKRNSDKLIARKKDWDPKKYGGFDSPTVAYSVLVVAKVEKGKSKKLKSVKELLGITIMERSSFEKNPIDFLEAKGYKEVKKDLIIKLPKYSLFELENGRKRMLASAGELQKGNELALPSKYVNFLYLASHYEKLKGSPEDNEQKQLFVEQHKHYLDEIIEQISEFSKRVILADANLDKVLSAYNKHRDKPIREQAENIIHLFTLTNLGAPAAFKYFDTTIDRKRYTSTKEVLDATLIHQSITGLYETRIDLSQLGGDGGGGGGGSEAAAKGGTLNIEDEHRLHETSKEPDVSLGSTWLSDFPQAWAETGGMGLAVRQAPLIIPLKATSTPVSIKQYPMSQEARLGIKPHIQRLLDQGILVPCQSPWNTPLLPVKKPGTNDYRPVQDLREVNKRVEDIHPTVPNPYNLLSGLPPSHQWYTVLDLKDAFFCLRLHPTSQPLFAFEWRDPEMGISGQLTWTRLPQGFKNSPTLFNEALHRDLADFRIQHPDLILLQYVDDLLLAATSELDCQQGTRALLQTLGNLGYRASAKKAQICQKQVKYLGYLLKEGQRWLTEARKETVMGQPTPKTPRQLREFLGKAGFCRLFIPGFAEMAAPLYPLTKPGTLFNWGPDQQKAYQEIKQALLTAPALGLPDLTKPFELFVDEKQGYAKGVLTQKLGPWRRPVAYLSKKLDPVAAGWPPCLRMVAAIAVLTKDAGKLTMGQPLVILAPHAVEALVKQPPDRWLSNARMTHYQALLLDTDRVQFGPVVALNPATLLPLPEEGLQHNCLDILAEAHGTRPDLTDQPLPDADHTWYTDGSSLLQEGQRKAGAAVTTETEVIWAKALPAGTSAQRAELIALTQALKMAEGKKLNVYTDSRYAFATAHIHGEIYRRRGWLTSEGKEIKNKDEILALLKALFLPKRLSIIHCPGHQKGHSAEARGNRMADQAARKAAITETPDTSTLLAGKRTADGSEFEKRTADGSEFESPKKKAKVE

SEQ ID NO: 3116 - protein, 2096 aa, synthetic construct; identical to SEQ ID NO: 2789

SEQ ID NO: 3117 - protein, 2094 aa, synthetic construct; identical to SEQ ID NO: 2848

SEQ ID NO: 3118 - protein, 2096 aa, synthetic construct; identical to SEQ ID NO: 2805

SEQ ID NO: 3119 - protein, 2091 aa, synthetic construct; identical to SEQ ID NO: 2861

SEQ ID NO: 3120 - protein, 2115 aa, synthetic construct; identical to SEQ ID NO: 2813

SEQ ID NO: 3121 - protein, 2094 aa, synthetic construct
MPAAKRVKLDGGDKKYSIGLDIGTNSVGWAVITDEYKVPSKKFKVLGNTDRHSIKKNLIGALLFDSGETAEATRLKRTARRRYTRRKNRICYLQEIFSNEMAKVDDSFFHRLEESFLVEEDKKHERHPIFGNIVDEVAYHEKYPTIYHLRKKLVDSTDKADLRLIYLALAHMIKFRGHFLIEGDLNPDNSDVDKLFIQLVQTYNQLFEENPINASGVDAKAILSARLSKSRRLENLIAQLPGEKKNGLFGNLIALSLGLTPNFKSNFDLAEDAKLQLSKDTYDDDLDNLLAQIGDQYADLFLAAKNLSDAILLSDILRVNTEITKAPLSASMIKRYDEHHQDLTLLKALVRQQLPEKYKEIFFDQSKNGYAGYIDGGASQEEFYKFIKPILEKMDGTEELLVKLNREDLLRKQRTFDNGSIPHQIHLGELHAILRRQEDFYPFLKDNREKIEKILTFRIPYYVGPLARGNSRFAWMTRKSEETITPWNFEEVVDKGASAQSFIERMTNFDKNLPNEKVLPKHSLLYEYFTVYNELTKVKYVTEGMRKPAFLSGEQKKAIVDLLFKTNRKVTVKQLKEDYFKKIECFDSVEISGVEDRFNASLGTYHDLLKIIKDKDFLDNEENEDILEDIVLTLTLFEDREMIEERLKTYAHLFDDKVMKQLKRRRYTGWGRLSRKLINGIRDKQSGKTILDFLKSDGFANRNFMQLIHDDSLTFKEDIQKAQVSGQGDSLHEHIANLAGSPAIKKGILQTVKVVDELVKVMGRHKPENIVIEMARENQTTQKGQKNSRERMKRIEEGIKELGSQILKEHPVENTQLQNEKLYLYYLQNGRDMYVDQELDINRLSDYDVDHIVPQSFLKDDSIDNKVLTRSDKARGKSDNVPSEEVVKKMKNYWRQLLNAKLITQRKFDNLTKAERGGLSELDKAGFIKRQLVETRQITKHVAQILDSRMNTKYDENDKLIREVKVITLKSKLVSDFRKDFQFYKVREINNYHHAHDAYLNAVVGTALIKKYPKLESEFVYGDYKVYDVRKMIAKSEQEIGKATAKYFFYSNIMNFFKTEITLANGEIRKRPLIETNGETGEIVWDKGRDFATVRKVLSMPQVNIVKKTEVQTGGFSKESILPKRNSDKLIARKKDWDPKKYGGFDSPTVAYSVLVVAKVEKGKSKKLKSVKELLGITIMERSSFEKNPIDFLEAKGYKEVKKDLIIKLPKYSLFELENGRKRMLASAGELQKGNELALPSKYVNFLYLASHYEKLKGSPEDNEQKQLFVEQHKHYLDEIIEQISEFSKRVILADANLDKVLSAYNKHRDKPIREQAENIIHLFTLTNLGAPAAFKYFDTTIDRKRYTSTKEVLDATLIHQSITGLYETRIDLSQLGGDGGGGSGGGGSSGGTLNIEDEHRLHETSKEPDVSLGSTWLSDFPQAWAETGGMGLAVRQAPLIIPLKATSTPVSIKQYPMSQEARLGIKPHIQRLLDQGILVPCQSPWNTPLLPVKKPGTNDYRPVQDLREVNKRVEDIHPTVPNPYNLLSGLPPSHQWYTVLDLKDAFFCLRLHPTSQPLFAFEWRDPEMGISGQLTWTRLPQGFKNSPTLFNEALHRDLADFRIQHPDLILLQYVDDLLLAATSELDCQQGTRALLQTLGNLGYRASAKKAQICQKQVKYLGYLLKEGQRWLTEARKETVMGQPTPKTPRQLREFLGKAGFCRLFIPGFAEMAAPLYPLTKPGTLFNWGPDQQKAYQEIKQALLTAPALGLPDLTKPFELFVDEKQGYAKGVLTQKLGPWRRPVAYLSKKLDPVAAGWPPCLRMVAAIAVLTKDAGKLTMGQPLVILAPHAVEALVKQPPDRWLSNARMTHYQALLLDTDRVQFGPVVALNPATLLPLPEEGLQHNCLDILAEAHGTRPDLTDQPLPDADHTWYTDGSSLLQEGQRKAGAAVTTETEVIWAKALPAGTSAQRAELIALTQALKMAEGKKLNVYTDSRYAFATAHIHGEIYRRRGWLTSEGKEIKNKDEILALLKALFLPKRLSIIHCPGHQKGHSAEARGNRMADQAARKAAITETPDTSTLLAGKRTADGSEFEKRTADGSEFESPKKKAKVE

SEQ ID NO: 3122 - protein, 2094 aa, synthetic construct
MPAAKRVKLDGGDKKYSIGLDIGTNSVGWAVITDEYKVPSKKFKVLGNTDRHSIKKNLIGALLFDSGETAEATRLKRTARRRYTRRKNRICYLQEIFSNEMAKVDDSFFHRLEESFLVEEDKKHERHPIFGNIVDEVAYHEKYPTIYHLRKKLVDSTDKADLRLIYLALAHMIKFRGHFLIEGDLNPDNSDVDKLFIQLVQTYNQLFEENPINASGVDAKAILSARLSKSRRLENLIAQLPGEKKNGLFGNLIALSLGLTPNFKSNFDLAEDAKLQLSKDTYDDDLDNLLAQIGDQYADLFLAAKNLSDAILLSDILRVNTEITKAPLSASMIKRYDEHHQDLTLLKALVRQQLPEKYKEIFFDQSKNGYAGYIDGGASQEEFYKFIKPILEKMDGTEELLVKLNREDLLRKQRTFDNGSIPHQIHLGELHAILRRQEDFYPFLKDNREKIEKILTFRIPYYVGPLARGNSRFAWMTRKSEETITPWNFEEVVDKGASAQSFIERMTNFDKNLPNEKVLPKHSLLYEYFTVYNELTKVKYVTEGMRKPAFLSGEQKKAIVDLLFKTNRKVTVKQLKEDYFKKIECFDSVEISGVEDRFNASLGTYHDLLKIIKDKDFLDNEENEDILEDIVLTLTLFEDREMIEERLKTYAHLFDDKVMKQLKRRRYTGWGRLSRKLINGIRDKQSGKTILDFLKSDGFANRNFMQLIHDDSLTFKEDIQKAQVSGQGDSLHEHIANLAGSPAIKKGILQTVKVVDELVKVMGRHKPENIVIEMARENQTTQKGQKNSRERMKRIEEGIKELGSQILKEHPVENTQLQNEKLYLYYLQNGRDMYVDQELDINRLSDYDVDHIVPQSFLKDDSIDNKVLTRSDKARGKSDNVPSEEVVKKMKNYWRQLLNAKLITQRKFDNLTKAERGGLSELDKAGFIKRQLVETRQITKHVAQILDSRMNTKYDENDKLIREVKVITLKSKLVSDFRKDFQFYKVREINNYHHAHDAYLNAVVGTALIKKYPKLESEFVYGDYKVYDVRKMIAKSEQEIGKATAKYFFYSNIMNFFKTEITLANGEIRKRPLIETNGETGEIVWDKGRDFATVRKVLSMPQVNIVKKTEVQTGGFSKESILPKRNSDKLIARKKDWDPKKYGGFDSPTVAYSVLVVAKVEKGKSKKLKSVKELLGITIMERSSFEKNPIDFLEAKGYKEVKKDLIIKLPKYSLFELENGRKRMLASAGELQKGNELALPSKYVNFLYLASHYEKLKGSPEDNEQKQLFVEQHKHYLDEIIEQISEFSKRVILADANLDKVLSAYNKHRDKPIREQAENIIHLFTLTNLGAPAAFKYFDTTIDRKRYTSTKEVLDATLIHQSITGLYETRIDLSQLGGDGGGGSGSSPAPGGTLNIEDEHRLHETSKEPDVSLGSTWLSDFPQAWAETGGMGLAVRQAPLIIPLKATSTPVSIKQYPMSQEARLGIKPHIQRLLDQGILVPCQSPWNTPLLPVKKPGTNDYRPVQDLREVNKRVEDIHPTVPNPYNLLSGLPPSHQWYTVLDLKDAFFCLRLHPTSQPLFAFEWRDPEMGISGQLTWTRLPQGFKNSPTLFNEALHRDLADFRIQHPDLILLQYVDDLLLAATSELDCQQGTRALLQTLGNLGYRASAKKAQICQKQVKYLGYLLKEGQRWLTEARKETVMGQPTPKTPRQLREFLGKAGFCRLFIPGFAEMAAPLYPLTKPGTLFNWGPDQQKAYQEIKQALLTAPALGLPDLTKPFELFVDEKQGYAKGVLTQKLGPWRRPVAYLSKKLDPVAAGWPPCLRMVAAIAVLTKDAGKLTMGQPLVILAPHAVEALVKQPPDRWLSNARMTHYQALLLDTDRVQFGPVVALNPATLLPLPEEGLQHNCLDILAEAHGTRPDLTDQPLPDADHTWYTDGSSLLQEGQRKAGAAVTTETEVIWAKALPAGTSAQRAELIALTQALKMAEGKKLNVYTDSRYAFATAHIHGEIYRRRGWLTSEGKEIKNKDEILALLKALFLPKRLSIIHCPGHQKGHSAEARGNRMADQAARKAAITETPDTSTLLAGKRTADGSEFEKRTADGSEFESPKKKAKVE

SEQ ID NO: 3123 - protein, 2090 aa, synthetic construct; identical to SEQ ID NO: 2823

SEQ ID NO: 3124 - protein, 2094 aa, synthetic construct; identical to SEQ ID NO: 2833

SEQ ID NO: 3125 - protein, 2096 aa, synthetic construct; identical to SEQ ID NO: 2794

SEQ ID NO: 3126 - protein, 2100 aa, synthetic construct; identical to SEQ ID NO: 2802

SEQ ID NO: 3127 - protein, 2096 aa, synthetic construct; identical to SEQ ID NO: 2839

SEQ ID NO: 3128 - protein, 2094 aa, synthetic construct; identical to SEQ ID NO: 2841

SEQ ID NO: 3129 - protein, 2096 aa, synthetic construct
MPAAKRVKLDGGDKKYSIGLDIGTNSVGWAVITDEYKVPSKKFKVLGNTDRHSIKKNLIGALLFDSGETAEATRLKRTARRRYTRRKNRICYLQEIFSNEMAKVDDSFFHRLEESFLVEEDKKHERHPIFGNIVDEVAYHEKYPTIYHLRKKLVDSTDKADLRLIYLALAHMIKFRGHFLIEGDLNPDNSDVDKLFIQLVQTYNQLFEENPINASGVDAKAILSARLSKSRRLENLIAQLPGEKKNGLFGNLIALSLGLTPNFKSNFDLAEDAKLQLSKDTYDDDLDNLLAQIGDQYADLFLAAKNLSDAILLSDILRVNTEITKAPLSASMIKRYDEHHQDLTLLKALVRQQLPEKYKEIFFDQSKNGYAGYIDGGASQEEFYKFIKPILEKMDGTEELLVKLNREDLLRKQRTFDNGSIPHQIHLGELHAILRRQEDFYPFLKDNREKIEKILTFRIPYYVGPLARGNSRFAWMTRKSEETITPWNFEEVVDKGASAQSFIERMTNFDKNLPNEKVLPKHSLLYEYFTVYNELTKVKYVTEGMRKPAFLSGEQKKAIVDLLFKTNRKVTVKQLKEDYFKKIECFDSVEISGVEDRFNASLGTYHDLLKIIKDKDFLDNEENEDILEDIVLTLTLFEDREMIEERLKTYAHLFDDKVMKQLKRRRYTGWGRLSRKLINGIRDKQSGKTILDFLKSDGFANRNFMQLIHDDSLTFKEDIQKAQVSGQGDSLHEHIANLAGSPAIKKGILQTVKVVDELVKVMGRHKPENIVIEMARENQTTQKGQKNSRERMKRIEEGIKELGSQILKEHPVENTQLQNEKLYLYYLQNGRDMYVDQELDINRLSDYDVDHIVPQSFLKDDSIDNKVLTRSDKARGKSDNVPSEEVVKKMKNYWRQLLNAKLITQRKFDNLTKAERGGLSELDKAGFIKRQLVETRQITKHVAQILDSRMNTKYDENDKLIREVKVITLKSKLVSDFRKDFQFYKVREINNYHHAHDAYLNAVVGTALIKKYPKLESEFVYGDYKVYDVRKMIAKSEQEIGKATAKYFFYSNIMNFFKTEITLANGEIRKRPLIETNGETGEIVWDKGRDFATVRKVLSMPQVNIVKKTEVQTGGFSKESILPKRNSDKLIARKKDWDPKKYGGFDSPTVAYSVLVVAKVEKGKSKKLKSVKELLGITIMERSSFEKNPIDFLEAKGYKEVKKDLIIKLPKYSLFELENGRKRMLASAGELQKGNELALPSKYVNFLYLASHYEKLKGSPEDNEQKQLFVEQHKHYLDEIIEQISEFSKRVILADANLDKVLSAYNKHRDKPIREQAENIIHLFTLTNLGAPAAFKYFDTTIDRKRYTSTKEVLDATLIHQSITGLYETRIDLSQLGGDGGGGSGGGEAAAKGGTLNIEDEHRLHETSKEPDVSLGSTWLSDFPQAWAETGGMGLAVRQAPLIIPLKATSTPVSIKQYPMSQEARLGIKPHIQRLLDQGILVPCQSPWNTPLLPVKKPGTNDYRPVQDLREVNKRVEDIHPTVPNPYNLLSGLPPSHQWYTVLDLKDAFFCLRLHPTSQPLFAFEWRDPEMGISGQLTWTRLPQGFKNSPTLFNEALHRDLADFRIQHPDLILLQYVDDLLLAATSELDCQQGTRALLQTLGNLGYRASAKKAQICQKQVKYLGYLLKEGQRWLTEARKETVMGQPTPKTPRQLREFLGKAGFCRLFIPGFAEMAAPLYPLTKPGTLFNWGPDQQKAYQEIKQALLTAPALGLPDLTKPFELFVDEKQGYAKGVLTQKLGPWRRPVAYLSKKLDPVAAGWPPCLRMVAAIAVLTKDAGKLTMGQPLVILAPHAVEALVKQPPDRWLSNARMTHYQALLLDTDRVQFGPVVALNPATLLPLPEEGLQHNCLDILAEAHGTRPDLTDQPLPDADHTWYTDGSSLLQEGQRKAGAAVTTETEVIWAKALPAGTSAQRAELIALTQALKMAEGKKLNVYTDSRYAFATAHIHGEIYRRRGWLTSEGKEIKNKDEILALLKALFLPKRLSIIHCPGHQKGHSAEARGNRMADQAARKAAITETPDTSTLLAGKRTADGSEFEKRTADGSEFESPKKKAKVE

SEQ ID NO: 3130 - protein, 2094 aa, synthetic construct; identical to SEQ ID NO: 2801

SEQ ID NO: 3131 - protein, 2096 aa, synthetic construct
MPAAKRVKLDGGDKKYSIGLDIGTNSVGWAVITDEYKVPSKKFKVLGNTDRHSIKKNLIGALLFDSGETAEATRLKRTARRRYTRRKNRICYLQEIFSNEMAKVDDSFFHRLEESFLVEEDKKHERHPIFGNIVDEVAYHEKYPTIYHLRKKLVDSTDKADLRLIYLALAHMIKFRGHFLIEGDLNPDNSDVDKLFIQLVQTYNQLFEENPINASGVDAKAILSARLSKSRRLENLIAQLPGEKKNGLFGNLIALSLGLTPNFKSNFDLAEDAKLQLSKDTYDDDLDNLLAQIGDQYADLFLAAKNLSDAILLSDILRVNTEITKAPLSASMIKRYDEHHQDLTLLKALVRQQLPEKYKEIFFDQSKNGYAGYIDGGASQEEFYKFIKPILEKMDGTEELLVKLNREDLLRKQRTFDNGSIPHQIHLGELHAILRRQEDFYPFLKDNREKIEKILTFRIPYYVGPLARGNSRFAWMTRKSEETITPWNFEEVVDKGASAQSFIERMTNFDKNLPNEKVLPKHSLLYEYFTVYNELTKVKYVTEGMRKPAFLSGEQKKAIVDLLFKTNRKVTVKQLKEDYFKKIECFDSVEISGVEDRFNASLGTYHDLLKIIKDKDFLDNEENEDILEDIVLTLTLFEDREMIEERLKTYAHLFDDKVMKQLKRRRYTGWGRLSRKLINGIRDKQSGKTILDFLKSDGFANRNFMQLIHDDSLTFKEDIQKAQVSGQGDSLHEHIANLAGSPAIKKGILQTVKVVDELVKVMGRHKPENIVIEMARENQTTQKGQKNSRERMKRIEEGIKELGSQILKEHPVENTQLQNEKLYLYYLQNGRDMYVDQELDINRLSDYDVDHIVPQSFLKDDSIDNKVLTRSDKARGKSDNVPSEEVVKKMKNYWRQLLNAKLITQRKFDNLTKAERGGLSELDKAGFIKRQLVETRQITKHVAQILDSRMNTKYDENDKLIREVKVITLKSKLVSDFRKDFQFYKVREINNYHHAHDAYLNAVVGTALIKKYPKLESEFVYGDYKVYDVRKMIAKSEQEIGKATAKYFFYSNIMNFFKTEITLANGEIRKRPLIETNGETGEIVWDKGRDFATVRKVLSMPQVNIVKKTEVQTGGFSKESILPKRNSDKLIARKKDWDPKKYGGFDSPTVAYSVLVVAKVEKGKSKKLKSVKELLGITIMERSSFEKNPIDFLEAKGYKEVKKDLIIKLPKYSLFELENGRKRMLASAGELQKGNELALPSKYVNFLYLASHYEKLKGSPEDNEQKQLFVEQHKHYLDEIIEQISEFSKRVILADANLDKVLSAYNKHRDKPIREQAENIIHLFTLTNLGAPAAFKYFDTTIDRKRYTSTKEVLDATLIHQSITGLYETRIDLSQLGGDGGGSSEAAAKGGSGGTLNIEDEHRLHETSKEPDVSLGSTWLSDFPQAWAETGGMGLAVRQAPLIIPLKATSTPVSIKQYPMSQEARLGIKPHIQRLLDQGILVPCQSPWNTPLLPVKKPGTNDYRPVQDLREVNKRVEDIHPTVPNPYNLLSGLPPSHQWYTVLDLKDAFFCLRLHPTSQPLFAFEWRDPEMGISGQLTWTRLPQGFKNSPTLFNEALHRDLADFRIQHPDLILLQYVDDLLLAATSELDCQQGTRALLQTLGNLGYRASAKKAQICQKQVKYLGYLLKEGQRWLTEARKETVMGQPTPKTPRQLREFLGKAGFCRLFIPGFAEMAAPLYPLTKPGTLFNWGPDQQKAYQEIKQALLTAPALGLPDLTKPFELFVDEKQGYAKGVLTQKLGPWRRPVAYLSKKLDPVAAGWPPCLRMVAAIAVLTKDAGKLTMGQPLVILAPHAVEALVKQPPDRWLSNARMTHYQALLLDTDRVQFGPVVALNPATLLPLPEEGLQHNCLDILAEAHGTRPDLTDQPLPDADHTWYTDGSSLLQEGQRKAGAAVTTETEVIWAKALPAGTSAQRAELIALTQALKMAEGKKLNVYTDSRYAFATAHIHGEIYRRRGWLTSEGKEIKNKDEILALLKALFLPKRLSIIHCPGHQKGHSAEARGNRMADQAARKAAITETPDTSTLLAGKRTADGSEFEKRTADGSEFESPKKKAKVE

SEQ ID NO: 3132 - protein, 2118 aa, synthetic construct
MPAAKRVKLDGGDKKYSIGLDIGTNSVGWAVITDEYKVPSKKFKVLGNTDRHSIKKNLIGALLFDSGETAEATRLKRTARRRYTRRKNRICYLQEIFSNEMAKVDDSFFHRLEESFLVEEDKKHERHPIFGNIVDEVAYHEKYPTIYHLRKKLVDSTDKADLRLIYLALAHMIKFRGHFLIEGDLNPDNSDVDKLFIQLVQTYNQLFEENPINASGVDAKAILSARLSKSRRLENLIAQLPGEKKNGLFGNLIALSLGLTPNFKSNFDLAEDAKLQLSKDTYDDDLDNLLAQIGDQYADLFLAAKNLSDAILLSDILRVNTEITKAPLSASMIKRYDEHHQDLTLLKALVRQQLPEKYKEIFFDQSKNGYAGYIDGGASQEEFYKFIKPILEKMDGTEELLVKLNREDLLRKQRTFDNGSIPHQIHLGELHAILRRQEDFYPFLKDNREKIEKILTFRIPYYVGPLARGNSRFAWMTRKSEETITPWNFEEVVDKGASAQSFIERMTNFDKNLPNEKVLPKHSLLYEYFTVYNELTKVKYVTEGMRKPAFLSGEQKKAIVDLLFKTNRKVTVKQLKEDYFKKIECFDSVEISGVEDRFNASLGTYHDLLKIIKDKDFLDNEENEDILEDIVLTLTLFEDREMIEERLKTYAHLFDDKVMKQLKRRRYTGWGRLSRKLINGIRDKQSGKTILDFLKSDGFANRNFMQLIHDDSLTFKEDIQKAQVSGQGDSLHEHIANLAGSPAIKKGILQTVKVVDELVKVMGRHKPENIVIEMARENQTTQKGQKNSRERMKRIEEGIKELGSQILKEHPVENTQLQNEKLYLYYLQNGRDMYVDQELDINRLSDYDVDHIVPQSFLKDDSIDNKVLTRSDKARGKSDNVPSEEVVKKMKNYWRQLLNAKLITQRKFDNLTKAERGGLSELDKAGFIKRQLVETRQITKHVAQILDSRMNTKYDENDKLIREVKVITLKSKLVSDFRKDFQFYKVREINNYHHAHDAYLNAVVGTALIKKYPKLESEFVYGDYKVYDVRKMIAKSEQEIGKATAKYFFYSNIMNFFKTEITLANGEIRKRPLIETNGETGEIVWDKGRDFATVRKVLSMPQVNIVKKTEVQTGGFSKESILPKRNSDKLIARKKDWDPKKYGGFDSPTVAYSVLVVAKVEKGKSKKLKSVKELLGITIMERSSFEKNPIDFLEAKGYKEVKKDLIIKLPKYSLFELENGRKRMLASAGELQKGNELALPSKYVNFLYLASHYEKLKGSPEDNEQKQLFVEQHKHYLDEIIEQISEFSKRVILADANLDKVLSAYNKHRDKPIREQAENIIHLFTLTNLGAPAAFKYFDTTIDRKRYTSTKEVLDATLIHQSITGLYETRIDLSQLGGDGGSGGSSGGSSGSETPGTSESATPESSGGSSGGSSGGTLNIEDEHRLHETSKEPDVSLGSTWLSDFPQAWAETGGMGLAVRQAPLIIPLKATSTPVSIKQYPMSQEARLGIKPHIQRLLDQGILVPCQSPWNTPLLPVKKPGTNDYRPVQDLREVNKRVEDIHPTVPNPYNLLSGLPPSHQWYTVLDLKDAFFCLRLHPTSQPLFAFEWRDPEMGISGQLTWTRLPQGFKNSPTLFNEALHRDLADFRIQHPDLILLQYVDDLLLAATSELDCQQGTRALLQTLGNLGYRASAKKAQICQKQVKYLGYLLKEGQRWLTEARKETVMGQPTPKTPRQLREFLGKAGFCRLFIPGFAEMAAPLYPLTKPGTLFNWGPDQQKAYQEIKQALLTAPALGLPDLTKPFELFVDEKQGYAKGVLTQKLGPWRRPVAYLSKKLDPVAAGWPPCLRMVAAIAVLTKDAGKLTMGQPLVILAPHAVEALVKQPPDRWLSNARMTHYQALLLDTDRVQFGPVVALNPATLLPLPEEGLQHNCLDILAEAHGTRPDLTDQPLPDADHTWYTDGSSLLQEGQRKAGAAVTTETEVIWAKALPAGTSAQRAELIALTQALKMAEGKKLNVYTDSRYAFATAHIHGEIYRRRGWLTSEGKEIKNKDEILALLKALFLPKRLSIIHCPGHQKGHSAEARGNRMADQAARKAAITETPDTSTLLAGKRTADGSEFEKRTADGSEFESPKKKAKVE

SEQ ID NO: 3133 - protein, 2094 aa, synthetic construct; identical to SEQ ID NO: 2859

SEQ ID NO: 3134 - protein, 2094 aa, synthetic construct; identical to SEQ ID NO: 2854

SEQ ID NO: 3135 - protein, 2091 aa, synthetic construct; identical to SEQ ID NO: 2832

SEQ ID NO: 3136 - protein, 2096 aa, synthetic construct
MPAAKRVKLDGGDKKYSIGLDIGTNSVGWAVITDEYKVPSKKFKVLGNTDRHSIKKNLIGALLFDSGETAEATRLKRTARRRYTRRKNRICYLQEIFSNEMAKVDDSFFHRLEESFLVEEDKKHERHPIFGNIVDEVAYHEKYPTIYHLRKKLVDSTDKADLRLIYLALAHMIKFRGHFLIEGDLNPDNSDVDKLFIQLVQTYNQLFEENPINASGVDAKAILSARLSKSRRLENLIAQLPGEKKNGLFGNLIALSLGLTPNFKSNFDLAEDAKLQLSKDTYDDDLDNLLAQIGDQYADLFLAAKNLSDAILLSDILRVNTEITKAPLSASMIKRYDEHHQDLTLLKALVRQQLPEKYKEIFFDQSKNGYAGYIDGGASQEEFYKFIKPILEKMDGTEELLVKLNREDLLRKQRTFDNGSIPHQIHLGELHAILRRQEDFYPFLKDNREKIEKILTFRIPYYVGPLARGNSRFAWMTRKSEETITPWNFEEVVDKGASAQSFIERMTNFDKNLPNEKVLPKHSLLYEYFTVYNELTKVKYVTEGMRKPAFLSGEQKKAIVDLLFKTNRKVTVKQLKEDYFKKIECFDSVEISGVEDRFNASLGTYHDLLKIIKDKDFLDNEENEDILEDIVLTLTLFEDREMIEERLKTYAHLFDDKVMKQLKRRRYTGWGRLSRKLINGIRDKQSGKTILDFLKSDGFANRNFMQLIHDDSLTFKEDIQKAQVSGQGDSLHEHIANLAGSPAIKKGILQTVKVVDELVKVMGRHKPENIVIEMARENQTTQKGQKNSRERMKRIEEGIKELGSQILKEHPVENTQLQNEKLYLYYLQNGRDMYVDQELDINRLSDYDVDHIVPQSFLKDDSIDNKVLTRSDKARGKSDNVPSEEVVKKMKNYWRQLLNAKLITQRKFDNLTKAERGGLSELDKAGFIKRQLVETRQITKHVAQILDSRMNTKYDENDKLIREVKVITLKSKLVSDFRKDFQFYKVREINNYHHAHDAYLNAVVGTALIKKYPKLESEFVYGDYKVYDVRKMIAKSEQEIGKATAKYFFYSNIMNFFKTEITLANGEIRKRPLIETNGETGEIVWDKGRDFATVRKVLSMPQVNIVKKTEVQTGGFSKESILPKRNSDKLIARKKDWDPKKYGGFDSPTVAYSVLVVAKVEKGKSKKLKSVKELLGITIMERSSFEKNPIDFLEAKGYKEVKKDLIIKLPKYSLFELENGRKRMLASAGELQKGNELALPSKYVNFLYLASHYEKLKGSPEDNEQKQLFVEQHKHYLDEIIEQISEFSKRVILADANLDKVLSAYNKHRDKPIREQAENIIHLFTLTNLGAPAAFKYFDTTIDRKRYTSTKEVLDATLIHQSITGLYETRIDLSQLGGDGGGGGPAPEAAAKGGTLNIEDEHRLHETSKEPDVSLGSTWLSDFPQAWAETGGMGLAVRQAPLIIPLKATSTPVSIKQYPMSQEARLGIKPHIQRLLDQGILVPCQSPWNTPLLPVKKPGTNDYRPVQDLREVNKRVEDIHPTVPNPYNLLSGLPPSHQWYTVLDLKDAFFCLRLHPTSQPLFAFEWRDPEMGISGQLTWTRLPQGFKNSPTLFNEALHRDLADFRIQHPDLILLQYVDDLLLAATSELDCQQGTRALLQTLGNLGYRASAKKAQICQKQVKYLGYLLKEGQRWLTEARKETVMGQPTPKTPRQLREFLGKAGFCRLFIPGFAEMAAPLYPLTKPGTLFNWGPDQQKAYQEIKQALLTAPALGLPDLTKPFELFVDEKQGYAKGVLTQKLGPWRRPVAYLSKKLDPVAAGWPPCLRMVAAIAVLTKDAGKLTMGQPLVILAPHAVEALVKQPPDRWLSNARMTHYQALLLDTDRVQFGPVVALNPATLLPLPEEGLQHNCLDILAEAHGTRPDLTDQPLPDADHTWYTDGSSLLQEGQRKAGAAVTTETEVIWAKALPAGTSAQRAELIALTQALKMAEGKKLNVYTDSRYAFATAHIHGEIYRRRGWLTSEGKEIKNKDEILALLKALFLPKRLSIIHCPGHQKGHSAEARGNRMADQAARKAAITETPDTSTLLAGKRTADGSEFEKRTADGSEFESPKKKAKVE

SEQ ID NO: 3137 - protein, 2091 aa, synthetic construct
MPAAKRVKLDGGDKKYSIGLDIGTNSVGWAVITDEYKVPSKKFKVLGNTDRHSIKKNLIGALLFDSGETAEATRLKRTARRRYTRRKNRICYLQEIFSNEMAKVDDSFFHRLEESFLVEEDKKHERHPIFGNIVDEVAYHEKYPTIYHLRKKLVDSTDKADLRLIYLALAHMIKFRGHFLIEGDLNPDNSDVDKLFIQLVQTYNQLFEENPINASGVDAKAILSARLSKSRRLENLIAQLPGEKKNGLFGNLIALSLGLTPNFKSNFDLAEDAKLQLSKDTYDDDLDNLLAQIGDQYADLFLAAKNLSDAILLSDILRVNTEITKAPLSASMIKRYDEHHQDLTLLKALVRQQLPEKYKEIFFDQSKNGYAGYIDGGASQEEFYKFIKPILEKMDGTEELLVKLNREDLLRKQRTFDNGSIPHQIHLGELHAILRRQEDFYPFLKDNREKIEKILTFRIPYYVGPLARGNSRFAWMTRKSEETITPWNFEEVVDKGASAQSFIERMTNFDKNLPNEKVLPKHSLLYEYFTVYNELTKVKYVTEGMRKPAFLSGEQKKAIVDLLFKTNRKVTVKQLKEDYFKKIECFDSVEISGVEDRFNASLGTYHDLLKIIKDKDFLDNEENEDILEDIVLTLTLFEDREMIEERLKTYAHLFDDKVMKQLKRRRYTGWGRLSRKLINGIRDKQSGKTILDFLKSDGFANRNFMQLIHDDSLTFKEDIQKAQVSGQGDSLHEHIANLAGSPAIKKGILQTVKVVDELVKVMGRHKPENIVIEMARENQTTQKGQKNSRERMKRIEEGIKELGSQILKEHPVENTQLQNEKLYLYYLQNGRDMYVDQELDINRLSDYDVDHIVPQSFLKDDSIDNKVLTRSDKARGKSDNVPSEEVVKKMKNYWRQLLNAKLITQRKFDNLTKAERGGLSELDKAGFIKRQLVETRQITKHVAQILDSRMNTKYDENDKLIREVKVITLKSKLVSDFRKDFQFYKVREINNYHHAHDAYLNAVVGTALIKKYPKLESEFVYGDYKVYDVRKMIAKSEQEIGKATAKYFFYSNIMNFFKTEITLANGEIRKRPLIETNGETGEIVWDKGRDFATVRKVLSMPQVNIVKKTEVQTGGFSKESILPKRNSDKLIARKKDWDPKKYGGFDSPTVAYSVLVVAKVEKGKSKKLKSVKELLGITIMERSSFEKNPIDFLEAKGYKEVKKDLIIKLPKYSLFELENGRKRMLASAGELQKGNELALPSKYVNFLYLASHYEKLKGSPEDNEQKQLFVEQHKHYLDEIIEQISEFSKRVILADANLDKVLSAYNKHRDKPIREQAENIIHLFTLTNLGAPAAFKYFDTTIDRKRYTSTKEVLDATLIHQSITGLYETRIDLSQLGGDGGPAPGGGGGTLNIEDEYRLHEISTEPDVSPGSTWLSDFPQAWAETGGMGLAVRQAPLIIPLKATSTPVSIKQYPMSQEAKLGIKPHIQRLLDQGILVPCQSPWNTPLLPVKKPGTNDYRPVQGLREVNKRVEDIHPTVPNPYNLLSGLPTSHRWYTVLDLKDAFFCLRLHPTSQPLFASEWRDPGMGISGQLTWTRLPQGFKNSPTLFDEALHRGLADFRIQHPDLILLQYVDDLLLAATSELDCQQGTRALLKTLGNLGYRASAKKAQICQKQVKYLGYLLREGQRWLTEARKETVMGQPTPKTPRQLREFLGTAGFCRLWIPRFAEMAAPLYPLTKTGTLFNWGPDQQKAYHEIKQALLTAPALGLPDLTKPFELFVDEKQGYAKGVLTQKLGPWRRPVAYLSKKLDPVAAGWPPCLRMVAAIAVLTKDAGKLTMGQPLVILAPHAVEALVKQPPDRWLSNARMTHYQAMLLDTDRVQFGPVVALNPATLLPLPEEGAPHDCLEILAETHGTEPDLTDQPIPDADHTWYTDGSSFLQEGQRKAGAAVTTETEVIWARALPAGTSAQRAELIALTQALKMAEGKRLNVYTDSRYAFATAHIHGEIYKRRGLLTSEGREIKNKSEILALLKALFLPKRLSIIHCLGHQKGDSAEARGNRLADQAAREAAIKTPPDTSTLLAGKRTADGSEFEKRTADGSEFESPKKKAKVE

SEQ ID NO: 3138 - protein, 2088 aa, synthetic construct
MPAAKRVKLDGGDKKYSIGLDIGTNSVGWAVITDEYKVPSKKFKVLGNTDRHSIKKNLIGALLFDSGETAEATRLKRTARRRYTRRKNRICYLQEIFSNEMAKVDDSFFHRLEESFLVEEDKKHERHPIFGNIVDEVAYHEKYPTIYHLRKKLVDSTDKADLRLIYLALAHMIKFRGHFLIEGDLNPDNSDVDKLFIQLVQTYNQLFEENPINASGVDAKAILSARLSKSRRLENLIAQLPGEKKNGLFGNLIALSLGLTPNFKSNFDLAEDAKLQLSKDTYDDDLDNLLAQIGDQYADLFLAAKNLSDAILLSDILRVNTEITKAPLSASMIKRYDEHHQDLTLLKALVRQQLPEKYKEIFFDQSKNGYAGYIDGGASQEEFYKFIKPILEKMDGTEELLVKLNREDLLRKQRTFDNGSIPHQIHLGELHAILRRQEDFYPFLKDNREKIEKILTFRIPYYVGPLARGNSRFAWMTRKSEETITPWNFEEVVDKGASAQSFIERMTNFDKNLPNEKVLPKHSLLYEYFTVYNELTKVKYVTEGMRKPAFLSGEQKKAIVDLLFKTNRKVTVKQLKEDYFKKIECFDSVEISGVEDRFNASLGTYHDLLKIIKDKDFLDNEENEDILEDIVLTLTLFEDREMIEERLKTYAHLFDDKVMKQLKRRRYTGWGRLSRKLINGIRDKQSGKTILDFLKSDGFANRNFMQLIHDDSLTFKEDIQKAQVSGQGDSLHEHIANLAGSPAIKKGILQTVKVVDELVKVMGRHKPENIVIEMARENQTTQKGQKNSRERMKRIEEGIKELGSQILKEHPVENTQLQNEKLYLYYLQNGRDMYVDQELDINRLSDYDVDHIVPQSFLKDDSIDNKVLTRSDKARGKSDNVPSEEVVKKMKNYWRQLLNAKLITQRKFDNLTKAERGGLSELDKAGFIKRQLVETRQITKHVAQILDSRMNTKYDENDKLIREVKVITLKSKLVSDFRKDFQFYKVREINNYHHAHDAYLNAVVGTALIKKYPKLESEFVYGDYKVYDVRKMIAKSEQEIGKATAKYFFYSNIMNFFKTEITLANGEIRKRPLIETNGETGEIVWDKGRDFATVRKVLSMPQVNIVKKTEVQTGGFSKESILPKRNSDKLIARKKDWDPKKYGGFDSPTVAYSVLVVAKVEKGKSKKLKSVKELLGITIMERSSFEKNPIDFLEAKGYKEVKKDLIIKLPKYSLFELENGRKRMLASAGELQKGNELALPSKYVNFLYLASHYEKLKGSPEDNEQKQLFVEQHKHYLDEIIEQISEFSKRVILADANLDKVLSAYNKHRDKPIREQAENIIHLFTLTNLGAPAAFKYFDTTIDRKRYTSTKEVLDATLIHQSITGLYETRIDLSQLGGDGGGGSGGTLNIEDEYRLHEISTEPDVSPGSTWLSDFPQAWAETGGMGLAVRQAPLIIPLKATSTPVSIKQYPMSQEAKLGIKPHIQRLLDQGILVPCQSPWNTPLLPVKKPGTNDYRPVQGLREVNKRVEDIHPTVPNPYNLLSGLPTSHRWYTVLDLKDAFFCLRLHPTSQPLFASEWRDPGMGISGQLTWTRLPQGFKNSPTLFNEALHRGLADFRIQHPDLILLQYVDDLLLAATSELDCQQGTRALLKTLGNLGYRASAKKAQICQKQVKYLGYLLREGQRWLTEARKETVMGQPTPKTPRQLREFLGTAGFCRLWIPRFAEMAAPLYPLTKPGTLFNWGPDQQKAYHEIKQALLTAPALGLPDLTKPFELFVDEKQGYAKGVLTQKLGPWRRPVAYLSKKLDPVAAGWPPCLRMVAAIAVLTKDAGKLTMGQPLVILAPHAVEALVKQPPDRWLSNARMTHYQAMLLDTDRVQFGPVVALNPATLLPLPEEGAPHDCLEILAETHGTEPDLTDQPIPDADHTWYTDGSSFLQEGQRKAGAAVTTETEVIWARALPAGTSAQRAELIALTQALKMAEGKRLNVYTDSRYAFATAHIHGEIYKRRGWLTSEGREIKNKSEILALLKALFLPKRLSIIHCLGHQKGDSAEARGNRLADQAAREAAIKTPPDTSTLLAGKRTADGSEFEKRTADGSEFESPKKKAKVE

SEQ ID NO: 3139 - protein, 2091 aa, synthetic construct
MPAAKRVKLDGGDKKYSIGLDIGTNSVGWAVITDEYKVPSKKFKVLGNTDRHSIKKNLIGALLFDSGETAEATRLKRTARRRYTRRKNRICYLQEIFSNEMAKVDDSFFHRLEESFLVEEDKKHERHPIFGNIVDEVAYHEKYPTIYHLRKKLVDSTDKADLRLIYLALAHMIKFRGHFLIEGDLNPDNSDVDKLFIQLVQTYNQLFEENPINASGVDAKAILSARLSKSRRLENLIAQLPGEKKNGLFGNLIALSLGLTPNFKSNFDLAEDAKLQLSKDTYDDDLDNLLAQIGDQYADLFLAAKNLSDAILLSDILRVNTEITKAPLSASMIKRYDEHHQDLTLLKALVRQQLPEKYKEIFFDQSKNGYAGYIDGGASQEEFYKFIKPILEKMDGTEELLVKLNREDLLRKQRTFDNGSIPHQIHLGELHAILRRQEDFYPFLKDNREKIEKILTFRIPYYVGPLARGNSRFAWMTRKSEETITPWNFEEVVDKGASAQSFIERMTNFDKNLPNEKVLPKHSLLYEYFTVYNELTKVKYVTEGMRKPAFLSGEQKKAIVDLLFKTNRKVTVKQLKEDYFKKIECFDSVEISGVEDRFNASLGTYHDLLKIIKDKDFLDNEENEDILEDIVLTLTLFEDREMIEERLKTYAHLFDDKVMKQLKRRRYTGWGRLSRKLINGIRDKQSGKTILDFLKSDGFANRNFMQLIHDDSLTFKEDIQKAQVSGQGDSLHEHIANLAGSPAIKKGILQTVKVVDELVKVMGRHKPENIVIEMARENQTTQKGQKNSRERMKRIEEGIKELGSQILKEHPVENTQLQNEKLYLYYLQNGRDMYVDQELDINRLSDYDVDHIVPQSFLKDDSIDNKVLTRSDKARGKSDNVPSEEVVKKMKNYWRQLLNAKLITQRKFDNLTKAERGGLSELDKAGFIKRQLVETRQITKHVAQILDSRMNTKYDENDKLIREVKVITLKSKLVSDFRKDFQFYKVREINNYHHAHDAYLNAVVGTALIKKYPKLESEFVYGDYKVYDVRKMIAKSEQEIGKATAKYFFYSNIMNFFKTEITLANGEIRKRPLIETNGETGEIVWDKGRDFATVRKVLSMPQVNIVKKTEVQTGGFSKESILPKRNSDKLIARKKDWDPKKYGGFDSPTVAYSVLVVAKVEKGKSKKLKSVKELLGITIMERSSFEKNPIDFLEAKGYKEVKKDLIIKLPKYSLFELENGRKRMLASAGELQKGNELALPSKYVNFLYLASHYEKLKGSPEDNEQKQLFVEQHKHYLDEIIEQISEFSKRVILADANLDKVLSAYNKHRDKPIREQAENIIHLFTLTNLGAPAAFKYFDTTIDRKRYTSTKEVLDATLIHQSITGLYETRIDLSQLGGDGGPAPGGSGGTLNIEDEYRLHEISTEPDVSPGSTWLSDFPQAWAETGGMGLAVRQAPLIIPLKATSTPVSIKQYPMSQEAKLGIKPHIQRLLDQGILVPCQSPWNTPLLPVKKPGTNDYRPVQGLREVNKRVEDIHPTVPNPYNLLSGLPTSHRWYTVLDLKDAFFCLRLHPTSQPLFASEWRDPGMGISGQLTWTRLPQGFKNSPTLFNEALHRGLADFRIQHPDLILLQYVDDLLLAATSELDCQQGTRALLKTLGNLGYRASAKKAQICQKQVKYLGYLLREGQRWLTEARKETVMGQPTPKTPRQLREFLGTAGFCRLWIPRFAEMAAPLYPLTKPGTLFNWGPDQQKAYHEIKQALLTAPALGLPDLTKPFELFVDEKQGYAKGVLTQKLGPWRRPVAYLSKKLDPVAAGWPPCLRMVAAIAVLTKDAGKLTMGQPLVILAPHAVEALVKQPPDRWLSNARMTHYQAMLLDTDRVQFGPVVALNPATLLPLPEEGAPHDCLEILAETHGTEPDLTDQPIPDADHTWYTDGSSFLQEGQRKAGAAVTTETEVIWARALPAGTSAQRAELIALTQALKMAEGKRLNVYTDSRYAFATAHIHGEIYKRRGWLTSEGREIKNKSEILALLKALFLPKRLSIIHCLGHQKGDSAEARGNRLADQAAREAAIKTPPDTSTLLAGKRTADGSEFEKRTADGSEFESPKKKAKVE

SEQ ID NO: 3140 - protein, 2105 aa, synthetic construct
MPAAKRVKLDGGDKKYSIGLDIGTNSVGWAVITDEYKVPSKKFKVLGNTDRHSIKKNLIGALLFDSGETAEATRLKRTARRRYTRRKNRICYLQEIFSNEMAKVDDSFFHRLEESFLVEEDKKHERHPIFGNIVDEVAYHEKYPTIYHLRKKLVDSTDKADLRLIYLALAHMIKFRGHFLIEGDLNPDNSDVDKLFIQLVQTYNQLFEENPINASGVDAKAILSARLSKSRRLENLIAQLPGEKKNGLFGNLIALSLGLTPNFKSNFDLAEDAKLQLSKDTYDDDLDNLLAQIGDQYADLFLAAKNLSDAILLSDILRVNTEITKAPLSASMIKRYDEHHQDLTLLKALVRQQLPEKYKEIFFDQSKNGYAGYIDGGASQEEFYKFIKPILEKMDGTEELLVKLNREDLLRKQRTFDNGSIPHQIHLGELHAILRRQEDFYPFLKDNREKIEKILTFRIPYYVGPLARGNSRFAWMTRKSEETITPWNFEEVVDKGASAQSFIERMTNFDKNLPNEKVLPKHSLLYEYFTVYNELTKVKYVTEGMRKPAFLSGEQKKAIVDLLFKTNRKVTVKQLKEDYFKKIECFDSVEISGVEDRFNASLGTYHDLLKIIKDKDFLDNEENEDILEDIVLTLTLFEDREMIEERLKTYAHLFDDKVMKQLKRRRYTGWGRLSRKLINGIRDKQSGKTILDFLKSDGFANRNFMQLIHDDSLTFKEDIQKAQVSGQGDSLHEHIANLAGSPAIKKGILQTVKVVDELVKVMGRHKPENIVIEMARENQTTQKGQKNSRERMKRIEEGIKELGSQILKEHPVENTQLQNEKLYLYYLQNGRDMYVDQELDINRLSDYDVDHIVPQSFLKDDSIDNKVLTRSDKARGKSDNVPSEEVVKKMKNYWRQLLNAKLITQRKFDNLTKAERGGLSELDKAGFIKRQLVETRQITKHVAQILDSRMNTKYDENDKLIREVKVITLKSKLVSDFRKDFQFYKVREINNYHHAHDAYLNAVVGTALIKKYPKLESEFVYGDYKVYDVRKMIAKSEQEIGKATAKYFFYSNIMNFFKTEITLANGEIRKRPLIETNGETGEIVWDKGRDFATVRKVLSMPQVNIVKKTEVQTGGFSKESILPKRNSDKLIARKKDWDPKKYGGFDSPTVAYSVLVVAKVEKGKSKKLKSVKELLGITIMERSSFEKNPIDFLEAKGYKEVKKDLIIKLPKYSLFELENGRKRMLASAGELQKGNELALPSKYVNFLYLASHYEKLKGSPEDNEQKQLFVEQHKHYLDEIIEQISEFSKRVILADANLDKVLSAYNKHRDKPIREQAENIIHLFTLTNLGAPAAFKYFDTTIDRKRYTSTKEVLDATLIHQSITGLYETRIDLSQLGGDGGEAAAKEAAAKEAAAKEAAAKGGTLNIEDEYRLHEISTEPDVSPGSTWLSDFPQAWAETGGMGLAVRQAPLIIPLKATSTPVSIKQYPMSQEAKLGIKPHIQRLLDQGILVPCQSPWNTPLLPVKKPGTNDYRPVQGLREVNKRVEDIHPTVPNPYNLLSGLPTSHRWYTVLDLKDAFFCLRLHPTSQPLFASEWRDPGMGISGQLTWTRLPQGFKNSPTLFNEALHRGLADFRIQHPDLILLQYVDDLLLAATSELDCQQGTRALLKTLGNLGYRASAKKAQICQKQVKYLGYLLREGQRWLTEARKETVMGQPTPKTPRQLREFLGTAGFCRLWIPRFAEMAAPLYPLTKPGTLFNWGPDQQKAYHEIKQALLTAPALGLPDLTKPFELFVDEKQGYAKGVLTQKLGPWRRPVAYLSKKLDPVAAGWPPCLRMVAAIAVLTKDAGKLTMGQPLVILAPHAVEALVKQPPDRWLSNARMTHYQAMLLDTDRVQFGPVVALNPATLLPLPEEGAPHDCLEILAETHGTEPDLTDQPIPDADHTWYTDGSSFLQEGQRKAGAAVTTETEVIWARALPAGTSAQRAELIALTQALKMAEGKRLNVYTDSRYAFATAHIHGEIYKRRGWLTSEGREIKNKSEILALLKALFLPKRLSIIHCLGHQKGDSAEARGNRLADQAAREAAIKTPPDTSTLLAGKRTADGSEFEKRTADGSEFESPKKKAKVE

SEQ ID NO: 3141 - protein, 2151 aa, synthetic construct
MPAAKRVKLDGGDKKYSIGLDIGTNSVGWAVITDEYKVPSKKFKVLGNTDRHSIKKNLIGALLFDSGETAEATRLKRTARRRYTRRKNRICYLQEIFSNEMAKVDDSFFHRLEESFLVEEDKKHERHPIFGNIVDEVAYHEKYPTIYHLRKKLVDSTDKADLRLIYLALAHMIKFRGHFLIEGDLNPDNSDVDKLFIQLVQTYNQLFEENPINASGVDAKAILSARLSKSRRLENLIAQLPGEKKNGLFGNLIALSLGLTPNFKSNFDLAEDAKLQLSKDTYDDDLDNLLAQIGDQYADLFLAAKNLSDAILLSDILRVNTEITKAPLSASMIKRYDEHHQDLTLLKALVRQQLPEKYKEIFFDQSKNGYAGYIDGGASQEEFYKFIKPILEKMDGTEELLVKLNREDLLRKQRTFDNGSIPHQIHLGELHAILRRQEDFYPFLKDNREKIEKILTFRIPYYVGPLARGNSRFAWMTRKSEETITPWNFEEVVDKGASAQSFIERMTNFDKNLPNEKVLPKHSLLYEYFTVYNELTKVKYVTEGMRKPAFLSGEQKKAIVDLLFKTNRKVTVKQLKEDYFKKIECFDSVEISGVEDRFNASLGTYHDLLKIIKDKDFLDNEENEDILEDIVLTLTLFEDREMIEERLKTYAHLFDDKVMKQLKRRRYTGWGRLSRKLINGIRDKQSGKTILDFLKSDGFANRNFMQLIHDDSLTFKEDIQKAQVSGQGDSLHEHIANLAGSPAIKKGILQTVKVVDELVKVMGRHKPENIVIEMARENQTTQKGQKNSRERMKRIEEGIKELGSQILKEHPVENTQLQNEKLYLYYLQNGRDMYVDQELDINRLSDYDVDHIVPQSFLKDDSIDNKVLTRSDKARGKSDNVPSEEVVKKMKNYWRQLLNAKLITQRKFDNLTKAERGGLSELDKAGFIKRQLVETRQITKHVAQILDSRMNTKYDENDKLIREVKVITLKSKLVSDFRKDFQFYKVREINNYHHAHDAYLNAVVGTALIKKYPKLESEFVYGDYKVYDVRKMIAKSEQEIGKATAKYFFYSNIMNFFKTEITLANGEIRKRPLIETNGETGEIVWDKGRDFATVRKVLSMPQVNIVKKTEVQTGGFSKESILPKRNSDKLIARKKDWDPKKYGGFDSPTVAYSVLVVAKVEKGKSKKLKSVKELLGITIMERSSFEKNPIDFLEAKGYKEVKKDLIIKLPKYSLFELENGRKRMLASAGELQKGNELALPSKYVNFLYLASHYEKLKGSPEDNEQKQLFVEQHKHYLDEIIEQISEFSKRVILADANLDKVLSAYNKHRDKPIREQAENIIHLFTLTNLGAPAAFKYFDTTIDRKRYTSTKEVLDATLIHQSITGLYETRIDLSQLGGDGGAEAAAKEAAAKEAAAKEAAAKALEAEAAAKEAAAKEAAAKEAAAKAGGVQEISDSRPMLHIYLNGRRFLGLLDTGADKTCIAGRDWPANWPIHQTESSLQGLGMACGVARSSQPLRWQHEDKSGIIHPFVIPTLPFTLWGRDIMKDIKVRLMTDSPDDSQDLMIGAIESNLFADQISWKSDQPVWLNQWPLKQEKLQALQQLVTEQLQLGHLEESNSPWNTPVFVIKKKSGKWRLLQDLRAVNATMHDMGALQPGLPSPVAVPKGWEIIIIDLQDCFFNIKLHPEDCKRFAFSVPSPNFKRPYQRFQWKVLPQGMKNSPTLCQKFVDKAILTVRDKYQDSYIVHYMDDILLAHPSRSIVDEILTSMIQALNKHGLVVSTEKIQKYDNLKYLGTHIQGDSVSYQKLQIRTDKLRTLNDFQKLLGNINWIRPFLKLTTGELKPLFEILNGDSNPISTRKLTPEACKALQLMNERLSTARVKRLDLSQPWSLCILKTEYTPTACLWQDGVVEWIHLPHISPKVITPYDIFCTQLIIKGRHRSKELFSKDPDYIVVPYTKVQFDLLLQEKEDWPISLLGFLGEVHFHLPKDPLLTFTLQTAIIFPHMTSTTPLEKGIVIFTDGSANGRSVTYIQGREPIIKENTQNTAQQAEIVAVITAFEEVSQPFNLYTDSKYVTGLFPEIETATLSPRTKIYTELKHLQRLIHKRQEKFYIGHIRGHTGLPGPLAQGNAYADSLTRILTAAGKRTADGSEFEKRTADGSEFESPKKKAKVE

SEQ ID NO: 3142 - protein, 2130 aa, synthetic construct
MPAAKRVKLDGGDKKYSIGLDIGTNSVGWAVITDEYKVPSKKFKVLGNTDRHSIKKNLIGALLFDSGETAEATRLKRTARRRYTRRKNRICYLQEIFSNEMAKVDDSFFHRLEESFLVEEDKKHERHPIFGNIVDEVAYHEKYPTIYHLRKKLVDSTDKADLRLIYLALAHMIKFRGHFLIEGDLNPDNSDVDKLFIQLVQTYNQLFEENPINASGVDAKAILSARLSKSRRLENLIAQLPGEKKNGLFGNLIALSLGLTPNFKSNFDLAEDAKLQLSKDTYDDDLDNLLAQIGDQYADLFLAAKNLSDAILLSDILRVNTEITKAPLSASMIKRYDEHHQDLTLLKALVRQQLPEKYKEIFFDQSKNGYAGYIDGGASQEEFYKFIKPILEKMDGTEELLVKLNREDLLRKQRTFDNGSIPHQIHLGELHAILRRQEDFYPFLKDNREKIEKILTFRIPYYVGPLARGNSRFAWMTRKSEETITPWNFEEVVDKGASAQSFIERMTNFDKNLPNEKVLPKHSLLYEYFTVYNELTKVKYVTEGMRKPAFLSGEQKKAIVDLLFKTNRKVTVKQLKEDYFKKIECFDSVEISGVEDRFNASLGTYHDLLKIIKDKDFLDNEENEDILEDIVLTLTLFEDREMIEERLKTYAHLFDDKVMKQLKRRRYTGWGRLSRKLINGIRDKQSGKTILDFLKSDGFANRNFMQLIHDDSLTFKEDIQKAQVSGQGDSLHEHIANLAGSPAIKKGILQTVKVVDELVKVMGRHKPENIVIEMARENQTTQKGQKNSRERMKRIEEGIKELGSQILKEHPVENTQLQNEKLYLYYLQNGRDMYVDQELDINRLSDYDVDHIVPQSFLKDDSIDNKVLTRSDKARGKSDNVPSEEVVKKMKNYWRQLLNAKLITQRKFDNLTKAERGGLSELDKAGFIKRQLVETRQITKHVAQILDSRMNTKYDENDKLIREVKVITLKSKLVSDFRKDFQFYKVREINNYHHAHDAYLNAVVGTALIKKYPKLESEFVYGDYKVYDVRKMIAKSEQEIGKATAKYFFYSNIMNFFKTEITLANGEIRKRPLIETNGETGEIVWDKGRDFATVRKVLSMPQVNIVKKTEVQTGGFSKESILPKRNSDKLIARKKDWDPKKYGGFDSPTVAYSVLVVAKVEKGKSKKLKSVKELLGITIMERSSFEKNPIDFLEAKGYKEVKKDLIIKLPKYSLFELENGRKRMLASAGELQKGNELALPSKYVNFLYLASHYEKLKGSPEDNEQKQLFVEQHKHYLDEIIEQISEFSKRVILADANLDKVLSAYNKHRDKPIREQAENIIHLFTLTNLGAPAAFKYFDTTIDRKRYTSTKEVLDATLIHQSITGLYETRIDLSQLGGDGGEAAAKEAAAKEAAAKEAAAKEAAAKGGVQEISDSRPMLHIYLNGRRFLGLLDTGADKTCIAGRDWPANWPIHQTESSLQGLGMACGVARSSQPLRWQHEDKSGIIHPFVIPTLPFTLWGRDIMKDIKVRLMTDSPDDSQDLMIGAIESNLFADQISWKSDQPVWLNQWPLKQEKLQALQQLVTEQLQLGHLEESNSPWNTPVFVIKKKSGKWRLLQDLRAVNATMHDMGALQPGLPSPVAVPKGWEIIIIDLQDCFFNIKLHPEDCKRFAFSVPSPNFKRPYQRFQWKVLPQGMKNSPTLCQKFVDKAILTVRDKYQDSYIVHYMDDILLAHPSRSIVDEILTSMIQALNKHGLVVSTEKIQKYDNLKYLGTHIQGDSVSYQKLQIRTDKLRTLNDFQKLLGNINWIRPFLKLTTGELKPLFEILNGDSNPISTRKLTPEACKALQLMNERLSTARVKRLDLSQPWSLCILKTEYTPTACLWQDGVVEWIHLPHISPKVITPYDIFCTQLIIKGRHRSKELFSKDPDYIVVPYTKVQFDLLLQEKEDWPISLLGFLGEVHFHLPKDPLLTFTLQTAIIFPHMTSTTPLEKGIVIFTDGSANGRSVTYIQGREPIIKENTQNTAQQAEIVAVITAFEEVSQPFNLYTDSKYVTGLFPEIETATLSPRTKIYTELKHLQRLIHKRQEKFYIGHIRGHTGLPGPLAQGNAYADSLTRILTAAGKRTADGSEFEKRTADGSEFESPKKKAKVE

SEQ ID NO: 3143 - protein, 2138 aa, synthetic construct
MPAAKRVKLDGGDKKYSIGLDIGTNSVGWAVITDEYKVPSKKFKVLGNTDRHSIKKNLIGALLFDSGETAEATRLKRTARRRYTRRKNRICYLQEIFSNEMAKVDDSFFHRLEESFLVEEDKKHERHPIFGNIVDEVAYHEKYPTIYHLRKKLVDSTDKADLRLIYLALAHMIKFRGHFLIEGDLNPDNSDVDKLFIQLVQTYNQLFEENPINASGVDAKAILSARLSKSRRLENLIAQLPGEKKNGLFGNLIALSLGLTPNFKSNFDLAEDAKLQLSKDTYDDDLDNLLAQIGDQYADLFLAAKNLSDAILLSDILRVNTEITKAPLSASMIKRYDEHHQDLTLLKALVRQQLPEKYKEIFFDQSKNGYAGYIDGGASQEEFYKFIKPILEKMDGTEELLVKLNREDLLRKQRTFDNGSIPHQIHLGELHAILRRQEDFYPFLKDNREKIEKILTFRIPYYVGPLARGNSRFAWMTRKSEETITPWNFEEVVDKGASAQSFIERMTNFDKNLPNEKVLPKHSLLYEYFTVYNELTKVKYVTEGMRKPAFLSGEQKKAIVDLLFKTNRKVTVKQLKEDYFKKIECFDSVEISGVEDRFNASLGTYHDLLKIIKDKDFLDNEENEDILEDIVLTLTLFEDREMIEERLKTYAHLFDDKVMKQLKRRRYTGWGRLSRKLINGIRDKQSGKTILDFLKSDGFANRNFMQLIHDDSLTFKEDIQKAQVSGQGDSLHEHIANLAGSPAIKKGILQTVKVVDELVKVMGRHKPENIVIEMARENQTTQKGQKNSRERMKRIEEGIKELGSQILKEHPVENTQLQNEKLYLYYLQNGRDMYVDQELDINRLSDYDVDHIVPQSFLKDDSIDNKVLTRSDKARGKSDNVPSEEVVKKMKNYWRQLLNAKLITQRKFDNLTKAERGGLSELDKAGFIKRQLVETRQITKHVAQILDSRMNTKYDENDKLIREVKVITLKSKLVSDFRKDFQFYKVREINNYHHAHDAYLNAVVGTALIKKYPKLESEFVYGDYKVYDVRKMIAKSEQEIGKATAKYFFYSNIMNFFKTEITLANGEIRKRPLIETNGETGEIVWDKGRDFATVRKVLSMPQVNIVKKTEVQTGGFSKESILPKRNSDKLIARKKDWDPKKYGGFDSPTVAYSVLVVAKVEKGKSKKLKSVKELLGITIMERSSFEKNPIDFLEAKGYKEVKKDLIIKLPKYSLFELENGRKRMLASAGELQKGNELALPSKYVNFLYLASHYEKLKGSPEDNEQKQLFVEQHKHYLDEIIEQISEFSKRVILADANLDKVLSAYNKHRDKPIREQAENIIHLFTLTNLGAPAAFKYFDTTIDRKRYTSTKEVLDATLIHQSITGLYETRIDLSQLGGDGGSGGSSGGSSGSETPGTSESATPESSGGSSGGSSGGVQEISDSRPMLHIYLNGRRFLGLLDTGADKTCIAGRDWPANWPIHQTESSLQGLGMACGVARSSQPLRWQHEDKSGIIHPFVIPTLPFTLWGRDIMKDIKVRLMTDSPDDSQDLMIGAIESNLFADQISWKSDQPVWLNQWPLKQEKLQALQQLVTEQLQLGHLEESNSPWNTPVFVIKKKSGKWRLLQDLRAVNATMHDMGALQPGLPSPVAVPKGWEIIIIDLQDCFFNIKLHPEDCKRFAFSVPSPNFKRPYQRFQWKVLPQGMKNSPTLCQKFVDKAILTVRDKYQDSYIVHYMDDILLAHPSRSIVDEILTSMIQALNKHGLVVSTEKIQKYDNLKYLGTHIQGDSVSYQKLQIRTDKLRTLNDFQKLLGNINWIRPFLKLTTGELKPLFEILNGDSNPISTRKLTPEACKALQLMNERLSTARVKRLDLSQPWSLCILKTEYTPTACLWQDGVVEWIHLPHISPKVITPYDIFCTQLIIKGRHRSKELFSKDPDYIVVPYTKVQFDLLLQEKEDWPISLLGFLGEVHFHLPKDPLLTFTLQTAIIFPHMTSTTPLEKGIVIFTDGSANGRSVTYIQGREPIIKENTQNTAQQAEIVAVITAFEEVSQPFNLYTDSKYVTGLFPEIETATLSPRTKIYTELKHLQRLIHKRQEKFYIGHIRGHTGLPGPLAQGNAYADSLTRILTAAGKRTADGSEFEKRTADGSEFESPKKKAKVE

SEQ ID NO: 3144 - protein, 2116 aa, synthetic construct
MPAAKRVKLDGGDKKYSIGLDIGTNSVGWAVITDEYKVPSKKFKVLGNTDRHSIKKNLIGALLFDSGETAEATRLKRTARRRYTRRKNRICYLQEIFSNEMAKVDDSFFHRLEESFLVEEDKKHERHPIFGNIVDEVAYHEKYPTIYHLRKKLVDSTDKADLRLIYLALAHMIKFRGHFLIEGDLNPDNSDVDKLFIQLVQTYNQLFEENPINASGVDAKAILSARLSKSRRLENLIAQLPGEKKNGLFGNLIALSLGLTPNFKSNFDLAEDAKLQLSKDTYDDDLDNLLAQIGDQYADLFLAAKNLSDAILLSDILRVNTEITKAPLSASMIKRYDEHHQDLTLLKALVRQQLPEKYKEIFFDQSKNGYAGYIDGGASQEEFYKFIKPILEKMDGTEELLVKLNREDLLRKQRTFDNGSIPHQIHLGELHAILRRQEDFYPFLKDNREKIEKILTFRIPYYVGPLARGNSRFAWMTRKSEETITPWNFEEVVDKGASAQSFIERMTNFDKNLPNEKVLPKHSLLYEYFTVYNELTKVKYVTEGMRKPAFLSGEQKKAIVDLLFKTNRKVTVKQLKEDYFKKIECFDSVEISGVEDRFNASLGTYHDLLKIIKDKDFLDNEENEDILEDIVLTLTLFEDREMIEERLKTYAHLFDDKVMKQLKRRRYTGWGRLSRKLINGIRDKQSGKTILDFLKSDGFANRNFMQLIHDDSLTFKEDIQKAQVSGQGDSLHEHIANLAGSPAIKKGILQTVKVVDELVKVMGRHKPENIVIEMARENQTTQKGQKNSRERMKRIEEGIKELGSQILKEHPVENTQLQNEKLYLYYLQNGRDMYVDQELDINRLSDYDVDHIVPQSFLKDDSIDNKVLTRSDKARGKSDNVPSEEVVKKMKNYWRQLLNAKLITQRKFDNLTKAERGGLSELDKAGFIKRQLVETRQITKHVAQILDSRMNTKYDENDKLIREVKVITLKSKLVSDFRKDFQFYKVREINNYHHAHDAYLNAVVGTALIKKYPKLESEFVYGDYKVYDVRKMIAKSEQEIGKATAKYFFYSNIMNFFKTEITLANGEIRKRPLIETNGETGEIVWDKGRDFATVRKVLSMPQVNIVKKTEVQTGGFSKESILPKRNSDKLIARKKDWDPKKYGGFDSPTVAYSVLVVAKVEKGKSKKLKSVKELLGITIMERSSFEKNPIDFLEAKGYKEVKKDLIIKLPKYSLFELENGRKRMLASAGELQKGNELALPSKYVNFLYLASHYEKLKGSPEDNEQKQLFVEQHKHYLDEIIEQISEFSKRVILADANLDKVLSAYNKHRDKPIREQAENIIHLFTLTNLGAPAAFKYFDTTIDRKRYTSTKEVLDATLIHQSITGLYETRIDLSQLGGDGGGGGEAAAKGGSGGVQEISDSRPMLHIYLNGRRFLGLLDTGADKTCIAGRDWPANWPIHQTESSLQGLGMACGVARSSQPLRWQHEDKSGIIHPFVIPTLPFTLWGRDIMKDIKVRLMTDSPDDSQDLMIGAIESNLFADQISWKSDQPVWLNQWPLKQEKLQALQQLVTEQLQLGHLEESNSPWNTPVFVIKKKSGKWRLLQDLRAVNATMHDMGALQPGLPSPVAVPKGWEIIIIDLQDCFFNIKLHPEDCKRFAFSVPSPNFKRPYQRFQWKVLPQGMKNSPTLCQKFVDKAILTVRDKYQDSYIVHYMDDILLAHPSRSIVDEILTSMIQALNKHGLVVSTEKIQKYDNLKYLGTHIQGDSVSYQKLQIRTDKLRTLNDFQKLLGNINWIRPFLKLTTGELKPLFEILNGDSNPISTRKLTPEACKALQLMNERLSTARVKRLDLSQPWSLCILKTEYTPTACLWQDGVVEWIHLPHISPKVITPYDIFCTQLIIKGRHRSKELFSKDPDYIVVPYTKVQFDLLLQEKEDWPISLLGFLGEVHFHLPKDPLLTFTLQTAIIFPHMTSTTPLEKGIVIFTDGSANGRSVTYIQGREPIIKENTQNTAQQAEIVAVITAFEEVSQPFNLYTDSKYVTGLFPEIETATLSPRTKIYTELKHLQRLIHKRQEKFYIGHIRGHTGLPGPLAQGNAYADSLTRILTAAGKRTADGSEFEKRTADGSEFESPKKKAKVE

SEQ ID NO: 3145 - protein, 2113 aa, synthetic construct
MPAAKRVKLDGGDKKYSIGLDIGTNSVGWAVITDEYKVPSKKFKVLGNTDRHSIKKNLIGALLFDSGETAEATRLKRTARRRYTRRKNRICYLQEIFSNEMAKVDDSFFHRLEESFLVEEDKKHERHPIFGNIVDEVAYHEKYPTIYHLRKKLVDSTDKADLRLIYLALAHMIKFRGHFLIEGDLNPDNSDVDKLFIQLVQTYNQLFEENPINASGVDAKAILSARLSKSRRLENLIAQLPGEKKNGLFGNLIALSLGLTPNFKSNFDLAEDAKLQLSKDTYDDDLDNLLAQIGDQYADLFLAAKNLSDAILLSDILRVNTEITKAPLSASMIKRYDEHHQDLTLLKALVRQQLPEKYKEIFFDQSKNGYAGYIDGGASQEEFYKFIKPILEKMDGTEELLVKLNREDLLRKQRTFDNGSIPHQIHLGELHAILRRQEDFYPFLKDNREKIEKILTFRIPYYVGPLARGNSRFAWMTRKSEETITPWNFEEVVDKGASAQSFIERMTNFDKNLPNEKVLPKHSLLYEYFTVYNELTKVKYVTEGMRKPAFLSGEQKKAIVDLLFKTNRKVTVKQLKEDYFKKIECFDSVEISGVEDRFNASLGTYHDLLKIIKDKDFLDNEENEDILEDIVLTLTLFEDREMIEERLKTYAHLFDDKVMKQLKRRRYTGWGRLSRKLINGIRDKQSGKTILDFLKSDGFANRNFMQLIHDDSLTFKEDIQKAQVSGQGDSLHEHIANLAGSPAIKKGILQTVKVVDELVKVMGRHKPENIVIEMARENQTTQKGQKNSRERMKRIEEGIKELGSQILKEHPVENTQLQNEKLYLYYLQNGRDMYVDQELDINRLSDYDVDHIVPQSFLKDDSIDNKVLTRSDKARGKSDNVPSEEVVKKMKNYWRQLLNAKLITQRKFDNLTKAERGGLSELDKAGFIKRQLVETRQITKHVAQILDSRMNTKYDENDKLIREVKVITLKSKLVSDFRKDFQFYKVREINNYHHAHDAYLNAVVGTALIKKYPKLESEFVYGDYKVYDVRKMIAKSEQEIGKATAKYFFYSNIMNFFKTEITLANGEIRKRPLIETNGETGEIVWDKGRDFATVRKVLSMPQVNIVKKTEVQTGGFSKESILPKRNSDKLIARKKDWDPKKYGGFDSPTVAYSVLVVAKVEKGKSKKLKSVKELLGITIMERSSFEKNPIDFLEAKGYKEVKKDLIIKLPKYSLFELENGRKRMLASAGELQKGNELALPSKYVNFLYLASHYEKLKGSPEDNEQKQLFVEQHKHYLDEIIEQISEFSKRVILADANLDKVLSAYNKHRDKPIREQAENIIHLFTLTNLGAPAAFKYFDTTIDRKRYTSTKEVLDATLIHQSITGLYETRIDLSQLGGDGGPAPEAAAKGGVQEISDSRPMLHIYLNGRRFLGLLDTGADKTCIAGRDWPANWPIHQTESSLQGLGMACGVARSSQPLRWQHEDKSGIIHPFVIPTLPFTLWGRDIMKDIKVRLMTDSPDDSQDLMIGAIESNLFADQISWKSDQPVWLNQWPLKQEKLQALQQLVTEQLQLGHLEESNSPWNTPVFVIKKKSGKWRLLQDLRAVNATMHDMGALQPGLPSPVAVPKGWEIIIIDLQDCFFNIKLHPEDCKRFAFSVPSPNFKRPYQRFQWKVLPQGMKNSPTLCQKFVDKAILTVRDKYQDSYIVHYMDDILLAHPSRSIVDEILTSMIQALNKHGLVVSTEKIQKYDNLKYLGTHIQGDSVSYQKLQIRTDKLRTLNDFQKLLGNINWIRPFLKLTTGELKPLFEILNGDSNPISTRKLTPEACKALQLMNERLSTARVKRLDLSQPWSLCILKTEYTPTACLWQDGVVEWIHLPHISPKVITPYDIFCTQLIIKGRHRSKELFSKDPDYIVVPYTKVQFDLLLQEKEDWPISLLGFLGEVHFHLPKDPLLTFTLQTAIIFPHMTSTTPLEKGIVIFTDGSANGRSVTYIQGREPIIKENTQNTAQQAEIVAVITAFEEVSQPFNLYTDSKYVTGLFPEIETATLSPRTKIYTELKHLQRLIHKRQEKFYIGHIRGHTGLPGPLAQGNAYADSLTRILTAAGKRTADGSEFEKRTADGSEFESPKKKAKVE

SEQ ID NO: 3146 - protein, 2116 aa, synthetic construct
MPAAKRVKLDGGDKKYSIGLDIGTNSVGWAVITDEYKVPSKKFKVLGNTDRHSIKKNLIGALLFDSGETAEATRLKRTARRRYTRRKNRICYLQEIFSNEMAKVDDSFFHRLEESFLVEEDKKHERHPIFGNIVDEVAYHEKYPTIYHLRKKLVDSTDKADLRLIYLALAHMIKFRGHFLIEGDLNPDNSDVDKLFIQLVQTYNQLFEENPINASGVDAKAILSARLSKSRRLENLIAQLPGEKKNGLFGNLIALSLGLTPNFKSNFDLAEDAKLQLSKDTYDDDLDNLLAQIGDQYADLFLAAKNLSDAILLSDILRVNTEITKAPLSASMIKRYDEHHQDLTLLKALVRQQLPEKYKEIFFDQSKNGYAGYIDGGASQEEFYKFIKPILEKMDGTEELLVKLNREDLLRKQRTFDNGSIPHQIHLGELHAILRRQEDFYPFLKDNREKIEKILTFRIPYYVGPLARGNSRFAWMTRKSEETITPWNFEEVVDKGASAQSFIERMTNFDKNLPNEKVLPKHSLLYEYFTVYNELTKVKYVTEGMRKPAFLSGEQKKAIVDLLFKTNRKVTVKQLKEDYFKKIECFDSVEISGVEDRFNASLGTYHDLLKIIKDKDFLDNEENEDILEDIVLTLTLFEDREMIEERLKTYAHLFDDKVMKQLKRRRYTGWGRLSRKLINGIRDKQSGKTILDFLKSDGFANRNFMQLIHDDSLTFKEDIQKAQVSGQGDSLHEHIANLAGSPAIKKGILQTVKVVDELVKVMGRHKPENIVIEMARENQTTQKGQKNSRERMKRIEEGIKELGSQILKEHPVENTQLQNEKLYLYYLQNGRDMYVDQELDINRLSDYDVDHIVPQSFLKDDSIDNKVLTRSDKARGKSDNVPSEEVVKKMKNYWRQLLNAKLITQRKFDNLTKAERGGLSELDKAGFIKRQLVETRQITKHVAQILDSRMNTKYDENDKLIREVKVITLKSKLVSDFRKDFQFYKVREINNYHHAHDAYLNAVVGTALIKKYPKLESEFVYGDYKVYDVRKMIAKSEQEIGKATAKYFFYSNIMNFFKTEITLANGEIRKRPLIETNGETGEIVWDKGRDFATVRKVLSMPQVNIVKKTEVQTGGFSKESILPKRNSDKLIARKKDWDPKKYGGFDSPTVAYSVLVVAKVEKGKSKKLKSVKELLGITIMERSSFEKNPIDFLEAKGYKEVKKDLIIKLPKYSLFELENGRKRMLASAGELQKGNELALPSKYVNFLYLASHYEKLKGSPEDNEQKQLFVEQHKHYLDEIIEQISEFSKRVILADANLDKVLSAYNKHRDKPIREQAENIIHLFTLTNLGAPAAFKYFDTTIDRKRYTSTKEVLDATLIHQSITGLYETRIDLSQLGGDGGPAPGGGEAAAKGGVQEISDSRPMLHIYLNGRRFLGLLDTGADKTCIAGRDWPANWPIHQTESSLQGLGMACGVARSSQPLRWQHEDKSGIIHPFVIPTLPFTLWGRDIMKDIKVRLMTDSPDDSQDLMIGAIESNLFADQISWKSDQPVWLNQWPLKQEKLQALQQLVTEQLQLGHLEESNSPWNTPVFVIKKKSGKWRLLQDLRAVNATMHDMGALQPGLPSPVAVPKGWEIIIIDLQDCFFNIKLHPEDCKRFAFSVPSPNFKRPYQRFQWKVLPQGMKNSPTLCQKFVDKAILTVRDKYQDSYIVHYMDDILLAHPSRSIVDEILTSMIQALNKHGLVVSTEKIQKYDNLKYLGTHIQGDSVSYQKLQIRTDKLRTLNDFQKLLGNINWIRPFLKLTTGELKPLFEILNGDSNPISTRKLTPEACKALQLMNERLSTARVKRLDLSQPWSLCILKTEYTPTACLWQDGVVEWIHLPHISPKVITPYDIFCTQLIIKGRHRSKELFSKDPDYIVVPYTKVQFDLLLQEKEDWPISLLGFLGEVHFHLPKDPLLTFTLQTAIIFPHMTSTTPLEKGIVIFTDGSANGRSVTYIQGREPIIKENTQNTAQQAEIVAVITAFEEVSQPFNLYTDSKYVTGLFPEIETATLSPRTKIYTELKHLQRLIHKRQEKFYIGHIRGHTGLPGPLAQGNAYADSLTRILTAAGKRTADGSEFEKRTADGSEFESPKKKAKVE

SEQ ID NO: 3147 - protein, 2116 aa, synthetic construct
MPAAKRVKLDGGDKKYSIGLDIGTNSVGWAVITDEYKVPSKKFKVLGNTDRHSIKKNLIGALLFDSGETAEATRLKRTARRRYTRRKNRICYLQEIFSNEMAKVDDSFFHRLEESFLVEEDKKHERHPIFGNIVDEVAYHEKYPTIYHLRKKLVDSTDKADLRLIYLALAHMIKFRGHFLIEGDLNPDNSDVDKLFIQLVQTYNQLFEENPINASGVDAKAILSARLSKSRRLENLIAQLPGEKKNGLFGNLIALSLGLTPNFKSNFDLAEDAKLQLSKDTYDDDLDNLLAQIGDQYADLFLAAKNLSDAILLSDILRVNTEITKAPLSASMIKRYDEHHQDLTLLKALVRQQLPEKYKEIFFDQSKNGYAGYIDGGASQEEFYKFIKPILEKMDGTEELLVKLNREDLLRKQRTFDNGSIPHQIHLGELHAILRRQEDFYPFLKDNREKIEKILTFRIPYYVGPLARGNSRFAWMTRKSEETITPWNFEEVVDKGASAQSFIERMTNFDKNLPNEKVLPKHSLLYEYFTVYNELTKVKYVTEGMRKPAFLSGEQKKAIVDLLFKTNRKVTVKQLKEDYFKKIECFDSVEISGVEDRFNASLGTYHDLLKIIKDKDFLDNEENEDILEDIVLTLTLFEDREMIEERLKTYAHLFDDKVMKQLKRRRYTGWGRLSRKLINGIRDKQSGKTILDFLKSDGFANRNFMQLIHDDSLTFKEDIQKAQVSGQGDSLHEHIANLAGSPAIKKGILQTVKVVDELVKVMGRHKPENIVIEMARENQTTQKGQKNSRERMKRIEEGIKELGSQILKEHPVENTQLQNEKLYLYYLQNGRDMYVDQELDINRLSDYDVDHIVPQSFLKDDSIDNKVLTRSDKARGKSDNVPSEEVVKKMKNYWRQLLNAKLITQRKFDNLTKAERGGLSELDKAGFIKRQLVETRQITKHVAQILDSRMNTKYDENDKLIREVKVITLKSKLVSDFRKDFQFYKVREINNYHHAHDAYLNAVVGTALIKKYPKLESEFVYGDYKVYDVRKMIAKSEQEIGKATAKYFFYSNIMNFFKTEITLANGEIRKRPLIETNGETGEIVWDKGRDFATVRKVLSMPQVNIVKKTEVQTGGFSKESILPKRNSDKLIARKKDWDPKKYGGFDSPTVAYSVLVVAKVEKGKSKKLKSVKELLGITIMERSSFEKNPIDFLEAKGYKEVKKDLIIKLPKYSLFELENGRKRMLASAGELQKGNELALPSKYVNFLYLASHYEKLKGSPEDNEQKQLFVEQHKHYLDEIIEQISEFSKRVILADANLDKVLSAYNKHRDKPIREQAENIIHLFTLTNLGAPAAFKYFDTTIDRKRYTSTKEVLDATLIHQSITGLYETRIDLSQLGGDGGGSSEAAAKGGGGGVQEISDSRPMLHIYLNGRRFLGLLDTGADKTCIAGRDWPANWPIHQTESSLQGLGMACGVARSSQPLRWQHEDKSGIIHPFVIPTLPFTLWGRDIMKDIKVRLMTDSPDDSQDLMIGAIESNLFADQISWKSDQPVWLNQWPLKQEKLQALQQLVTEQLQLGHLEESNSPWNTPVFVIKKKSGKWRLLQDLRAVNATMHDMGALQPGLPSPVAVPKGWEIIIIDLQDCFFNIKLHPEDCKRFAFSVPSPNFKRPYQRFQWKVLPQGMKNSPTLCQKFVDKAILTVRDKYQDSYIVHYMDDILLAHPSRSIVDEILTSMIQALNKHGLVVSTEKIQKYDNLKYLGTHIQGDSVSYQKLQIRTDKLRTLNDFQKLLGNINWIRPFLKLTTGELKPLFEILNGDSNPISTRKLTPEACKALQLMNERLSTARVKRLDLSQPWSLCILKTEYTPTACLWQDGVVEWIHLPHISPKVITPYDIFCTQLIIKGRHRSKELFSKDPDYIVVPYTKVQFDLLLQEKEDWPISLLGFLGEVHFHLPKDPLLTFTLQTAIIFPHMTSTTPLEKGIVIFTDGSANGRSVTYIQGREPIIKENTQNTAQQAEIVAVITAFEEVSQPFNLYTDSKYVTGLFPEIETATLSPRTKIYTELKHLQRLIHKRQEKFYIGHIRGHTGLPGPLAQGNAYADSLTRILTAAGKRTADGSEFEKRTADGSEFESPKKKAKVE

SEQ ID NO: 3148 - protein, 2116 aa, synthetic construct
MPAAKRVKLDGGDKKYSIGLDIGTNSVGWAVITDEYKVPSKKFKVLGNTDRHSIKKNLIGALLFDSGETAEATRLKRTARRRYTRRKNRICYLQEIFSNEMAKVDDSFFHRLEESFLVEEDKKHERHPIFGNIVDEVAYHEKYPTIYHLRKKLVDSTDKADLRLIYLALAHMIKFRGHFLIEGDLNPDNSDVDKLFIQLVQTYNQLFEENPINASGVDAKAILSARLSKSRRLENLIAQLPGEKKNGLFGNLIALSLGLTPNFKSNFDLAEDAKLQLSKDTYDDDLDNLLAQIGDQYADLFLAAKNLSDAILLSDILRVNTEITKAPLSASMIKRYDEHHQDLTLLKALVRQQLPEKYKEIFFDQSKNGYAGYIDGGASQEEFYKFIKPILEKMDGTEELLVKLNREDLLRKQRTFDNGSIPHQIHLGELHAILRRQEDFYPFLKDNREKIEKILTFRIPYYVGPLARGNSRFAWMTRKSEETITPWNFEEVVDKGASAQSFIERMTNFDKNLPNEKVLPKHSLLYEYFTVYNELTKVKYVTEGMRKPAFLSGEQKKAIVDLLFKTNRKVTVKQLKEDYFKKIECFDSVEISGVEDRFNASLGTYHDLLKIIKDKDFLDNEENEDILEDIVLTLTLFEDREMIEERLKTYAHLFDDKVMKQLKRRRYTGWGRLSRKLINGIRDKQSGKTILDFLKSDGFANRNFMQLIHDDSLTFKEDIQKAQVSGQGDSLHEHIANLAGSPAIKKGILQTVKVVDELVKVMGRHKPENIVIEMARENQTTQKGQKNSRERMKRIEEGIKELGSQILKEHPVENTQLQNEKLYLYYLQNGRDMYVDQELDINRLSDYDVDHIVPQSFLKDDSIDNKVLTRSDKARGKSDNVPSEEVVKKMKNYWRQLLNAKLITQRKFDNLTKAERGGLSELDKAGFIKRQLVETRQITKHVAQILDSRMNTKYDENDKLIREVKVITLKSKLVSDFRKDFQFYKVREINNYHHAHDAYLNAVVGTALIKKYPKLESEFVYGDYKVYDVRKMIAKSEQEIGKATAKYFFYSNIMNFFKTEITLANGEIRKRPLIETNGETGEIVWDKGRDFATVRKVLSMPQVNIVKKTEVQTGGFSKESILPKRNSDKLIARKKDWDPKKYGGFDSPTVAYSVLVVAKVEKGKSKKLKSVKELLGITIMERSSFEKNPIDFLEAKGYKEVKKDLIIKLPKYSLFELENGRKRMLASAGELQKGNELALPSKYVNFLYLASHYEKLKGSPEDNEQKQLFVEQHKHYLDEIIEQISEFSKRVILADANLDKVLSAYNKHRDKPIREQAENIIHLFTLTNLGAPAAFKYFDTTIDRKRYTSTKEVLDATLIHQSITGLYETRIDLSQLGGDGGEAAAKGGSGSSGGVQEISDSRPMLHIYLNGRRFLGLLDTGADKTCIAGRDWPANWPIHQTESSLQGLGMACGVARSSQPLRWQHEDKSGIIHPFVIPTLPFTLWGRDIMKDIKVRLMTDSPDDSQDLMIGAIESNLFADQISWKSDQPVWLNQWPLKQEKLQALQQLVTEQLQLGHLEESNSPWNTPVFVIKKKSGKWRLLQDLRAVNATMHDMGALQPGLPSPVAVPKGWEIIIIDLQDCFFNIKLHPEDCKRFAFSVPSPNFKRPYQRFQWKVLPQGMKNSPTLCQKFVDKAILTVRDKYQDSYIVHYMDDILLAHPSRSIVDEILTSMIQALNKHGLVVSTEKIQKYDNLKYLGTHIQGDSVSYQKLQIRTDKLRTLNDFQKLLGNINWIRPFLKLTTGELKPLFEILNGDSNPISTRKLTPEACKALQLMNERLSTARVKRLDLSQPWSLCILKTEYTPTACLWQDGVVEWIHLPHISPKVITPYDIFCTQLIIKGRHRSKELFSKDPDYIVVPYTKVQFDLLLQEKEDWPISLLGFLGEVHFHLPKDPLLTFTLQTAIIFPHMTSTTPLEKGIVIFTDGSANGRSVTYIQGREPIIKENTQNTAQQAEIVAVITAFEEVSQPFNLYTDSKYVTGLFPEIETATLSPRTKIYTELKHLQRLIHKRQEKFYIGHIRGHTGLPGPLAQGNAYADSLTRILTAAGKRTADGSEFEKRTADGSEFESPKKKAKVE

SEQ ID NO: 3149 - protein, 2116 aa, synthetic construct
MPAAKRVKLDGGDKKYSIGLDIGTNSVGWAVITDEYKVPSKKFKVLGNTDRHSIKKNLIGALLFDSGETAEATRLKRTARRRYTRRKNRICYLQEIFSNEMAKVDDSFFHRLEESFLVEEDKKHERHPIFGNIVDEVAYHEKYPTIYHLRKKLVDSTDKADLRLIYLALAHMIKFRGHFLIEGDLNPDNSDVDKLFIQLVQTYNQLFEENPINASGVDAKAILSARLSKSRRLENLIAQLPGEKKNGLFGNLIALSLGLTPNFKSNFDLAEDAKLQLSKDTYDDDLDNLLAQIGDQYADLFLAAKNLSDAILLSDILRVNTEITKAPLSASMIKRYDEHHQDLTLLKALVRQQLPEKYKEIFFDQSKNGYAGYIDGGASQEEFYKFIKPILEKMDGTEELLVKLNREDLLRKQRTFDNGSIPHQIHLGELHAILRRQEDFYPFLKDNREKIEKILTFRIPYYVGPLARGNSRFAWMTRKSEETITPWNFEEVVDKGASAQSFIERMTNFDKNLPNEKVLPKHSLLYEYFTVYNELTKVKYVTEGMRKPAFLSGEQKKAIVDLLFKTNRKVTVKQLKEDYFKKIECFDSVEISGVEDRFNASLGTYHDLLKIIKDKDFLDNEENEDILEDIVLTLTLFEDREMIEERLKTYAHLFDDKVMKQLKRRRYTGWGRLSRKLINGIRDKQSGKTILDFLKSDGFANRNFMQLIHDDSLTFKEDIQKAQVSGQGDSLHEHIANLAGSPAIKKGILQTVKVVDELVKVMGRHKPENIVIEMARENQTTQKGQKNSRERMKRIEEGIKELGSQILKEHPVENTQLQNEKLYLYYLQNGRDMYVDQELDINRLSDYDVDHIVPQSFLKDDSIDNKVLTRSDKARGKSDNVPSEEVVKKMKNYWRQLLNAKLITQRKFDNLTKAERGGLSELDKAGFIKRQLVETRQITKHVAQILDSRMNTKYDENDKLIREVKVITLKSKLVSDFRKDFQFYKVREINNYHHAHDAYLNAVVGTALIKKYPKLESEFVYGDYKVYDVRKMIAKSEQEIGKATAKYFFYSNIMNFFKTEITLANGEIRKRPLIETNGETGEIVWDKGRDFATVRKVLSMPQVNIVKKTEVQTGGFSKESILPKRNSDKLIARKKDWDPKKYGGFDSPTVAYSVLVVAKVEKGKSKKLKSVKELLGITIMERSSFEKNPIDFLEAKGYKEVKKDLIIKLPKYSLFELENGRKRMLASAGELQKGNELALPSKYVNFLYLASHYEKLKGSPEDNEQKQLFVEQHKHYLDEIIEQISEFSKRVILADANLDKVLSAYNKHRDKPIREQAENIIHLFTLTNLGAPAAFKYFDTTIDRKRYTSTKEVLDATLIHQSITGLYETRIDLSQLGGDGGGSSPAPEAAAKGGVQEISDSRPMLHIYLNGRRFLGLLDTGADKTCIAGRDWPANWPIHQTESSLQGLGMACGVARSSQPLRWQHEDKSGIIHPFVIPTLPFTLWGRDIMKDIKVRLMTDSPDDSQDLMIGAIESNLFADQISWKSDQPVWLNQWPLKQEKLQALQQLVTEQLQLGHLEESNSPWNTPVFVIKKKSGKWRLLQDLRAVNATMHDMGALQPGLPSPVAVPKGWEIIIIDLQDCFFNIKLHPEDCKRFAFSVPSPNFKRPYQRFQWKVLPQGMKNSPTLCQKFVDKAILTVRDKYQDSYIVHYMDDILLAHPSRSIVDEILTSMIQALNKHGLVVSTEKIQKYDNLKYLGTHIQGDSVSYQKLQIRTDKLRTLNDFQKLLGNINWIRPFLKLTTGELKPLFEILNGDSNPISTRKLTPEACKALQLMNERLSTARVKRLDLSQPWSLCILKTEYTPTACLWQDGVVEWIHLPHISPKVITPYDIFCTQLIIKGRHRSKELFSKDPDYIVVPYTKVQFDLLLQEKEDWPISLLGFLGEVHFHLPKDPLLTFTLQTAIIFPHMTSTTPLEKGIVIFTDGSANGRSVTYIQGREPIIKENTQNTAQQAEIVAVITAFEEVSQPFNLYTDSKYVTGLFPEIETATLSPRTKIYTELKHLQRLIHKRQEKFYIGHIRGHTGLPGPLAQGNAYADSLTRILTAAGKRTADGSEFEKRTADGSEFESPKKKAKVE

SEQ ID NO: 3150 - protein, 2114 aa, synthetic construct
MPAAKRVKLDGGDKKYSIGLDIGTNSVGWAVITDEYKVPSKKFKVLGNTDRHSIKKNLIGALLFDSGETAEATRLKRTARRRYTRRKNRICYLQEIFSNEMAKVDDSFFHRLEESFLVEEDKKHERHPIFGNIVDEVAYHEKYPTIYHLRKKLVDSTDKADLRLIYLALAHMIKFRGHFLIEGDLNPDNSDVDKLFIQLVQTYNQLFEENPINASGVDAKAILSARLSKSRRLENLIAQLPGEKKNGLFGNLIALSLGLTPNFKSNFDLAEDAKLQLSKDTYDDDLDNLLAQIGDQYADLFLAAKNLSDAILLSDILRVNTEITKAPLSASMIKRYDEHHQDLTLLKALVRQQLPEKYKEIFFDQSKNGYAGYIDGGASQEEFYKFIKPILEKMDGTEELLVKLNREDLLRKQRTFDNGSIPHQIHLGELHAILRRQEDFYPFLKDNREKIEKILTFRIPYYVGPLARGNSRFAWMTRKSEETITPWNFEEVVDKGASAQSFIERMTNFDKNLPNEKVLPKHSLLYEYFTVYNELTKVKYVTEGMRKPAFLSGEQKKAIVDLLFKTNRKVTVKQLKEDYFKKIECFDSVEISGVEDRFNASLGTYHDLLKIIKDKDFLDNEENEDILEDIVLTLTLFEDREMIEERLKTYAHLFDDKVMKQLKRRRYTGWGRLSRKLINGIRDKQSGKTILDFLKSDGFANRNFMQLIHDDSLTFKEDIQKAQVSGQGDSLHEHIANLAGSPAIKKGILQTVKVVDELVKVMGRHKPENIVIEMARENQTTQKGQKNSRERMKRIEEGIKELGSQILKEHPVENTQLQNEKLYLYYLQNGRDMYVDQELDINRLSDYDVDHIVPQSFLKDDSIDNKVLTRSDKARGKSDNVPSEEVVKKMKNYWRQLLNAKLITQRKFDNLTKAERGGLSELDKAGFIKRQLVETRQITKHVAQILDSRMNTKYDENDKLIREVKVITLKSKLVSDFRKDFQFYKVREINNYHHAHDAYLNAVVGTALIKKYPKLESEFVYGDYKVYDVRKMIAKSEQEIGKATAKYFFYSNIMNFFKTEITLANGEIRKRPLIETNGETGEIVWDKGRDFATVRKVLSMPQVNIVKKTEVQTGGFSKESILPKRNSDKLIARKKDWDPKKYGGFDSPTVAYSVLVVAKVEKGKSKKLKSVKELLGITIMERSSFEKNPIDFLEAKGYKEVKKDLIIKLPKYSLFELENGRKRMLASAGELQKGNELALPSKYVNFLYLASHYEKLKGSPEDNEQKQLFVEQHKHYLDEIIEQISEFSKRVILADANLDKVLSAYNKHRDKPIREQAENIIHLFTLTNLGAPAAFKYFDTTIDRKRYTSTKEVLDATLIHQSITGLYETRIDLSQLGGDGGGGSGSSPAPGGVQEISDSRPMLHIYLNGRRFLGLLDTGADKTCIAGRDWPANWPIHQTESSLQGLGMACGVARSSQPLRWQHEDKSGIIHPFVIPTLPFTLWGRDIMKDIKVRLMTDSPDDSQDLMIGAIESNLFADQISWKSDQPVWLNQWPLKQEKLQALQQLVTEQLQLGHLEESNSPWNTPVFVIKKKSGKWRLLQDLRAVNATMHDMGALQPGLPSPVAVPKGWEIIIIDLQDCFFNIKLHPEDCKRFAFSVPSPNFKRPYQRFQWKVLPQGMKNSPTLCQKFVDKAILTVRDKYQDSYIVHYMDDILLAHPSRSIVDEILTSMIQALNKHGLVVSTEKIQKYDNLKYLGTHIQGDSVSYQKLQIRTDKLRTLNDFQKLLGNINWIRPFLKLTTGELKPLFEILNGDSNPISTRKLTPEACKALQLMNERLSTARVKRLDLSQPWSLCILKTEYTPTACLWQDGVVEWIHLPHISPKVITPYDIFCTQLIIKGRHRSKELFSKDPDYIVVPYTKVQFDLLLQEKEDWPISLLGFLGEVHFHLPKDPLLTFTLQTAIIFPHMTSTTPLEKGIVIFTDGSANGRSVTYIQGREPIIKENTQNTAQQAEIVAVITAFEEVSQPFNLYTDSKYVTGLFPEIETATLSPRTKIYTELKHLQRLIHKRQEKFYIGHIRGHTGLPGPLAQGNAYADSLTRILTAAGKRTADGSEFEKRTADGSEFESPKKKAKVE

SEQ ID NO: 3151 - protein, 2120 aa, synthetic construct
MPAAKRVKLDGGDKKYSIGLDIGTNSVGWAVITDEYKVPSKKFKVLGNTDRHSIKKNLIGALLFDSGETAEATRLKRTARRRYTRRKNRICYLQEIFSNEMAKVDDSFFHRLEESFLVEEDKKHERHPIFGNIVDEVAYHEKYPTIYHLRKKLVDSTDKADLRLIYLALAHMIKFRGHFLIEGDLNPDNSDVDKLFIQLVQTYNQLFEENPINASGVDAKAILSARLSKSRRLENLIAQLPGEKKNGLFGNLIALSLGLTPNFKSNFDLAEDAKLQLSKDTYDDDLDNLLAQIGDQYADLFLAAKNLSDAILLSDILRVNTEITKAPLSASMIKRYDEHHQDLTLLKALVRQQLPEKYKEIFFDQSKNGYAGYIDGGASQEEFYKFIKPILEKMDGTEELLVKLNREDLLRKQRTFDNGSIPHQIHLGELHAILRRQEDFYPFLKDNREKIEKILTFRIPYYVGPLARGNSRFAWMTRKSEETITPWNFEEVVDKGASAQSFIERMTNFDKNLPNEKVLPKHSLLYEYFTVYNELTKVKYVTEGMRKPAFLSGEQKKAIVDLLFKTNRKVTVKQLKEDYFKKIECFDSVEISGVEDRFNASLGTYHDLLKIIKDKDFLDNEENEDILEDIVLTLTLFEDREMIEERLKTYAHLFDDKVMKQLKRRRYTGWGRLSRKLINGIRDKQSGKTILDFLKSDGFANRNFMQLIHDDSLTFKEDIQKAQVSGQGDSLHEHIANLAGSPAIKKGILQTVKVVDELVKVMGRHKPENIVIEMARENQTTQKGQKNSRERMKRIEEGIKELGSQILKEHPVENTQLQNEKLYLYYLQNGRDMYVDQELDINRLSDYDVDHIVPQSFLKDDSIDNKVLTRSDKARGKSDNVPSEEVVKKMKNYWRQLLNAKLITQRKFDNLTKAERGGLSELDKAGFIKRQLVETRQITKHVAQILDSRMNTKYDENDKLIREVKVITLKSKLVSDFRKDFQFYKVREINNYHHAHDAYLNAVVGTALIKKYPKLESEFVYGDYKVYDVRKMIAKSEQEIGKATAKYFFYSNIMNFFKTEITLANGEIRKRPLIETNGETGEIVWDKGRDFATVRKVLSMPQVNIVKKTEVQTGGFSKESILPKRNSDKLIARKKDWDPKKYGGFDSPTVAYSVLVVAKVEKGKSKKLKSVKELLGITIMERSSFEKNPIDFLEAKGYKEVKKDLIIKLPKYSLFELENGRKRMLASAGELQKGNELALPSKYVNFLYLASHYEKLKGSPEDNEQKQLFVEQHKHYLDEIIEQISEFSKRVILADANLDKVLSAYNKHRDKPIREQAENIIHLFTLTNLGAPAAFKYFDTTIDRKRYTSTKEVLDATLIHQSITGLYETRIDLSQLGGDGGEAAAKGGGGSEAAAKGGVQEISDSRPMLHIYLNGRRFLGLLDTGADKTCIAGRDWPANWPIHQTESSLQGLGMACGVARSSQPLRWQHEDKSGIIHPFVIPTLPFTLWGRDIMKDIKVRLMTDSPDDSQDLMIGAIESNLFADQISWKSDQPVWLNQWPLKQEKLQALQQLVTEQLQLGHLEESNSPWNTPVFVIKKKSGKWRLLQDLRAVNATMHDMGALQPGLPSPVAVPKGWEIIIIDLQDCFFNIKLHPEDCKRFAFSVPSPNFKRPYQRFQWKVLPQGMKNSPTLCQKFVDKAILTVRDKYQDSYIVHYMDDILLAHPSRSIVDEILTSMIQALNKHGLVVSTEKIQKYDNLKYLGTHIQGDSVSYQKLQIRTDKLRTLNDFQKLLGNINWIRPFLKLTTGELKPLFEILNGDSNPISTRKLTPEACKALQLMNERLSTARVKRLDLSQPWSLCILKTEYTPTACLWQDGVVEWIHLPHISPKVITPYDIFCTQLIIKGRHRSKELFSKDPDYIVVPYTKVQFDLLLQEKEDWPISLLGFLGEVHFHLPKDPLLTFTLQTAIIFPHMTSTTPLEKGIVIFTDGSANGRSVTYIQGREPIIKENTQNTAQQAEIVAVITAFEEVSQPFNLYTDSKYVTGLFPEIETATLSPRTKIYTELKHLQRLIHKRQEKFYIGHIRGHTGLPGPLAQGNAYADSLTRILTAAGKRTADGSEFEKRTADGSEFESPKKKAKVE

SEQ ID NO: 3152 - protein, 2116 aa, synthetic construct
MPAAKRVKLDGGDKKYSIGLDIGTNSVGWAVITDEYKVPSKKFKVLGNTDRHSIKKNLIGALLFDSGETAEATRLKRTARRRYTRRKNRICYLQEIFSNEMAKVDDSFFHRLEESFLVEEDKKHERHPIFGNIVDEVAYHEKYPTIYHLRKKLVDSTDKADLRLIYLALAHMIKFRGHFLIEGDLNPDNSDVDKLFIQLVQTYNQLFEENPINASGVDAKAILSARLSKSRRLENLIAQLPGEKKNGLFGNLIALSLGLTPNFKSNFDLAEDAKLQLSKDTYDDDLDNLLAQIGDQYADLFLAAKNLSDAILLSDILRVNTEITKAPLSASMIKRYDEHHQDLTLLKALVRQQLPEKYKEIFFDQSKNGYAGYIDGGASQEEFYKFIKPILEKMDGTEELLVKLNREDLLRKQRTFDNGSIPHQIHLGELHAILRRQEDFYPFLKDNREKIEKILTFRIPYYVGPLARGNSRFAWMTRKSEETITPWNFEEVVDKGASAQSFIERMTNFDKNLPNEKVLPKHSLLYEYFTVYNELTKVKYVTEGMRKPAFLSGEQKKAIVDLLFKTNRKVTVKQLKEDYFKKIECFDSVEISGVEDRFNASLGTYHDLLKIIKDKDFLDNEENEDILEDIVLTLTLFEDREMIEERLKTYAHLFDDKVMKQLKRRRYTGWGRLSRKLINGIRDKQSGKTILDFLKSDGFANRNFMQLIHDDSLTFKEDIQKAQVSGQGDSLHEHIANLAGSPAIKKGILQTVKVVDELVKVMGRHKPENIVIEMARENQTTQKGQKNSRERMKRIEEGIKELGSQILKEHPVENTQLQNEKLYLYYLQNGRDMYVDQELDINRLSDYDVDHIVPQSFLKDDSIDNKVLTRSDKARGKSDNVPSEEVVKKMKNYWRQLLNAKLITQRKFDNLTKAERGGLSELDKAGFIKRQLVETRQITKHVAQILDSRMNTKYDENDKLIREVKVITLKSKLVSDFRKDFQFYKVREINNYHHAHDAYLNAVVGTALIKKYPKLESEFVYGDYKVYDVRKMIAKSEQEIGKATAKYFFYSNIMNFFKTEITLANGEIRKRPLIETNGETGEIVWDKGRDFATVRKVLSMPQVNIVKKTEVQTGGFSKESILPKRNSDKLIARKKDWDPKKYGGFDSPTVAYSVLVVAKVEKGKSKKLKSVKELLGITIMERSSFEKNPIDFLEAKGYKEVKKDLIIKLPKYSLFELENGRKRMLASAGELQKGNELALPSKYVNFLYLASHYEKLKGSPEDNEQKQLFVEQHKHYLDEIIEQISEFSKRVILADANLDKVLSAYNKHRDKPIREQAENIIHLFTLTNLGAPAAFKYFDTTIDRKRYTSTKEVLDATLIHQSITGLYETRIDLSQLGGDGGPAPEAAAKGSSGGVQEISDSRPMLHIYLNGRRFLGLLDTGADKTCIAGRDWPANWPIHQTESSLQGLGMACGVARSSQPLRWQHEDKSGIIHPFVIPTLPFTLWGRDIMKDIKVRLMTDSPDDSQDLMIGAIESNLFADQISWKSDQPVWLNQWPLKQEKLQALQQLVTEQLQLGHLEESNSPWNTPVFVIKKKSGKWRLLQDLRAVNATMHDMGALQPGLPSPVAVPKGWEIIIIDLQDCFFNIKLHPEDCKRFAFSVPSPNFKRPYQRFQWKVLPQGMKNSPTLCQKFVDKAILTVRDKYQDSYIVHYMDDILLAHPSRSIVDEILTSMIQALNKHGLVVSTEKIQKYDNLKYLGTHIQGDSVSYQKLQIRTDKLRTLNDFQKLLGNINWIRPFLKLTTGELKPLFEILNGDSNPISTRKLTPEACKALQLMNERLSTARVKRLDLSQPWSLCILKTEYTPTACLWQDGVVEWIHLPHISPKVITPYDIFCTQLIIKGRHRSKELFSKDPDYIVVPYTKVQFDLLLQEKEDWPISLLGFLGEVHFHLPKDPLLTFTLQTAIIFPHMTSTTPLEKGIVIFTDGSANGRSVTYIQGREPIIKENTQNTAQQAEIVAVITAFEEVSQPFNLYTDSKYVTGLFPEIETATLSPRTKIYTELKHLQRLIHKRQEKFYIGHIRGHTGLPGPLAQGNAYADSLTRILTAAGKRTADGSEFEKRTADGSEFESPKKKAKVE

SEQ ID NO: 3153 - protein, 2121 aa, synthetic construct
MPAAKRVKLDGGDKKYSIGLDIGTNSVGWAVITDEYKVPSKKFKVLGNTDRHSIKKNLIGALLFDSGETAEATRLKRTARRRYTRRKNRICYLQEIFSNEMAKVDDSFFHRLEESFLVEEDKKHERHPIFGNIVDEVAYHEKYPTIYHLRKKLVDSTDKADLRLIYLALAHMIKFRGHFLIEGDLNPDNSDVDKLFIQLVQTYNQLFEENPINASGVDAKAILSARLSKSRRLENLIAQLPGEKKNGLFGNLIALSLGLTPNFKSNFDLAEDAKLQLSKDTYDDDLDNLLAQIGDQYADLFLAAKNLSDAILLSDILRVNTEITKAPLSASMIKRYDEHHQDLTLLKALVRQQLPEKYKEIFFDQSKNGYAGYIDGGASQEEFYKFIKPILEKMDGTEELLVKLNREDLLRKQRTFDNGSIPHQIHLGELHAILRRQEDFYPFLKDNREKIEKILTFRIPYYVGPLARGNSRFAWMTRKSEETITPWNFEEVVDKGASAQSFIERMTNFDKNLPNEKVLPKHSLLYEYFTVYNELTKVKYVTEGMRKPAFLSGEQKKAIVDLLFKTNRKVTVKQLKEDYFKKIECFDSVEISGVEDRFNASLGTYHDLLKIIKDKDFLDNEENEDILEDIVLTLTLFEDREMIEERLKTYAHLFDDKVMKQLKRRRYTGWGRLSRKLINGIRDKQSGKTILDFLKSDGFANRNFMQLIHDDSLTFKEDIQKAQVSGQGDSLHEHIANLAGSPAIKKGILQTVKVVDELVKVMGRHKPENIVIEMARENQTTQKGQKNSRERMKRIEEGIKELGSQILKEHPVENTQLQNEKLYLYYLQNGRDMYVDQELDINRLSDYDVDHIVPQSFLKDDSIDNKVLTRSDKARGKSDNVPSEEVVKKMKNYWRQLLNAKLITQRKFDNLTKAERGGLSELDKAGFIKRQLVETRQITKHVAQILDSRMNTKYDENDKLIREVKVITLKSKLVSDFRKDFQFYKVREINNYHHAHDAYLNAVVGTALIKKYPKLESEFVYGDYKVYDVRKMIAKSEQEIGKATAKYFFYSNIMNFFKTEITLANGEIRKRPLIETNGETGEIVWDKGRDFATVRKVLSMPQVNIVKKTEVQTGGFSKESILPKRNSDKLIARKKDWDPKKYGGFDSPTVAYSVLVVAKVEKGKSKKLKSVKELLGITIMERSSFEKNPIDFLEAKGYKEVKKDLIIKLPKYSLFELENGRKRMLASAGELQKGNELALPSKYVNFLYLASHYEKLKGSPEDNEQKQLFVEQHKHYLDEIIEQISEFSKRVILADANLDKVLSAYNKHRDKPIREQAENIIHLFTLTNLGAPAAFKYFDTTIDRKRYTSTKEVLDATLIHQSITGLYETRIDLSQLGGDGGSGSETPGTSESATPESGGVQEISDSRPMLHIYLNGRRFLGLLDTGADKTCIAGRDWPANWPIHQTESSLQGLGMACGVARSSQPLRWQHEDKSGIIHPFVIPTLPFTLWGRDIMKDIKVRLMTDSPDDSQDLMIGAIESNLFADQISWKSDQPVWLNQWPLKQEKLQALQQLVTEQLQLGHLEESNSPWNTPVFVIKKKSGKWRLLQDLRAVNATMHDMGALQPGLPSPVAVPKGWEIIIIDLQDCFFNIKLHPEDCKRFAFSVPSPNFKRPYQRFQWKVLPQGMKNSPTLCQKFVDKAILTVRDKYQDSYIVHYMDDILLAHPSRSIVDEILTSMIQALNKHGLVVSTEKIQKYDNLKYLGTHIQGDSVSYQKLQIRTDKLRTLNDFQKLLGNINWIRPFLKLTTGELKPLFEILNGDSNPISTRKLTPEACKALQLMNERLSTARVKRLDLSQPWSLCILKTEYTPTACLWQDGVVEWIHLPHISPKVITPYDIFCTQLIIKGRHRSKELFSKDPDYIVVPYTKVQFDLLLQEKEDWPISLLGFLGEVHFHLPKDPLLTFTLQTAIIFPHMTSTTPLEKGIVIFTDGSANGRSVTYIQGREPIIKENTQNTAQQAEIVAVITAFEEVSQPFNLYTDSKYVTGLFPEIETATLSPRTKIYTELKHLQRLIHKRQEKFYIGHIRGHTGLPGPLAQGNAYADSLTRILTAAGKRTADGSEFEKRTADGSEFESPKKKAKVE

SEQ ID NO: 3154 - protein, 2116 aa, synthetic construct
MPAAKRVKLDGGDKKYSIGLDIGTNSVGWAVITDEYKVPSKKFKVLGNTDRHSIKKNLIGALLFDSGETAEATRLKRTARRRYTRRKNRICYLQEIFSNEMAKVDDSFFHRLEESFLVEEDKKHERHPIFGNIVDEVAYHEKYPTIYHLRKKLVDSTDKADLRLIYLALAHMIKFRGHFLIEGDLNPDNSDVDKLFIQLVQTYNQLFEENPINASGVDAKAILSARLSKSRRLENLIAQLPGEKKNGLFGNLIALSLGLTPNFKSNFDLAEDAKLQLSKDTYDDDLDNLLAQIGDQYADLFLAAKNLSDAILLSDILRVNTEITKAPLSASMIKRYDEHHQDLTLLKALVRQQLPEKYKEIFFDQSKNGYAGYIDGGASQEEFYKFIKPILEKMDGTEELLVKLNREDLLRKQRTFDNGSIPHQIHLGELHAILRRQEDFYPFLKDNREKIEKILTFRIPYYVGPLARGNSRFAWMTRKSEETITPWNFEEVVDKGASAQSFIERMTNFDKNLPNEKVLPKHSLLYEYFTVYNELTKVKYVTEGMRKPAFLSGEQKKAIVDLLFKTNRKVTVKQLKEDYFKKIECFDSVEISGVEDRFNASLGTYHDLLKIIKDKDFLDNEENEDILEDIVLTLTLFEDREMIEERLKTYAHLFDDKVMKQLKRRRYTGWGRLSRKLINGIRDKQSGKTILDFLKSDGFANRNFMQLIHDDSLTFKEDIQKAQVSGQGDSLHEHIANLAGSPAIKKGILQTVKVVDELVKVMGRHKPENIVIEMARENQTTQKGQKNSRERMKRIEEGIKELGSQILKEHPVENTQLQNEKLYLYYLQNGRDMYVDQELDINRLSDYDVDHIVPQSFLKDDSIDNKVLTRSDKARGKSDNVPSEEVVKKMKNYWRQLLNAKLITQRKFDNLTKAERGGLSELDKAGFIKRQLVETRQITKHVAQILDSRMNTKYDENDKLIREVKVITLKSKLVSDFRKDFQFYKVREINNYHHAHDAYLNAVVGTALIKKYPKLESEFVYGDYKVYDVRKMIAKSEQEIGKATAKYFFYSNIMNFFKTEITLANGEIRKRPLIETNGETGEIVWDKGRDFATVRKVLSMPQVNIVKKTEVQTGGFSKESILPKRNSDKLIARKKDWDPKKYGGFDSPTVAYSVLVVAKVEKGKSKKLKSVKELLGITIMERSSFEKNPIDFLEAKGYKEVKKDLIIKLPKYSLFELENGRKRMLASAGELQKGNELALPSKYVNFLYLASHYEKLKGSPEDNEQKQLFVEQHKHYLDEIIEQISEFSKRVILADANLDKVLSAYNKHRDKPIREQAENIIHLFTLTNLGAPAAFKYFDTTIDRKRYTSTKEVLDATLIHQSITGLYETRIDLSQLGGDGGGGSEAAAKGGGGGVQEISDSRPMLHIYLNGRRFLGLLDTGADKTCIAGRDWPANWPIHQTESSLQGLGMACGVARSSQPLRWQHEDKSGIIHPFVIPTLPFTLWGRDIMKDIKVRLMTDSPDDSQDLMIGAIESNLFADQISWKSDQPVWLNQWPLKQEKLQALQQLVTEQLQLGHLEESNSPWNTPVFVIKKKSGKWRLLQDLRAVNATMHDMGALQPGLPSPVAVPKGWEIIIIDLQDCFFNIKLHPEDCKRFAFSVPSPNFKRPYQRFQWKVLPQGMKNSPTLCQKFVDKAILTVRDKYQDSYIVHYMDDILLAHPSRSIVDEILTSMIQALNKHGLVVSTEKIQKYDNLKYLGTHIQGDSVSYQKLQIRTDKLRTLNDFQKLLGNINWIRPFLKLTTGELKPLFEILNGDSNPISTRKLTPEACKALQLMNERLSTARVKRLDLSQPWSLCILKTEYTPTACLWQDGVVEWIHLPHISPKVITPYDIFCTQLIIKGRHRSKELFSKDPDYIVVPYTKVQFDLLLQEKEDWPISLLGFLGEVHFHLPKDPLLTFTLQTAIIFPHMTSTTPLEKGIVIFTDGSANGRSVTYIQGREPIIKENTQNTAQQAEIVAVITAFEEVSQPFNLYTDSKYVTGLFPEIETATLSPRTKIYTELKHLQRLIHKRQEKFYIGHIRGHTGLPGPLAQGNAYADSLTRILTAAGKRTADGSEFEKRTADGSEFESPKKKAKVE

SEQ ID NO: 3155 - protein, 2114 aa, synthetic construct
MPAAKRVKLDGGDKKYSIGLDIGTNSVGWAVITDEYKVPSKKFKVLGNTDRHSIKKNLIGALLFDSGETAEATRLKRTARRRYTRRKNRICYLQEIFSNEMAKVDDSFFHRLEESFLVEEDKKHERHPIFGNIVDEVAYHEKYPTIYHLRKKLVDSTDKADLRLIYLALAHMIKFRGHFLIEGDLNPDNSDVDKLFIQLVQTYNQLFEENPINASGVDAKAILSARLSKSRRLENLIAQLPGEKKNGLFGNLIALSLGLTPNFKSNFDLAEDAKLQLSKDTYDDDLDNLLAQIGDQYADLFLAAKNLSDAILLSDILRVNTEITKAPLSASMIKRYDEHHQDLTLLKALVRQQLPEKYKEIFFDQSKNGYAGYIDGGASQEEFYKFIKPILEKMDGTEELLVKLNREDLLRKQRTFDNGSIPHQIHLGELHAILRRQEDFYPFLKDNREKIEKILTFRIPYYVGPLARGNSRFAWMTRKSEETITPWNFEEVVDKGASAQSFIERMTNFDKNLPNEKVLPKHSLLYEYFTVYNELTKVKYVTEGMRKPAFLSGEQKKAIVDLLFKTNRKVTVKQLKEDYFKKIECFDSVEISGVEDRFNASLGTYHDLLKIIKDKDFLDNEENEDILEDIVLTLTLFEDREMIEERLKTYAHLFDDKVMKQLKRRRYTGWGRLSRKLINGIRDKQSGKTILDFLKSDGFANRNFMQLIHDDSLTFKEDIQKAQVSGQGDSLHEHIANLAGSPAIKKGILQTVKVVDELVKVMGRHKPENIVIEMARENQTTQKGQKNSRERMKRIEEGIKELGSQILKEHPVENTQLQNEKLYLYYLQNGRDMYVDQELDINRLSDYDVDHIVPQSFLKDDSIDNKVLTRSDKARGKSDNVPSEEVVKKMKNYWRQLLNAKLITQRKFDNLTKAERGGLSELDKAGFIKRQLVETRQITKHVAQILDSRMNTKYDENDKLIREVKVITLKSKLVSDFRKDFQFYKVREINNYHHAHDAYLNAVVGTALIKKYPKLESEFVYGDYKVYDVRKMIAKSEQEIGKATAKYFFYSNIMNFFKTEITLANGEIRKRPLIETNGETGEIVWDKGRDFATVRKVLSMPQVNIVKKTEVQTGGFSKESILPKRNSDKLIARKKDWDPKKYGGFDSPTVAYSVLVVAKVEKGKSKKLKSVKELLGITIMERSSFEKNPIDFLEAKGYKEVKKDLIIKLPKYSLFELENGRKRMLASAGELQKGNELALPSKYVNFLYLASHYEKLKGSPEDNEQKQLFVEQHKHYLDEIIEQISEFSKRVILADANLDKVLSAYNKHRDKPIREQAENIIHLFTLTNLGAPAAFKYFDTTIDRKRYTSTKEVLDATLIHQSITGLYETRIDLSQLGGDGGPAPGGSGSSGGVQEISDSRPMLHIYLNGRRFLGLLDTGADKTCIAGRDWPANWPIHQTESSLQGLGMACGVARSSQPLRWQHEDKSGIIHPFVIPTLPFTLWGRDIMKDIKVRLMTDSPDDSQDLMIGAIESNLFADQISWKSDQPVWLNQWPLKQEKLQALQQLVTEQLQLGHLEESNSPWNTPVFVIKKKSGKWRLLQDLRAVNATMHDMGALQPGLPSPVAVPKGWEIIIIDLQDCFFNIKLHPEDCKRFAFSVPSPNFKRPYQRFQWKVLPQGMKNSPTLCQKFVDKAILTVRDKYQDSYIVHYMDDILLAHPSRSIVDEILTSMIQALNKHGLVVSTEKIQKYDNLKYLGTHIQGDSVSYQKLQIRTDKLRTLNDFQKLLGNINWIRPFLKLTTGELKPLFEILNGDSNPISTRKLTPEACKALQLMNERLSTARVKRLDLSQPWSLCILKTEYTPTACLWQDGVVEWIHLPHISPKVITPYDIFCTQLIIKGRHRSKELFSKDPDYIVVPYTKVQFDLLLQEKEDWPISLLGFLGEVHFHLPKDPLLTFTLQTAIIFPHMTSTTPLEKGIVIFTDGSANGRSVTYIQGREPIIKENTQNTAQQAEIVAVITAFEEVSQPFNLYTDSKYVTGLFPEIETATLSPRTKIYTELKHLQRLIHKRQEKFYIGHIRGHTGLPGPLAQGNAYADSLTRILTAAGKRTADGSEFEKRTADGSEFESPKKKAKVE

SEQ ID NO: 3156 - protein, 2116 aa, synthetic construct
MPAAKRVKLDGGDKKYSIGLDIGTNSVGWAVITDEYKVPSKKFKVLGNTDRHSIKKNLIGALLFDSGETAEATRLKRTARRRYTRRKNRICYLQEIFSNEMAKVDDSFFHRLEESFLVEEDKKHERHPIFGNIVDEVAYHEKYPTIYHLRKKLVDSTDKADLRLIYLALAHMIKFRGHFLIEGDLNPDNSDVDKLFIQLVQTYNQLFEENPINASGVDAKAILSARLSKSRRLENLIAQLPGEKKNGLFGNLIALSLGLTPNFKSNFDLAEDAKLQLSKDTYDDDLDNLLAQIGDQYADLFLAAKNLSDAILLSDILRVNTEITKAPLSASMIKRYDEHHQDLTLLKALVRQQLPEKYKEIFFDQSKNGYAGYIDGGASQEEFYKFIKPILEKMDGTEELLVKLNREDLLRKQRTFDNGSIPHQIHLGELHAILRRQEDFYPFLKDNREKIEKILTFRIPYYVGPLARGNSRFAWMTRKSEETITPWNFEEVVDKGASAQSFIERMTNFDKNLPNEKVLPKHSLLYEYFTVYNELTKVKYVTEGMRKPAFLSGEQKKAIVDLLFKTNRKVTVKQLKEDYFKKIECFDSVEISGVEDRFNASLGTYHDLLKIIKDKDFLDNEENEDILEDIVLTLTLFEDREMIEERLKTYAHLFDDKVMKQLKRRRYTGWGRLSRKLINGIRDKQSGKTILDFLKSDGFANRNFMQLIHDDSLTFKEDIQKAQVSGQGDSLHEHIANLAGSPAIKKGILQTVKVVDELVKVMGRHKPENIVIEMARENQTTQKGQKNSRERMKRIEEGIKELGSQILKEHPVENTQLQNEKLYLYYLQNGRDMYVDQELDINRLSDYDVDHIVPQSFLKDDSIDNKVLTRSDKARGKSDNVPSEEVVKKMKNYWRQLLNAKLITQRKFDNLTKAERGGLSELDKAGFIKRQLVETRQITKHVAQILDSRMNTKYDENDKLIREVKVITLKSKLVSDFRKDFQFYKVREINNYHHAHDAYLNAVVGTALIKKYPKLESEFVYGDYKVYDVRKMIAKSEQEIGKATAKYFFYSNIMNFFKTEITLANGEIRKRPLIETNGETGEIVWDKGRDFATVRKVLSMPQVNIVKKTEVQTGGFSKESILPKRNSDKLIARKKDWDPKKYGGFDSPTVAYSVLVVAKVEKGKSKKLKSVKELLGITIMERSSFEKNPIDFLEAKGYKEVKKDLIIKLPKYSLFELENGRKRMLASAGELQKGNELALPSKYVNFLYLASHYEKLKGSPEDNEQKQLFVEQHKHYLDEIIEQISEFSKRVILADANLDKVLSAYNKHRDKPIREQAENIIHLFTLTNLGAPAAFKYFDTTIDRKRYTSTKEVLDATLIHQSITGLYETRIDLSQLGGDGGEAAAKGGGGGSGGVQEISDSRPMLHIYLNGRRFLGLLDTGADKTCIAGRDWPANWPIHQTESSLQGLGMACGVARSSQPLRWQHEDKSGIIHPFVIPTLPFTLWGRDIMKDIKVRLMTDSPDDSQDLMIGAIESNLFADQISWKSDQPVWLNQWPLKQEKLQALQQLVTEQLQLGHLEESNSPWNTPVFVIKKKSGKWRLLQDLRAVNATMHDMGALQPGLPSPVAVPKGWEIIIIDLQDCFFNIKLHPEDCKRFAFSVPSPNFKRPYQRFQWKVLPQGMKNSPTLCQKFVDKAILTVRDKYQDSYIVHYMDDILLAHPSRSIVDEILTSMIQALNKHGLVVSTEKIQKYDNLKYLGTHIQGDSVSYQKLQIRTDKLRTLNDFQKLLGNINWIRPFLKLTTGELKPLFEILNGDSNPISTRKLTPEACKALQLMNERLSTARVKRLDLSQPWSLCILKTEYTPTACLWQDGVVEWIHLPHISPKVITPYDIFCTQLIIKGRHRSKELFSKDPDYIVVPYTKVQFDLLLQEKEDWPISLLGFLGEVHFHLPKDPLLTFTLQTAIIFPHMTSTTPLEKGIVIFTDGSANGRSVTYIQGREPIIKENTQNTAQQAEIVAVITAFEEVSQPFNLYTDSKYVTGLFPEIETATLSPRTKIYTELKHLQRLIHKRQEKFYIGHIRGHTGLPGPLAQGNAYADSLTRILTAAGKRTADGSEFEKRTADGSEFESPKKKAKVE

SEQ ID NO: 3157 - protein, 2125 aa, synthetic construct
MPAAKRVKLDGGDKKYSIGLDIGTNSVGWAVITDEYKVPSKKFKVLGNTDRHSIKKNLIGALLFDSGETAEATRLKRTARRRYTRRKNRICYLQEIFSNEMAKVDDSFFHRLEESFLVEEDKKHERHPIFGNIVDEVAYHEKYPTIYHLRKKLVDSTDKADLRLIYLALAHMIKFRGHFLIEGDLNPDNSDVDKLFIQLVQTYNQLFEENPINASGVDAKAILSARLSKSRRLENLIAQLPGEKKNGLFGNLIALSLGLTPNFKSNFDLAEDAKLQLSKDTYDDDLDNLLAQIGDQYADLFLAAKNLSDAILLSDILRVNTEITKAPLSASMIKRYDEHHQDLTLLKALVRQQLPEKYKEIFFDQSKNGYAGYIDGGASQEEFYKFIKPILEKMDGTEELLVKLNREDLLRKQRTFDNGSIPHQIHLGELHAILRRQEDFYPFLKDNREKIEKILTFRIPYYVGPLARGNSRFAWMTRKSEETITPWNFEEVVDKGASAQSFIERMTNFDKNLPNEKVLPKHSLLYEYFTVYNELTKVKYVTEGMRKPAFLSGEQKKAIVDLLFKTNRKVTVKQLKEDYFKKIECFDSVEISGVEDRFNASLGTYHDLLKIIKDKDFLDNEENEDILEDIVLTLTLFEDREMIEERLKTYAHLFDDKVMKQLKRRRYTGWGRLSRKLINGIRDKQSGKTILDFLKSDGFANRNFMQLIHDDSLTFKEDIQKAQVSGQGDSLHEHIANLAGSPAIKKGILQTVKVVDELVKVMGRHKPENIVIEMARENQTTQKGQKNSRERMKRIEEGIKELGSQILKEHPVENTQLQNEKLYLYYLQNGRDMYVDQELDINRLSDYDVDHIVPQSFLKDDSIDNKVLTRSDKARGKSDNVPSEEVVKKMKNYWRQLLNAKLITQRKFDNLTKAERGGLSELDKAGFIKRQLVETRQITKHVAQILDSRMNTKYDENDKLIREVKVITLKSKLVSDFRKDFQFYKVREINNYHHAHDAYLNAVVGTALIKKYPKLESEFVYGDYKVYDVRKMIAKSEQEIGKATAKYFFYSNIMNFFKTEITLANGEIRKRPLIETNGETGEIVWDKGRDFATVRKVLSMPQVNIVKKTEVQTGGFSKESILPKRNSDKLIARKKDWDPKKYGGFDSPTVAYSVLVVAKVEKGKSKKLKSVKELLGITIMERSSFEKNPIDFLEAKGYKEVKKDLIIKLPKYSLFELENGRKRMLASAGELQKGNELALPSKYVNFLYLASHYEKLKGSPEDNEQKQLFVEQHKHYLDEIIEQISEFSKRVILADANLDKVLSAYNKHRDKPIREQAENIIHLFTLTNLGAPAAFKYFDTTIDRKRYTSTKEVLDATLIHQSITGLYETRIDLSQLGGDGGEAAAKEAAAKEAAAKEAAAKGGVQEISDSRPMLHIYLNGRRFLGLLDTGADKTCIAGRDWPANWPIHQTESSLQGLGMACGVARSSQPLRWQHEDKSGIIHPFVIPTLPFTLWGRDIMKDIKVRLMTDSPDDSQDLMIGAIESNLFADQISWKSDQPVWLNQWPLKQEKLQALQQLVTEQLQLGHLEESNSPWNTPVFVIKKKSGKWRLLQDLRAVNATMHDMGALQPGLPSPVAVPKGWEIIIIDLQDCFFNIKLHPEDCKRFAFSVPSPNFKRPYQRFQWKVLPQGMKNSPTLCQKFVDKAILTVRDKYQDSYIVHYMDDILLAHPSRSIVDEILTSMIQALNKHGLVVSTEKIQKYDNLKYLGTHIQGDSVSYQKLQIRTDKLRTLNDFQKLLGNINWIRPFLKLTTGELKPLFEILNGDSNPISTRKLTPEACKALQLMNERLSTARVKRLDLSQPWSLCILKTEYTPTACLWQDGVVEWIHLPHISPKVITPYDIFCTQLIIKGRHRSKELFSKDPDYIVVPYTKVQFDLLLQEKEDWPISLLGFLGEVHFHLPKDPLLTFTLQTAIIFPHMTSTTPLEKGIVIFTDGSANGRSVTYIQGREPIIKENTQNTAQQAEIVAVITAFEEVSQPFNLYTDSKYVTGLFPEIETATLSPRTKIYTELKHLQRLIHKRQEKFYIGHIRGHTGLPGPLAQGNAYADSLTRILTAAGKRTADGSEFEKRTADGSEFESPKKKAKVE

SEQ ID NO: 3158 - protein, 2116 aa, synthetic construct
MPAAKRVKLDGGDKKYSIGLDIGTNSVGWAVITDEYKVPSKKFKVLGNTDRHSIKKNLIGALLFDSGETAEATRLKRTARRRYTRRKNRICYLQEIFSNEMAKVDDSFFHRLEESFLVEEDKKHERHPIFGNIVDEVAYHEKYPTIYHLRKKLVDSTDKADLRLIYLALAHMIKFRGHFLIEGDLNPDNSDVDKLFIQLVQTYNQLFEENPINASGVDAKAILSARLSKSRRLENLIAQLPGEKKNGLFGNLIALSLGLTPNFKSNFDLAEDAKLQLSKDTYDDDLDNLLAQIGDQYADLFLAAKNLSDAILLSDILRVNTEITKAPLSASMIKRYDEHHQDLTLLKALVRQQLPEKYKEIFFDQSKNGYAGYIDGGASQEEFYKFIKPILEKMDGTEELLVKLNREDLLRKQRTFDNGSIPHQIHLGELHAILRRQEDFYPFLKDNREKIEKILTFRIPYYVGPLARGNSRFAWMTRKSEETITPWNFEEVVDKGASAQSFIERMTNFDKNLPNEKVLPKHSLLYEYFTVYNELTKVKYVTEGMRKPAFLSGEQKKAIVDLLFKTNRKVTVKQLKEDYFKKIECFDSVEISGVEDRFNASLGTYHDLLKIIKDKDFLDNEENEDILEDIVLTLTLFEDREMIEERLKTYAHLFDDKVMKQLKRRRYTGWGRLSRKLINGIRDKQSGKTILDFLKSDGFANRNFMQLIHDDSLTFKEDIQKAQVSGQGDSLHEHIANLAGSPAIKKGILQTVKVVDELVKVMGRHKPENIVIEMARENQTTQKGQKNSRERMKRIEEGIKELGSQILKEHPVENTQLQNEKLYLYYLQNGRDMYVDQELDINRLSDYDVDHIVPQSFLKDDSIDNKVLTRSDKARGKSDNVPSEEVVKKMKNYWRQLLNAKLITQRKFDNLTKAERGGLSELDKAGFIKRQLVETRQITKHVAQILDSRMNTKYDENDKLIREVKVITLKSKLVSDFRKDFQFYKVREINNYHHAHDAYLNAVVGTALIKKYPKLESEFVYGDYKVYDVRKMIAKSEQEIGKATAKYFFYSNIMNFFKTEITLANGEIRKRPLIETNGETGEIVWDKGRDFATVRKVLSMPQVNIVKKTEVQTGGFSKESILPKRNSDKLIARKKDWDPKKYGGFDSPTVAYSVLVVAKVEKGKSKKLKSVKELLGITIMERSSFEKNPIDFLEAKGYKEVKKDLIIKLPKYSLFELENGRKRMLASAGELQKGNELALPSKYVNFLYLASHYEKLKGSPEDNEQKQLFVEQHKHYLDEIIEQISEFSKRVILADANLDKVLSAYNKHRDKPIREQAENIIHLFTLTNLGAPAAFKYFDTTIDRKRYTSTKEVLDATLIHQSITGLYETRIDLSQLGGDGGGGSEAAAKGSSGGVQEISDSRPMLHIYLNGRRFLGLLDTGADKTCIAGRDWPANWPIHQTESSLQGLGMACGVARSSQPLRWQHEDKSGIIHPFVIPTLPFTLWGRDIMKDIKVRLMTDSPDDSQDLMIGAIESNLFADQISWKSDQPVWLNQWPLKQEKLQALQQLVTEQLQLGHLEESNSPWNTPVFVIKKKSGKWRLLQDLRAVNATMHDMGALQPGLPSPVAVPKGWEIIIIDLQDCFFNIKLHPEDCKRFAFSVPSPNFKRPYQRFQWKVLPQGMKNSPTLCQKFVDKAILTVRDKYQDSYIVHYMDDILLAHPSRSIVDEILTSMIQALNKHGLVVSTEKIQKYDNLKYLGTHIQGDSVSYQKLQIRTDKLRTLNDFQKLLGNINWIRPFLKLTTGELKPLFEILNGDSNPISTRKLTPEACKALQLMNERLSTARVKRLDLSQPWSLCILKTEYTPTACLWQDGVVEWIHLPHISPKVITPYDIFCTQLIIKGRHRSKELFSKDPDYIVVPYTKVQFDLLLQEKEDWPISLLGFLGEVHFHLPKDPLLTFTLQTAIIFPHMTSTTPLEKGIVIFTDGSANGRSVTYIQGREPIIKENTQNTAQQAEIVAVITAFEEVSQPFNLYTDSKYVTGLFPEIETATLSPRTKIYTELKHLQRLIHKRQEKFYIGHIRGHTGLPGPLAQGNAYADSLTRILTAAGKRTADGSEFEKRTADGSEFESPKKKAKVE

SEQ ID NO: 3159 - protein, 2114 aa, synthetic construct
MPAAKRVKLDGGDKKYSIGLDIGTNSVGWAVITDEYKVPSKKFKVLGNTDRHSIKKNLIGALLFDSGETAEATRLKRTARRRYTRRKNRICYLQEIFSNEMAKVDDSFFHRLEESFLVEEDKKHERHPIFGNIVDEVAYHEKYPTIYHLRKKLVDSTDKADLRLIYLALAHMIKFRGHFLIEGDLNPDNSDVDKLFIQLVQTYNQLFEENPINASGVDAKAILSARLSKSRRLENLIAQLPGEKKNGLFGNLIALSLGLTPNFKSNFDLAEDAKLQLSKDTYDDDLDNLLAQIGDQYADLFLAAKNLSDAILLSDILRVNTEITKAPLSASMIKRYDEHHQDLTLLKALVRQQLPEKYKEIFFDQSKNGYAGYIDGGASQEEFYKFIKPILEKMDGTEELLVKLNREDLLRKQRTFDNGSIPHQIHLGELHAILRRQEDFYPFLKDNREKIEKILTFRIPYYVGPLARGNSRFAWMTRKSEETITPWNFEEVVDKGASAQSFIERMTNFDKNLPNEKVLPKHSLLYEYFTVYNELTKVKYVTEGMRKPAFLSGEQKKAIVDLLFKTNRKVTVKQLKEDYFKKIECFDSVEISGVEDRFNASLGTYHDLLKIIKDKDFLDNEENEDILEDIVLTLTLFEDREMIEERLKTYAHLFDDKVMKQLKRRRYTGWGRLSRKLINGIRDKQSGKTILDFLKSDGFANRNFMQLIHDDSLTFKEDIQKAQVSGQGDSLHEHIANLAGSPAIKKGILQTVKVVDELVKVMGRHKPENIVIEMARENQTTQKGQKNSRERMKRIEEGIKELGSQILKEHPVENTQLQNEKLYLYYLQNGRDMYVDQELDINRLSDYDVDHIVPQSFLKDDSIDNKVLTRSDKARGKSDNVPSEEVVKKMKNYWRQLLNAKLITQRKFDNLTKAERGGLSELDKAGFIKRQLVETRQITKHVAQILDSRMNTKYDENDKLIREVKVITLKSKLVSDFRKDFQFYKVREINNYHHAHDAYLNAVVGTALIKKYPKLESEFVYGDYKVYDVRKMIAKSEQEIGKATAKYFFYSNIMNFFKTEITLANGEIRKRPLIETNGETGEIVWDKGRDFATVRKVLSMPQVNIVKKTEVQTGGFSKESILPKRNSDKLIARKKDWDPKKYGGFDSPTVAYSVLVVAKVEKGKSKKLKSVKELLGITIMERSSFEKNPIDFLEAKGYKEVKKDLIIKLPKYSLFELENGRKRMLASAGELQKGNELALPSKYVNFLYLASHYEKLKGSPEDNEQKQLFVEQHKHYLDEIIEQISEFSKRVILADANLDKVLSAYNKHRDKPIREQAENIIHLFTLTNLGAPAAFKYFDTTIDRKRYTSTKEVLDATLIHQSITGLYETRIDLSQLGGDGGGGGGSSGGSGGVQEISDSRPMLHIYLNGRRFLGLLDTGADKTCIAGRDWPANWPIHQTESSLQGLGMACGVARSSQPLRWQHEDKSGIIHPFVIPTLPFTLWGRDIMKDIKVRLMTDSPDDSQDLMIGAIESNLFADQISWKSDQPVWLNQWPLKQEKLQALQQLVTEQLQLGHLEESNSPWNTPVFVIKKKSGKWRLLQDLRAVNATMHDMGALQPGLPSPVAVPKGWEIIIIDLQDCFFNIKLHPEDCKRFAFSVPSPNFKRPYQRFQWKVLPQGMKNSPTLCQKFVDKAILTVRDKYQDSYIVHYMDDILLAHPSRSIVDEILTSMIQALNKHGLVVSTEKIQKYDNLKYLGTHIQGDSVSYQKLQIRTDKLRTLNDFQKLLGNINWIRPFLKLTTGELKPLFEILNGDSNPISTRKLTPEACKALQLMNERLSTARVKRLDLSQPWSLCILKTEYTPTACLWQDGVVEWIHLPHISPKVITPYDIFCTQLIIKGRHRSKELFSKDPDYIVVPYTKVQFDLLLQEKEDWPISLLGFLGEVHFHLPKDPLLTFTLQTAIIFPHMTSTTPLEKGIVIFTDGSANGRSVTYIQGREPIIKENTQNTAQQAEIVAVITAFEEVSQPFNLYTDSKYVTGLFPEIETATLSPRTKIYTELKHLQRLIHKRQEKFYIGHIRGHTGLPGPLAQGNAYADSLTRILTAAGKRTADGSEFEKRTADGSEFESPKKKAKVE

SEQ ID NO: 3160 - protein, 2111 aa, synthetic construct
MPAAKRVKLDGGDKKYSIGLDIGTNSVGWAVITDEYKVPSKKFKVLGNTDRHSIKKNLIGALLFDSGETAEATRLKRTARRRYTRRKNRICYLQEIFSNEMAKVDDSFFHRLEESFLVEEDKKHERHPIFGNIVDEVAYHEKYPTIYHLRKKLVDSTDKADLRLIYLALAHMIKFRGHFLIEGDLNPDNSDVDKLFIQLVQTYNQLFEENPINASGVDAKAILSARLSKSRRLENLIAQLPGEKKNGLFGNLIALSLGLTPNFKSNFDLAEDAKLQLSKDTYDDDLDNLLAQIGDQYADLFLAAKNLSDAILLSDILRVNTEITKAPLSASMIKRYDEHHQDLTLLKALVRQQLPEKYKEIFFDQSKNGYAGYIDGGASQEEFYKFIKPILEKMDGTEELLVKLNREDLLRKQRTFDNGSIPHQIHLGELHAILRRQEDFYPFLKDNREKIEKILTFRIPYYVGPLARGNSRFAWMTRKSEETITPWNFEEVVDKGASAQSFIERMTNFDKNLPNEKVLPKHSLLYEYFTVYNELTKVKYVTEGMRKPAFLSGEQKKAIVDLLFKTNRKVTVKQLKEDYFKKIECFDSVEISGVEDRFNASLGTYHDLLKIIKDKDFLDNEENEDILEDIVLTLTLFEDREMIEERLKTYAHLFDDKVMKQLKRRRYTGWGRLSRKLINGIRDKQSGKTILDFLKSDGFANRNFMQLIHDDSLTFKEDIQKAQVSGQGDSLHEHIANLAGSPAIKKGILQTVKVVDELVKVMGRHKPENIVIEMARENQTTQKGQKNSRERMKRIEEGIKELGSQILKEHPVENTQLQNEKLYLYYLQNGRDMYVDQELDINRLSDYDVDHIVPQSFLKDDSIDNKVLTRSDKARGKSDNVPSEEVVKKMKNYWRQLLNAKLITQRKFDNLTKAERGGLSELDKAGFIKRQLVETRQITKHVAQILDSRMNTKYDENDKLIREVKVITLKSKLVSDFRKDFQFYKVREINNYHHAHDAYLNAVVGTALIKKYPKLESEFVYGDYKVYDVRKMIAKSEQEIGKATAKYFFYSNIMNFFKTEITLANGEIRKRPLIETNGETGEIVWDKGRDFATVRKVLSMPQVNIVKKTEVQTGGFSKESILPKRNSDKLIARKKDWDPKKYGGFDSPTVAYSVLVVAKVEKGKSKKLKSVKELLGITIMERSSFEKNPIDFLEAKGYKEVKKDLIIKLPKYSLFELENGRKRMLASAGELQKGNELALPSKYVNFLYLASHYEKLKGSPEDNEQKQLFVEQHKHYLDEIIEQISEFSKRVILADANLDKVLSAYNKHRDKPIREQAENIIHLFTLTNLGAPAAFKYFDTTIDRKRYTSTKEVLDATLIHQSITGLYETRIDLSQLGGDGGGGSPAPGGVQEISDSRPMLHIYLNGRRFLGLLDTGADKTCIAGRDWPANWPIHQTESSLQGLGMACGVARSSQPLRWQHEDKSGIIHPFVIPTLPFTLWGRDIMKDIKVRLMTDSPDDSQDLMIGAIESNLFADQISWKSDQPVWLNQWPLKQEKLQALQQLVTEQLQLGHLEESNSPWNTPVFVIKKKSGKWRLLQDLRAVNATMHDMGALQPGLPSPVAVPKGWEIIIIDLQDCFFNIKLHPEDCKRFAFSVPSPNFKRPYQRFQWKVLPQGMKNSPTLCQKFVDKAILTVRDKYQDSYIVHYMDDILLAHPSRSIVDEILTSMIQALNKHGLVVSTEKIQKYDNLKYLGTHIQGDSVSYQKLQIRTDKLRTLNDFQKLLGNINWIRPFLKLTTGELKPLFEILNGDSNPISTRKLTPEACKALQLMNERLSTARVKRLDLSQPWSLCILKTEYTPTACLWQDGVVEWIHLPHISPKVITPYDIFCTQLIIKGRHRSKELFSKDPDYIVVPYTKVQFDLLLQEKEDWPISLLGFLGEVHFHLPKDPLLTFTLQTAIIFPHMTSTTPLEKGIVIFTDGSANGRSVTYIQGREPIIKENTQNTAQQAEIVAVITAFEEVSQPFNLYTDSKYVTGLFPEIETATLSPRTKIYTELKHLQRLIHKRQEKFYIGHIRGHTGLPGPLAQGNAYADSLTRILTAAGKRTADGSEFEKRTADGSEFESPKKKAKVE

SEQ ID NO: 3161 - protein, 2114 aa, synthetic construct
MPAAKRVKLDGGDKKYSIGLDIGTNSVGWAVITDEYKVPSKKFKVLGNTDRHSIKKNLIGALLFDSGETAEATRLKRTARRRYTRRKNRICYLQEIFSNEMAKVDDSFFHRLEESFLVEEDKKHERHPIFGNIVDEVAYHEKYPTIYHLRKKLVDSTDKADLRLIYLALAHMIKFRGHFLIEGDLNPDNSDVDKLFIQLVQTYNQLFEENPINASGVDAKAILSARLSKSRRLENLIAQLPGEKKNGLFGNLIALSLGLTPNFKSNFDLAEDAKLQLSKDTYDDDLDNLLAQIGDQYADLFLAAKNLSDAILLSDILRVNTEITKAPLSASMIKRYDEHHQDLTLLKALVRQQLPEKYKEIFFDQSKNGYAGYIDGGASQEEFYKFIKPILEKMDGTEELLVKLNREDLLRKQRTFDNGSIPHQIHLGELHAILRRQEDFYPFLKDNREKIEKILTFRIPYYVGPLARGNSRFAWMTRKSEETITPWNFEEVVDKGASAQSFIERMTNFDKNLPNEKVLPKHSLLYEYFTVYNELTKVKYVTEGMRKPAFLSGEQKKAIVDLLFKTNRKVTVKQLKEDYFKKIECFDSVEISGVEDRFNASLGTYHDLLKIIKDKDFLDNEENEDILEDIVLTLTLFEDREMIEERLKTYAHLFDDKVMKQLKRRRYTGWGRLSRKLINGIRDKQSGKTILDFLKSDGFANRNFMQLIHDDSLTFKEDIQKAQVSGQGDSLHEHIANLAGSPAIKKGILQTVKVVDELVKVMGRHKPENIVIEMARENQTTQKGQKNSRERMKRIEEGIKELGSQILKEHPVENTQLQNEKLYLYYLQNGRDMYVDQELDINRLSDYDVDHIVPQSFLKDDSIDNKVLTRSDKARGKSDNVPSEEVVKKMKNYWRQLLNAKLITQRKFDNLTKAERGGLSELDKAGFIKRQLVETRQITKHVAQILDSRMNTKYDENDKLIREVKVITLKSKLVSDFRKDFQFYKVREINNYHHAHDAYLNAVVGTALIKKYPKLESEFVYGDYKVYDVRKMIAKSEQEIGKATAKYFFYSNIMNFFKTEITLANGEIRKRPLIETNGETGEIVWDKGRDFATVRKVLSMPQVNIVKKTEVQTGGFSKESILPKRNSDKLIARKKDWDPKKYGGFDSPTVAYSVLVVAKVEKGKSKKLKSVKELLGITIMERSSFEKNPIDFLEAKGYKEVKKDLIIKLPKYSLFELENGRKRMLASAGELQKGNELALPSKYVNFLYLASHYEKLKGSPEDNEQKQLFVEQHKHYLDEIIEQISEFSKRVILADANLDKVLSAYNKHRDKPIREQAENIIHLFTLTNLGAPAAFKYFDTTIDRKRYTSTKEVLDATLIHQSITGLYETRIDLSQLGGDGGPAPGSSGGSGGVQEISDSRPMLHIYLNGRRFLGLLDTGADKTCIAGRDWPANWPIHQTESSLQGLGMACGVARSSQPLRWQHEDKSGIIHPFVIPTLPFTLWGRDIMKDIKVRLMTDSPDDSQDLMIGAIESNLFADQISWKSDQPVWLNQWPLKQEKLQALQQLVTEQLQLGHLEESNSPWNTPVFVIKKKSGKWRLLQDLRAVNATMHDMGALQPGLPSPVAVPKGWEIIIIDLQDCFFNIKLHPEDCKRFAFSVPSPNFKRPYQRFQWKVLPQGMKNSPTLCQKFVDKAILTVRDKYQDSYIVHYMDDILLAHPSRSIVDEILTSMIQALNKHGLVVSTEKIQKYDNLKYLGTHIQGDSVSYQKLQIRTDKLRTLNDFQKLLGNINWIRPFLKLTTGELKPLFEILNGDSNPISTRKLTPEACKALQLMNERLSTARVKRLDLSQPWSLCILKTEYTPTACLWQDGVVEWIHLPHISPKVITPYDIFCTQLIIKGRHRSKELFSKDPDYIVVPYTKVQFDLLLQEKEDWPISLLGFLGEVHFHLPKDPLLTFTLQTAIIFPHMTSTTPLEKGIVIFTDGSANGRSVTYIQGREPIIKENTQNTAQQAEIVAVITAFEEVSQPFNLYTDSKYVTGLFPEIETATLSPRTKIYTELKHLQRLIHKRQEKFYIGHIRGHTGLPGPLAQGNAYADSLTRILTAAGKRTADGSEFEKRTADGSEFESPKKKAKVE

SEQ ID NO: 3162 - protein, 2116 aa, synthetic construct
MPAAKRVKLDGGDKKYSIGLDIGTNSVGWAVITDEYKVPSKKFKVLGNTDRHSIKKNLIGALLFDSGETAEATRLKRTARRRYTRRKNRICYLQEIFSNEMAKVDDSFFHRLEESFLVEEDKKHERHPIFGNIVDEVAYHEKYPTIYHLRKKLVDSTDKADLRLIYLALAHMIKFRGHFLIEGDLNPDNSDVDKLFIQLVQTYNQLFEENPINASGVDAKAILSARLSKSRRLENLIAQLPGEKKNGLFGNLIALSLGLTPNFKSNFDLAEDAKLQLSKDTYDDDLDNLLAQIGDQYADLFLAAKNLSDAILLSDILRVNTEITKAPLSASMIKRYDEHHQDLTLLKALVRQQLPEKYKEIFFDQSKNGYAGYIDGGASQEEFYKFIKPILEKMDGTEELLVKLNREDLLRKQRTFDNGSIPHQIHLGELHAILRRQEDFYPFLKDNREKIEKILTFRIPYYVGPLARGNSRFAWMTRKSEETITPWNFEEVVDKGASAQSFIERMTNFDKNLPNEKVLPKHSLLYEYFTVYNELTKVKYVTEGMRKPAFLSGEQKKAIVDLLFKTNRKVTVKQLKEDYFKKIECFDSVEISGVEDRFNASLGTYHDLLKIIKDKDFLDNEENEDILEDIVLTLTLFEDREMIEERLKTYAHLFDDKVMKQLKRRRYTGWGRLSRKLINGIRDKQSGKTILDFLKSDGFANRNFMQLIHDDSLTFKEDIQKAQVSGQGDSLHEHIANLAGSPAIKKGILQTVKVVDELVKVMGRHKPENIVIEMARENQTTQKGQKNSRERMKRIEEGIKELGSQILKEHPVENTQLQNEKLYLYYLQNGRDMYVDQELDINRLSDYDVDHIVPQSFLKDDSIDNKVLTRSDKARGKSDNVPSEEVVKKMKNYWRQLLNAKLITQRKFDNLTKAERGGLSELDKAGFIKRQLVETRQITKHVAQILDSRMNTKYDENDKLIREVKVITLKSKLVSDFRKDFQFYKVREINNYHHAHDAYLNAVVGTALIKKYPKLESEFVYGDYKVYDVRKMIAKSEQEIGKATAKYFFYSNIMNFFKTEITLANGEIRKRPLIETNGETGEIVWDKGRDFATVRKVLSMPQVNIVKKTEVQTGGFSKESILPKRNSDKLIARKKDWDPKKYGGFDSPTVAYSVLVVAKVEKGKSKKLKSVKELLGITIMERSSFEKNPIDFLEAKGYKEVKKDLIIKLPKYSLFELENGRKRMLASAGELQKGNELALPSKYVNFLYLASHYEKLKGSPEDNEQKQLFVEQHKHYLDEIIEQISEFSKRVILADANLDKVLSAYNKHRDKPIREQAENIIHLFTLTNLGAPAAFKYFDTTIDRKRYTSTKEVLDATLIHQSITGLYETRIDLSQLGGDGGGGSGGGEAAAKGGVQEISDSRPMLHIYLNGRRFLGLLDTGADKTCIAGRDWPANWPIHQTESSLQGLGMACGVARSSQPLRWQHEDKSGIIHPFVIPTLPFTLWGRDIMKDIKVRLMTDSPDDSQDLMIGAIESNLFADQISWKSDQPVWLNQWPLKQEKLQALQQLVTEQLQLGHLEESNSPWNTPVFVIKKKSGKWRLLQDLRAVNATMHDMGALQPGLPSPVAVPKGWEIIIIDLQDCFFNIKLHPEDCKRFAFSVPSPNFKRPYQRFQWKVLPQGMKNSPTLCQKFVDKAILTVRDKYQDSYIVHYMDDILLAHPSRSIVDEILTSMIQALNKHGLVVSTEKIQKYDNLKYLGTHIQGDSVSYQKLQIRTDKLRTLNDFQKLLGNINWIRPFLKLTTGELKPLFEILNGDSNPISTRKLTPEACKALQLMNERLSTARVKRLDLSQPWSLCILKTEYTPTACLWQDGVVEWIHLPHISPKVITPYDIFCTQLIIKGRHRSKELFSKDPDYIVVPYTKVQFDLLLQEKEDWPISLLGFLGEVHFHLPKDPLLTFTLQTAIIFPHMTSTTPLEKGIVIFTDGSANGRSVTYIQGREPIIKENTQNTAQQAEIVAVITAFEEVSQPFNLYTDSKYVTGLFPEIETATLSPRTKIYTELKHLQRLIHKRQEKFYIGHIRGHTGLPGPLAQGNAYADSLTRILTAAGKRTADGSEFEKRTADGSEFESPKKKAKVE

SEQ ID NO: 3163 - protein, 2116 aa, synthetic construct
MPAAKRVKLDGGDKKYSIGLDIGTNSVGWAVITDEYKVPSKKFKVLGNTDRHSIKKNLIGALLFDSGETAEATRLKRTARRRYTRRKNRICYLQEIFSNEMAKVDDSFFHRLEESFLVEEDKKHERHPIFGNIVDEVAYHEKYPTIYHLRKKLVDSTDKADLRLIYLALAHMIKFRGHFLIEGDLNPDNSDVDKLFIQLVQTYNQLFEENPINASGVDAKAILSARLSKSRRLENLIAQLPGEKKNGLFGNLIALSLGLTPNFKSNFDLAEDAKLQLSKDTYDDDLDNLLAQIGDQYADLFLAAKNLSDAILLSDILRVNTEITKAPLSASMIKRYDEHHQDLTLLKALVRQQLPEKYKEIFFDQSKNGYAGYIDGGASQEEFYKFIKPILEKMDGTEELLVKLNREDLLRKQRTFDNGSIPHQIHLGELHAILRRQEDFYPFLKDNREKIEKILTFRIPYYVGPLARGNSRFAWMTRKSEETITPWNFEEVVDKGASAQSFIERMTNFDKNLPNEKVLPKHSLLYEYFTVYNELTKVKYVTEGMRKPAFLSGEQKKAIVDLLFKTNRKVTVKQLKEDYFKKIECFDSVEISGVEDRFNASLGTYHDLLKIIKDKDFLDNEENEDILEDIVLTLTLFEDREMIEERLKTYAHLFDDKVMKQLKRRRYTGWGRLSRKLINGIRDKQSGKTILDFLKSDGFANRNFMQLIHDDSLTFKEDIQKAQVSGQGDSLHEHIANLAGSPAIKKGILQTVKVVDELVKVMGRHKPENIVIEMARENQTTQKGQKNSRERMKRIEEGIKELGSQILKEHPVENTQLQNEKLYLYYLQNGRDMYVDQELDINRLSDYDVDHIVPQSFLKDDSIDNKVLTRSDKARGKSDNVPSEEVVKKMKNYWRQLLNAKLITQRKFDNLTKAERGGLSELDKAGFIKRQLVETRQITKHVAQILDSRMNTKYDENDKLIREVKVITLKSKLVSDFRKDFQFYKVREINNYHHAHDAYLNAVVGTALIKKYPKLESEFVYGDYKVYDVRKMIAKSEQEIGKATAKYFFYSNIMNFFKTEITLANGEIRKRPLIETNGETGEIVWDKGRDFATVRKVLSMPQVNIVKKTEVQTGGFSKESILPKRNSDKLIARKKDWDPKKYGGFDSPTVAYSVLVVAKVEKGKSKKLKSVKELLGITIMERSSFEKNPIDFLEAKGYKEVKKDLIIKLPKYSLFELENGRKRMLASAGELQKGNELALPSKYVNFLYLASHYEKLKGSPEDNEQKQLFVEQHKHYLDEIIEQISEFSKRVILADANLDKVLSAYNKHRDKPIREQAENIIHLFTLTNLGAPAAFKYFDTTIDRKRYTSTKEVLDATLIHQSITGLYETRIDLSQLGGDGGGGGGSSEAAAKGGVQEISDSRPMLHIYLNGRRFLGLLDTGADKTCIAGRDWPANWPIHQTESSLQGLGMACGVARSSQPLRWQHEDKSGIIHPFVIPTLPFTLWGRDIMKDIKVRLMTDSPDDSQDLMIGAIESNLFADQISWKSDQPVWLNQWPLKQEKLQALQQLVTEQLQLGHLEESNSPWNTPVFVIKKKSGKWRLLQDLRAVNATMHDMGALQPGLPSPVAVPKGWEIIIIDLQDCFFNIKLHPEDCKRFAFSVPSPNFKRPYQRFQWKVLPQGMKNSPTLCQKFVDKAILTVRDKYQDSYIVHYMDDILLAHPSRSIVDEILTSMIQALNKHGLVVSTEKIQKYDNLKYLGTHIQGDSVSYQKLQIRTDKLRTLNDFQKLLGNINWIRPFLKLTTGELKPLFEILNGDSNPISTRKLTPEACKALQLMNERLSTARVKRLDLSQPWSLCILKTEYTPTACLWQDGVVEWIHLPHISPKVITPYDIFCTQLIIKGRHRSKELFSKDPDYIVVPYTKVQFDLLLQEKEDWPISLLGFLGEVHFHLPKDPLLTFTLQTAIIFPHMTSTTPLEKGIVIFTDGSANGRSVTYIQGREPIIKENTQNTAQQAEIVAVITAFEEVSQPFNLYTDSKYVTGLFPEIETATLSPRTKIYTELKHLQRLIHKRQEKFYIGHIRGHTGLPGPLAQGNAYADSLTRILTAAGKRTADGSEFEKRTADGSEFESPKKKAKVE

SEQ ID NO: 3164 - protein, 2116 aa, synthetic construct
MPAAKRVKLDGGDKKYSIGLDIGTNSVGWAVITDEYKVPSKKFKVLGNTDRHSIKKNLIGALLFDSGETAEATRLKRTARRRYTRRKNRICYLQEIFSNEMAKVDDSFFHRLEESFLVEEDKKHERHPIFGNIVDEVAYHEKYPTIYHLRKKLVDSTDKADLRLIYLALAHMIKFRGHFLIEGDLNPDNSDVDKLFIQLVQTYNQLFEENPINASGVDAKAILSARLSKSRRLENLIAQLPGEKKNGLFGNLIALSLGLTPNFKSNFDLAEDAKLQLSKDTYDDDLDNLLAQIGDQYADLFLAAKNLSDAILLSDILRVNTEITKAPLSASMIKRYDEHHQDLTLLKALVRQQLPEKYKEIFFDQSKNGYAGYIDGGASQEEFYKFIKPILEKMDGTEELLVKLNREDLLRKQRTFDNGSIPHQIHLGELHAILRRQEDFYPFLKDNREKIEKILTFRIPYYVGPLARGNSRFAWMTRKSEETITPWNFEEVVDKGASAQSFIERMTNFDKNLPNEKVLPKHSLLYEYFTVYNELTKVKYVTEGMRKPAFLSGEQKKAIVDLLFKTNRKVTVKQLKEDYFKKIECFDSVEISGVEDRFNASLGTYHDLLKIIKDKDFLDNEENEDILEDIVLTLTLFEDREMIEERLKTYAHLFDDKVMKQLKRRRYTGWGRLSRKLINGIRDKQSGKTILDFLKSDGFANRNFMQLIHDDSLTFKEDIQKAQVSGQGDSLHEHIANLAGSPAIKKGILQTVKVVDELVKVMGRHKPENIVIEMARENQTTQKGQKNSRERMKRIEEGIKELGSQILKEHPVENTQLQNEKLYLYYLQNGRDMYVDQELDINRLSDYDVDHIVPQSFLKDDSIDNKVLTRSDKARGKSDNVPSEEVVKKMKNYWRQLLNAKLITQRKFDNLTKAERGGLSELDKAGFIKRQLVETRQITKHVAQILDSRMNTKYDENDKLIREVKVITLKSKLVSDFRKDFQFYKVREINNYHHAHDAYLNAVVGTALIKKYPKLESEFVYGDYKVYDVRKMIAKSEQEIGKATAKYFFYSNIMNFFKTEITLANGEIRKRPLIETNGETGEIVWDKGRDFATVRKVLSMPQVNIVKKTEVQTGGFSKESILPKRNSDKLIARKKDWDPKKYGGFDSPTVAYSVLVVAKVEKGKSKKLKSVKELLGITIMERSSFEKNPIDFLEAKGYKEVKKDLIIKLPKYSLFELENGRKRMLASAGELQKGNELALPSKYVNFLYLASHYEKLKGSPEDNEQKQLFVEQHKHYLDEIIEQISEFSKRVILADANLDKVLSAYNKHRDKPIREQAENIIHLFTLTNLGAPAAFKYFDTTIDRKRYTSTKEVLDATLIHQSITGLYETRIDLSQLGGDGGGGSPAPEAAAKGGVQEISDSRPMLHIYLNGRRFLGLLDTGADKTCIAGRDWPANWPIHQTESSLQGLGMACGVARSSQPLRWQHEDKSGIIHPFVIPTLPFTLWGRDIMKDIKVRLMTDSPDDSQDLMIGAIESNLFADQISWKSDQPVWLNQWPLKQEKLQALQQLVTEQLQLGHLEESNSPWNTPVFVIKKKSGKWRLLQDLRAVNATMHDMGALQPGLPSPVAVPKGWEIIIIDLQDCFFNIKLHPEDCKRFAFSVPSPNFKRPYQRFQWKVLPQGMKNSPTLCQKFVDKAILTVRDKYQDSYIVHYMDDILLAHPSRSIVDEILTSMIQALNKHGLVVSTEKIQKYDNLKYLGTHIQGDSVSYQKLQIRTDKLRTLNDFQKLLGNINWIRPFLKLTTGELKPLFEILNGDSNPISTRKLTPEACKALQLMNERLSTARVKRLDLSQPWSLCILKTEYTPTACLWQDGVVEWIHLPHISPKVITPYDIFCTQLIIKGRHRSKELFSKDPDYIVVPYTKVQFDLLLQEKEDWPISLLGFLGEVHFHLPKDPLLTFTLQTAIIFPHMTSTTPLEKGIVIFTDGSANGRSVTYIQGREPIIKENTQNTAQQAEIVAVITAFEEVSQPFNLYTDSKYVTGLFPEIETATLSPRTKIYTELKHLQRLIHKRQEKFYIGHIRGHTGLPGPLAQGNAYADSLTRILTAAGKRTADGSEFEKRTADGSEFESPKKKAKVE

SEQ ID NO: 3165 - protein, 2117 aa, synthetic construct
MPAAKRVKLDGGDKKYSIGLDIGTNSVGWAVITDEYKVPSKKFKVLGNTDRHSIKKNLIGALLFDSGETAEATRLKRTARRRYTRRKNRICYLQEIFSNEMAKVDDSFFHRLEESFLVEEDKKHERHPIFGNIVDEVAYHEKYPTIYHLRKKLVDSTDKADLRLIYLALAHMIKFRGHFLIEGDLNPDNSDVDKLFIQLVQTYNQLFEENPINASGVDAKAILSARLSKSRRLENLIAQLPGEKKNGLFGNLIALSLGLTPNFKSNFDLAEDAKLQLSKDTYDDDLDNLLAQIGDQYADLFLAAKNLSDAILLSDILRVNTEITKAPLSASMIKRYDEHHQDLTLLKALVRQQLPEKYKEIFFDQSKNGYAGYIDGGASQEEFYKFIKPILEKMDGTEELLVKLNREDLLRKQRTFDNGSIPHQIHLGELHAILRRQEDFYPFLKDNREKIEKILTFRIPYYVGPLARGNSRFAWMTRKSEETITPWNFEEVVDKGASAQSFIERMTNFDKNLPNEKVLPKHSLLYEYFTVYNELTKVKYVTEGMRKPAFLSGEQKKAIVDLLFKTNRKVTVKQLKEDYFKKIECFDSVEISGVEDRFNASLGTYHDLLKIIKDKDFLDNEENEDILEDIVLTLTLFEDREMIEERLKTYAHLFDDKVMKQLKRRRYTGWGRLSRKLINGIRDKQSGKTILDFLKSDGFANRNFMQLIHDDSLTFKEDIQKAQVSGQGDSLHEHIANLAGSPAIKKGILQTVKVVDELVKVMGRHKPENIVIEMARENQTTQKGQKNSRERMKRIEEGIKELGSQILKEHPVENTQLQNEKLYLYYLQNGRDMYVDQELDINRLSDYDVDHIVPQSFLKDDSIDNKVLTRSDKARGKSDNVPSEEVVKKMKNYWRQLLNAKLITQRKFDNLTKAERGGLSELDKAGFIKRQLVETRQITKHVAQILDSRMNTKYDENDKLIREVKVITLKSKLVSDFRKDFQFYKVREINNYHHAHDAYLNAVVGTALIKKYPKLESEFVYGDYKVYDVRKMIAKSEQEIGKATAKYFFYSNIMNFFKTEITLANGEIRKRPLIETNGETGEIVWDKGRDFATVRKVLSMPQVNIVKKTEVQTGGFSKESILPKRNSDKLIARKKDWDPKKYGGFDSPTVAYSVLVVAKVEKGKSKKLKSVKELLGITIMERSSFEKNPIDFLEAKGYKEVKKDLIIKLPKYSLFELENGRKRMLASAGELQKGNELALPSKYVNFLYLASHYEKLKGSPEDNEQKQLFVEQHKHYLDEIIEQISEFSKRVILADANLDKVLSAYNKHRDKPIREQAENIIHLFTLTNLGAPAAFKYFDTTIDRKRYTSTKEVLDATLIHQSITGLYETRIDLSQLGGDGGGSAGSAAGSGEFGGVQEISDSRPMLHIYLNGRRFLGLLDTGADKTCIAGRDWPANWPIHQTESSLQGLGMACGVARSSQPLRWQHEDKSGIIHPFVIPTLPFTLWGRDIMKDIKVRLMTDSPDDSQDLMIGAIESNLFADQISWKSDQPVWLNQWPLKQEKLQALQQLVTEQLQLGHLEESNSPWNTPVFVIKKKSGKWRLLQDLRAVNATMHDMGALQPGLPSPVAVPKGWEIIIIDLQDCFFNIKLHPEDCKRFAFSVPSPNFKRPYQRFQWKVLPQGMKNSPTLCQKFVDKAILTVRDKYQDSYIVHYMDDILLAHPSRSIVDEILTSMIQALNKHGLVVSTEKIQKYDNLKYLGTHIQGDSVSYQKLQIRTDKLRTLNDFQKLLGNINWIRPFLKLTTGELKPLFEILNGDSNPISTRKLTPEACKALQLMNERLSTARVKRLDLSQPWSLCILKTEYTPTACLWQDGVVEWIHLPHISPKVITPYDIFCTQLIIKGRHRSKELFSKDPDYIVVPYTKVQFDLLLQEKEDWPISLLGFLGEVHFHLPKDPLLTFTLQTAIIFPHMTSTTPLEKGIVIFTDGSANGRSVTYIQGREPIIKENTQNTAQQAEIVAVITAFEEVSQPFNLYTDSKYVTGLFPEIETATLSPRTKIYTELKHLQRLIHKRQEKFYIGHIRGHTGLPGPLAQGNAYADSLTRILTAAGKRTADGSEFEKRTADGSEFESPKKKAKVE

SEQ ID NO: 3166 - protein, 2111 aa, synthetic construct
MPAAKRVKLDGGDKKYSIGLDIGTNSVGWAVITDEYKVPSKKFKVLGNTDRHSIKKNLIGALLFDSGETAEATRLKRTARRRYTRRKNRICYLQEIFSNEMAKVDDSFFHRLEESFLVEEDKKHERHPIFGNIVDEVAYHEKYPTIYHLRKKLVDSTDKADLRLIYLALAHMIKFRGHFLIEGDLNPDNSDVDKLFIQLVQTYNQLFEENPINASGVDAKAILSARLSKSRRLENLIAQLPGEKKNGLFGNLIALSLGLTPNFKSNFDLAEDAKLQLSKDTYDDDLDNLLAQIGDQYADLFLAAKNLSDAILLSDILRVNTEITKAPLSASMIKRYDEHHQDLTLLKALVRQQLPEKYKEIFFDQSKNGYAGYIDGGASQEEFYKFIKPILEKMDGTEELLVKLNREDLLRKQRTFDNGSIPHQIHLGELHAILRRQEDFYPFLKDNREKIEKILTFRIPYYVGPLARGNSRFAWMTRKSEETITPWNFEEVVDKGASAQSFIERMTNFDKNLPNEKVLPKHSLLYEYFTVYNELTKVKYVTEGMRKPAFLSGEQKKAIVDLLFKTNRKVTVKQLKEDYFKKIECFDSVEISGVEDRFNASLGTYHDLLKIIKDKDFLDNEENEDILEDIVLTLTLFEDREMIEERLKTYAHLFDDKVMKQLKRRRYTGWGRLSRKLINGIRDKQSGKTILDFLKSDGFANRNFMQLIHDDSLTFKEDIQKAQVSGQGDSLHEHIANLAGSPAIKKGILQTVKVVDELVKVMGRHKPENIVIEMARENQTTQKGQKNSRERMKRIEEGIKELGSQILKEHPVENTQLQNEKLYLYYLQNGRDMYVDQELDINRLSDYDVDHIVPQSFLKDDSIDNKVLTRSDKARGKSDNVPSEEVVKKMKNYWRQLLNAKLITQRKFDNLTKAERGGLSELDKAGFIKRQLVETRQITKHVAQILDSRMNTKYDENDKLIREVKVITLKSKLVSDFRKDFQFYKVREINNYHHAHDAYLNAVVGTALIKKYPKLESEFVYGDYKVYDVRKMIAKSEQEIGKATAKYFFYSNIMNFFKTEITLANGEIRKRPLIETNGETGEIVWDKGRDFATVRKVLSMPQVNIVKKTEVQTGGFSKESILPKRNSDKLIARKKDWDPKKYGGFDSPTVAYSVLVVAKVEKGKSKKLKSVKELLGITIMERSSFEKNPIDFLEAKGYKEVKKDLIIKLPKYSLFELENGRKRMLASAGELQKGNELALPSKYVNFLYLASHYEKLKGSPEDNEQKQLFVEQHKHYLDEIIEQISEFSKRVILADANLDKVLSAYNKHRDKPIREQAENIIHLFTLTNLGAPAAFKYFDTTIDRKRYTSTKEVLDATLIHQSITGLYETRIDLSQLGGDGGGGGGGSGGVQEISDSRPMLHIYLNGRRFLGLLDTGADKTCIAGRDWPANWPIHQTESSLQGLGMACGVARSSQPLRWQHEDKSGIIHPFVIPTLPFTLWGRDIMKDIKVRLMTDSPDDSQDLMIGAIESNLFADQISWKSDQPVWLNQWPLKQEKLQALQQLVTEQLQLGHLEESNSPWNTPVFVIKKKSGKWRLLQDLRAVNATMHDMGALQPGLPSPVAVPKGWEIIIIDLQDCFFNIKLHPEDCKRFAFSVPSPNFKRPYQRFQWKVLPQGMKNSPTLCQKFVDKAILTVRDKYQDSYIVHYMDDILLAHPSRSIVDEILTSMIQALNKHGLVVSTEKIQKYDNLKYLGTHIQGDSVSYQKLQIRTDKLRTLNDFQKLLGNINWIRPFLKLTTGELKPLFEILNGDSNPISTRKLTPEACKALQLMNERLSTARVKRLDLSQPWSLCILKTEYTPTACLWQDGVVEWIHLPHISPKVITPYDIFCTQLIIKGRHRSKELFSKDPDYIVVPYTKVQFDLLLQEKEDWPISLLGFLGEVHFHLPKDPLLTFTLQTAIIFPHMTSTTPLEKGIVIFTDGSANGRSVTYIQGREPIIKENTQNTAQQAEIVAVITAFEEVSQPFNLYTDSKYVTGLFPEIETATLSPRTKIYTELKHLQRLIHKRQEKFYIGHIRGHTGLPGPLAQGNAYADSLTRILTAAGKRTADGSEFEKRTADGSEFESPKKKAKVE

SEQ ID NO: 3167 - protein, 2113 aa, synthetic construct
MPAAKRVKLDGGDKKYSIGLDIGTNSVGWAVITDEYKVPSKKFKVLGNTDRHSIKKNLIGALLFDSGETAEATRLKRTARRRYTRRKNRICYLQEIFSNEMAKVDDSFFHRLEESFLVEEDKKHERHPIFGNIVDEVAYHEKYPTIYHLRKKLVDSTDKADLRLIYLALAHMIKFRGHFLIEGDLNPDNSDVDKLFIQLVQTYNQLFEENPINASGVDAKAILSARLSKSRRLENLIAQLPGEKKNGLFGNLIALSLGLTPNFKSNFDLAEDAKLQLSKDTYDDDLDNLLAQIGDQYADLFLAAKNLSDAILLSDILRVNTEITKAPLSASMIKRYDEHHQDLTLLKALVRQQLPEKYKEIFFDQSKNGYAGYIDGGASQEEFYKFIKPILEKMDGTEELLVKLNREDLLRKQRTFDNGSIPHQIHLGELHAILRRQEDFYPFLKDNREKIEKILTFRIPYYVGPLARGNSRFAWMTRKSEETITPWNFEEVVDKGASAQSFIERMTNFDKNLPNEKVLPKHSLLYEYFTVYNELTKVKYVTEGMRKPAFLSGEQKKAIVDLLFKTNRKVTVKQLKEDYFKKIECFDSVEISGVEDRFNASLGTYHDLLKIIKDKDFLDNEENEDILEDIVLTLTLFEDREMIEERLKTYAHLFDDKVMKQLKRRRYTGWGRLSRKLINGIRDKQSGKTILDFLKSDGFANRNFMQLIHDDSLTFKEDIQKAQVSGQGDSLHEHIANLAGSPAIKKGILQTVKVVDELVKVMGRHKPENIVIEMARENQTTQKGQKNSRERMKRIEEGIKELGSQILKEHPVENTQLQNEKLYLYYLQNGRDMYVDQELDINRLSDYDVDHIVPQSFLKDDSIDNKVLTRSDKARGKSDNVPSEEVVKKMKNYWRQLLNAKLITQRKFDNLTKAERGGLSELDKAGFIKRQLVETRQITKHVAQILDSRMNTKYDENDKLIREVKVITLKSKLVSDFRKDFQFYKVREINNYHHAHDAYLNAVVGTALIKKYPKLESEFVYGDYKVYDVRKMIAKSEQEIGKATAKYFFYSNIMNFFKTEITLANGEIRKRPLIETNGETGEIVWDKGRDFATVRKVLSMPQVNIVKKTEVQTGGFSKESILPKRNSDKLIARKKDWDPKKYGGFDSPTVAYSVLVVAKVEKGKSKKLKSVKELLGITIMERSSFEKNPIDFLEAKGYKEVKKDLIIKLPKYSLFELENGRKRMLASAGELQKGNELALPSKYVNFLYLASHYEKLKGSPEDNEQKQLFVEQHKHYLDEIIEQISEFSKRVILADANLDKVLSAYNKHRDKPIREQAENIIHLFTLTNLGAPAAFKYFDTTIDRKRYTSTKEVLDATLIHQSITGLYETRIDLSQLGGDGGGGGEAAAKGGVQEISDSRPMLHIYLNGRRFLGLLDTGADKTCIAGRDWPANWPIHQTESSLQGLGMACGVARSSQPLRWQHEDKSGIIHPFVIPTLPFTLWGRDIMKDIKVRLMTDSPDDSQDLMIGAIESNLFADQISWKSDQPVWLNQWPLKQEKLQALQQLVTEQLQLGHLEESNSPWNTPVFVIKKKSGKWRLLQDLRAVNATMHDMGALQPGLPSPVAVPKGWEIIIIDLQDCFFNIKLHPEDCKRFAFSVPSPNFKRPYQRFQWKVLPQGMKNSPTLCQKFVDKAILTVRDKYQDSYIVHYMDDILLAHPSRSIVDEILTSMIQALNKHGLVVSTEKIQKYDNLKYLGTHIQGDSVSYQKLQIRTDKLRTLNDFQKLLGNINWIRPFLKLTTGELKPLFEILNGDSNPISTRKLTPEACKALQLMNERLSTARVKRLDLSQPWSLCILKTEYTPTACLWQDGVVEWIHLPHISPKVITPYDIFCTQLIIKGRHRSKELFSKDPDYIVVPYTKVQFDLLLQEKEDWPISLLGFLGEVHFHLPKDPLLTFTLQTAIIFPHMTSTTPLEKGIVIFTDGSANGRSVTYIQGREPIIKENTQNTAQQAEIVAVITAFEEVSQPFNLYTDSKYVTGLFPEIETATLSPRTKIYTELKHLQRLIHKRQEKFYIGHIRGHTGLPGPLAQGNAYADSLTRILTAAGKRTADGSEFEKRTADGSEFESPKKKAKVE

SEQ ID NO: 3168 - protein, 2111 aa, synthetic construct
MPAAKRVKLDGGDKKYSIGLDIGTNSVGWAVITDEYKVPSKKFKVLGNTDRHSIKKNLIGALLFDSGETAEATRLKRTARRRYTRRKNRICYLQEIFSNEMAKVDDSFFHRLEESFLVEEDKKHERHPIFGNIVDEVAYHEKYPTIYHLRKKLVDSTDKADLRLIYLALAHMIKFRGHFLIEGDLNPDNSDVDKLFIQLVQTYNQLFEENPINASGVDAKAILSARLSKSRRLENLIAQLPGEKKNGLFGNLIALSLGLTPNFKSNFDLAEDAKLQLSKDTYDDDLDNLLAQIGDQYADLFLAAKNLSDAILLSDILRVNTEITKAPLSASMIKRYDEHHQDLTLLKALVRQQLPEKYKEIFFDQSKNGYAGYIDGGASQEEFYKFIKPILEKMDGTEELLVKLNREDLLRKQRTFDNGSIPHQIHLGELHAILRRQEDFYPFLKDNREKIEKILTFRIPYYVGPLARGNSRFAWMTRKSEETITPWNFEEVVDKGASAQSFIERMTNFDKNLPNEKVLPKHSLLYEYFTVYNELTKVKYVTEGMRKPAFLSGEQKKAIVDLLFKTNRKVTVKQLKEDYFKKIECFDSVEISGVEDRFNASLGTYHDLLKIIKDKDFLDNEENEDILEDIVLTLTLFEDREMIEERLKTYAHLFDDKVMKQLKRRRYTGWGRLSRKLINGIRDKQSGKTILDFLKSDGFANRNFMQLIHDDSLTFKEDIQKAQVSGQGDSLHEHIANLAGSPAIKKGILQTVKVVDELVKVMGRHKPENIVIEMARENQTTQKGQKNSRERMKRIEEGIKELGSQILKEHPVENTQLQNEKLYLYYLQNGRDMYVDQELDINRLSDYDVDHIVPQSFLKDDSIDNKVLTRSDKARGKSDNVPSEEVVKKMKNYWRQLLNAKLITQRKFDNLTKAERGGLSELDKAGFIKRQLVETRQITKHVAQILDSRMNTKYDENDKLIREVKVITLKSKLVSDFRKDFQFYKVREINNYHHAHDAYLNAVVGTALIKKYPKLESEFVYGDYKVYDVRKMIAKSEQEIGKATAKYFFYSNIMNFFKTEITLANGEIRKRPLIETNGETGEIVWDKGRDFATVRKVLSMPQVNIVKKTEVQTGGFSKESILPKRNSDKLIARKKDWDPKKYGGFDSPTVAYSVLVVAKVEKGKSKKLKSVKELLGITIMERSSFEKNPIDFLEAKGYKEVKKDLIIKLPKYSLFELENGRKRMLASAGELQKGNELALPSKYVNFLYLASHYEKLKGSPEDNEQKQLFVEQHKHYLDEIIEQISEFSKRVILADANLDKVLSAYNKHRDKPIREQAENIIHLFTLTNLGAPAAFKYFDTTIDRKRYTSTKEVLDATLIHQSITGLYETRIDLSQLGGDGGGGSGGSGGVQEISDSRPMLHIYLNGRRFLGLLDTGADKTCIAGRDWPANWPIHQTESSLQGLGMACGVARSSQPLRWQHEDKSGIIHPFVIPTLPFTLWGRDIMKDIKVRLMTDSPDDSQDLMIGAIESNLFADQISWKSDQPVWLNQWPLKQEKLQALQQLVTEQLQLGHLEESNSPWNTPVFVIKKKSGKWRLLQDLRAVNATMHDMGALQPGLPSPVAVPKGWEIIIIDLQDCFFNIKLHPEDCKRFAFSVPSPNFKRPYQRFQWKVLPQGMKNSPTLCQKFVDKAILTVRDKYQDSYIVHYMDDILLAHPSRSIVDEILTSMIQALNKHGLVVSTEKIQKYDNLKYLGTHIQGDSVSYQKLQIRTDKLRTLNDFQKLLGNINWIRPFLKLTTGELKPLFEILNGDSNPISTRKLTPEACKALQLMNERLSTARVKRLDLSQPWSLCILKTEYTPTACLWQDGVVEWIHLPHISPKVITPYDIFCTQLIIKGRHRSKELFSKDPDYIVVPYTKVQFDLLLQEKEDWPISLLGFLGEVHFHLPKDPLLTFTLQTAIIFPHMTSTTPLEKGIVIFTDGSANGRSVTYIQGREPIIKENTQNTAQQAEIVAVITAFEEVSQPFNLYTDSKYVTGLFPEIETATLSPRTKIYTELKHLQRLIHKRQEKFYIGHIRGHTGLPGPLAQGNAYADSLTRILTAAGKRTADGSEFEKRTADGSEFESPKKKAKVE

SEQ ID NO: 3169 - protein, 2116 aa, synthetic construct
MPAAKRVKLDGGDKKYSIGLDIGTNSVGWAVITDEYKVPSKKFKVLGNTDRHSIKKNLIGALLFDSGETAEATRLKRTARRRYTRRKNRICYLQEIFSNEMAKVDDSFFHRLEESFLVEEDKKHERHPIFGNIVDEVAYHEKYPTIYHLRKKLVDSTDKADLRLIYLALAHMIKFRGHFLIEGDLNPDNSDVDKLFIQLVQTYNQLFEENPINASGVDAKAILSARLSKSRRLENLIAQLPGEKKNGLFGNLIALSLGLTPNFKSNFDLAEDAKLQLSKDTYDDDLDNLLAQIGDQYADLFLAAKNLSDAILLSDILRVNTEITKAPLSASMIKRYDEHHQDLTLLKALVRQQLPEKYKEIFFDQSKNGYAGYIDGGASQEEFYKFIKPILEKMDGTEELLVKLNREDLLRKQRTFDNGSIPHQIHLGELHAILRRQEDFYPFLKDNREKIEKILTFRIPYYVGPLARGNSRFAWMTRKSEETITPWNFEEVVDKGASAQSFIERMTNFDKNLPNEKVLPKHSLLYEYFTVYNELTKVKYVTEGMRKPAFLSGEQKKAIVDLLFKTNRKVTVKQLKEDYFKKIECFDSVEISGVEDRFNASLGTYHDLLKIIKDKDFLDNEENEDILEDIVLTLTLFEDREMIEERLKTYAHLFDDKVMKQLKRRRYTGWGRLSRKLINGIRDKQSGKTILDFLKSDGFANRNFMQLIHDDSLTFKEDIQKAQVSGQGDSLHEHIANLAGSPAIKKGILQTVKVVDELVKVMGRHKPENIVIEMARENQTTQKGQKNSRERMKRIEEGIKELGSQILKEHPVENTQLQNEKLYLYYLQNGRDMYVDQELDINRLSDYDVDHIVPQSFLKDDSIDNKVLTRSDKARGKSDNVPSEEVVKKMKNYWRQLLNAKLITQRKFDNLTKAERGGLSELDKAGFIKRQLVETRQITKHVAQILDSRMNTKYDENDKLIREVKVITLKSKLVSDFRKDFQFYKVREINNYHHAHDAYLNAVVGTALIKKYPKLESEFVYGDYKVYDVRKMIAKSEQEIGKATAKYFFYSNIMNFFKTEITLANGEIRKRPLIETNGETGEIVWDKGRDFATVRKVLSMPQVNIVKKTEVQTGGFSKESILPKRNSDKLIARKKDWDPKKYGGFDSPTVAYSVLVVAKVEKGKSKKLKSVKELLGITIMERSSFEKNPIDFLEAKGYKEVKKDLIIKLPKYSLFELENGRKRMLASAGELQKGNELALPSKYVNFLYLASHYEKLKGSPEDNEQKQLFVEQHKHYLDEIIEQISEFSKRVILADANLDKVLSAYNKHRDKPIREQAENIIHLFTLTNLGAPAAFKYFDTTIDRKRYTSTKEVLDATLIHQSITGLYETRIDLSQLGGDGGPAPAPAPAPAPGGVQEISDSRPMLHIYLNGRRFLGLLDTGADKTCIAGRDWPANWPIHQTESSLQGLGMACGVARSSQPLRWQHEDKSGIIHPFVIPTLPFTLWGRDIMKDIKVRLMTDSPDDSQDLMIGAIESNLFADQISWKSDQPVWLNQWPLKQEKLQALQQLVTEQLQLGHLEESNSPWNTPVFVIKKKSGKWRLLQDLRAVNATMHDMGALQPGLPSPVAVPKGWEIIIIDLQDCFFNIKLHPEDCKRFAFSVPSPNFKRPYQRFQWKVLPQGMKNSPTLCQKFVDKAILTVRDKYQDSYIVHYMDDILLAHPSRSIVDEILTSMIQALNKHGLVVSTEKIQKYDNLKYLGTHIQGDSVSYQKLQIRTDKLRTLNDFQKLLGNINWIRPFLKLTTGELKPLFEILNGDSNPISTRKLTPEACKALQLMNERLSTARVKRLDLSQPWSLCILKTEYTPTACLWQDGVVEWIHLPHISPKVITPYDIFCTQLIIKGRHRSKELFSKDPDYIVVPYTKVQFDLLLQEKEDWPISLLGFLGEVHFHLPKDPLLTFTLQTAIIFPHMTSTTPLEKGIVIFTDGSANGRSVTYIQGREPIIKENTQNTAQQAEIVAVITAFEEVSQPFNLYTDSKYVTGLFPEIETATLSPRTKIYTELKHLQRLIHKRQEKFYIGHIRGHTGLPGPLAQGNAYADSLTRILTAAGKRTADGSEFEKRTADGSEFESPKKKAKVE

SEQ ID NO: 3170 - protein, 2116 aa, synthetic construct
MPAAKRVKLDGGDKKYSIGLDIGTNSVGWAVITDEYKVPSKKFKVLGNTDRHSIKKNLIGALLFDSGETAEATRLKRTARRRYTRRKNRICYLQEIFSNEMAKVDDSFFHRLEESFLVEEDKKHERHPIFGNIVDEVAYHEKYPTIYHLRKKLVDSTDKADLRLIYLALAHMIKFRGHFLIEGDLNPDNSDVDKLFIQLVQTYNQLFEENPINASGVDAKAILSARLSKSRRLENLIAQLPGEKKNGLFGNLIALSLGLTPNFKSNFDLAEDAKLQLSKDTYDDDLDNLLAQIGDQYADLFLAAKNLSDAILLSDILRVNTEITKAPLSASMIKRYDEHHQDLTLLKALVRQQLPEKYKEIFFDQSKNGYAGYIDGGASQEEFYKFIKPILEKMDGTEELLVKLNREDLLRKQRTFDNGSIPHQIHLGELHAILRRQEDFYPFLKDNREKIEKILTFRIPYYVGPLARGNSRFAWMTRKSEETITPWNFEEVVDKGASAQSFIERMTNFDKNLPNEKVLPKHSLLYEYFTVYNELTKVKYVTEGMRKPAFLSGEQKKAIVDLLFKTNRKVTVKQLKEDYFKKIECFDSVEISGVEDRFNASLGTYHDLLKIIKDKDFLDNEENEDILEDIVLTLTLFEDREMIEERLKTYAHLFDDKVMKQLKRRRYTGWGRLSRKLINGIRDKQSGKTILDFLKSDGFANRNFMQLIHDDSLTFKEDIQKAQVSGQGDSLHEHIANLAGSPAIKKGILQTVKVVDELVKVMGRHKPENIVIEMARENQTTQKGQKNSRERMKRIEEGIKELGSQILKEHPVENTQLQNEKLYLYYLQNGRDMYVDQELDINRLSDYDVDHIVPQSFLKDDSIDNKVLTRSDKARGKSDNVPSEEVVKKMKNYWRQLLNAKLITQRKFDNLTKAERGGLSELDKAGFIKRQLVETRQITKHVAQILDSRMNTKYDENDKLIREVKVITLKSKLVSDFRKDFQFYKVREINNYHHAHDAYLNAVVGTALIKKYPKLESEFVYGDYKVYDVRKMIAKSEQEIGKATAKYFFYSNIMNFFKTEITLANGEIRKRPLIETNGETGEIVWDKGRDFATVRKVLSMPQVNIVKKTEVQTGGFSKESILPKRNSDKLIARKKDWDPKKYGGFDSPTVAYSVLVVAKVEKGKSKKLKSVKELLGITIMERSSFEKNPIDFLEAKGYKEVKKDLIIKLPKYSLFELENGRKRMLASAGELQKGNELALPSKYVNFLYLASHYEKLKGSPEDNEQKQLFVEQHKHYLDEIIEQISEFSKRVILADANLDKVLSAYNKHRDKPIREQAENIIHLFTLTNLGAPAAFKYFDTTIDRKRYTSTKEVLDATLIHQSITGLYETRIDLSQLGGDGGGGSEAAAKPAPGGVQEISDSRPMLHIYLNGRRFLGLLDTGADKTCIAGRDWPANWPIHQTESSLQGLGMACGVARSSQPLRWQHEDKSGIIHPFVIPTLPFTLWGRDIMKDIKVRLMTDSPDDSQDLMIGAIESNLFADQISWKSDQPVWLNQWPLKQEKLQALQQLVTEQLQLGHLEESNSPWNTPVFVIKKKSGKWRLLQDLRAVNATMHDMGALQPGLPSPVAVPKGWEIIIIDLQDCFFNIKLHPEDCKRFAFSVPSPNFKRPYQRFQWKVLPQGMKNSPTLCQKFVDKAILTVRDKYQDSYIVHYMDDILLAHPSRSIVDEILTSMIQALNKHGLVVSTEKIQKYDNLKYLGTHIQGDSVSYQKLQIRTDKLRTLNDFQKLLGNINWIRPFLKLTTGELKPLFEILNGDSNPISTRKLTPEACKALQLMNERLSTARVKRLDLSQPWSLCILKTEYTPTACLWQDGVVEWIHLPHISPKVITPYDIFCTQLIIKGRHRSKELFSKDPDYIVVPYTKVQFDLLLQEKEDWPISLLGFLGEVHFHLPKDPLLTFTLQTAIIFPHMTSTTPLEKGIVIFTDGSANGRSVTYIQGREPIIKENTQNTAQQAEIVAVITAFEEVSQPFNLYTDSKYVTGLFPEIETATLSPRTKIYTELKHLQRLIHKRQEKFYIGHIRGHTGLPGPLAQGNAYADSLTRILTAAGKRTADGSEFEKRTADGSEFESPKKKAKVE

SEQ ID NO: 3171 - protein, 2116 aa, synthetic construct
MPAAKRVKLDGGDKKYSIGLDIGTNSVGWAVITDEYKVPSKKFKVLGNTDRHSIKKNLIGALLFDSGETAEATRLKRTARRRYTRRKNRICYLQEIFSNEMAKVDDSFFHRLEESFLVEEDKKHERHPIFGNIVDEVAYHEKYPTIYHLRKKLVDSTDKADLRLIYLALAHMIKFRGHFLIEGDLNPDNSDVDKLFIQLVQTYNQLFEENPINASGVDAKAILSARLSKSRRLENLIAQLPGEKKNGLFGNLIALSLGLTPNFKSNFDLAEDAKLQLSKDTYDDDLDNLLAQIGDQYADLFLAAKNLSDAILLSDILRVNTEITKAPLSASMIKRYDEHHQDLTLLKALVRQQLPEKYKEIFFDQSKNGYAGYIDGGASQEEFYKFIKPILEKMDGTEELLVKLNREDLLRKQRTFDNGSIPHQIHLGELHAILRRQEDFYPFLKDNREKIEKILTFRIPYYVGPLARGNSRFAWMTRKSEETITPWNFEEVVDKGASAQSFIERMTNFDKNLPNEKVLPKHSLLYEYFTVYNELTKVKYVTEGMRKPAFLSGEQKKAIVDLLFKTNRKVTVKQLKEDYFKKIECFDSVEISGVEDRFNASLGTYHDLLKIIKDKDFLDNEENEDILEDIVLTLTLFEDREMIEERLKTYAHLFDDKVMKQLKRRRYTGWGRLSRKLINGIRDKQSGKTILDFLKSDGFANRNFMQLIHDDSLTFKEDIQKAQVSGQGDSLHEHIANLAGSPAIKKGILQTVKVVDELVKVMGRHKPENIVIEMARENQTTQKGQKNSRERMKRIEEGIKELGSQILKEHPVENTQLQNEKLYLYYLQNGRDMYVDQELDINRLSDYDVDHIVPQSFLKDDSIDNKVLTRSDKARGKSDNVPSEEVVKKMKNYWRQLLNAKLITQRKFDNLTKAERGGLSELDKAGFIKRQLVETRQITKHVAQILDSRMNTKYDENDKLIREVKVITLKSKLVSDFRKDFQFYKVREINNYHHAHDAYLNAVVGTALIKKYPKLESEFVYGDYKVYDVRKMIAKSEQEIGKATAKYFFYSNIMNFFKTEITLANGEIRKRPLIETNGETGEIVWDKGRDFATVRKVLSMPQVNIVKKTEVQTGGFSKESILPKRNSDKLIARKKDWDPKKYGGFDSPTVAYSVLVVAKVEKGKSKKLKSVKELLGITIMERSSFEKNPIDFLEAKGYKEVKKDLIIKLPKYSLFELENGRKRMLASAGELQKGNELALPSKYVNFLYLASHYEKLKGSPEDNEQKQLFVEQHKHYLDEIIEQISEFSKRVILADANLDKVLSAYNKHRDKPIREQAENIIHLFTLTNLGAPAAFKYFDTTIDRKRYTSTKEVLDATLIHQSITGLYETRIDLSQLGGDGGEAAAKGSSGGSGGWVQEISDSRPMLHIYLNGRRFLGLLNTGADKTCIAGRDWPANWPIHQTESSLQGLGMACGVARSSQPLRWQHEDKSGIIHPFVIPTLPFTLWGRDIMKDIKVRLMTDSPDDSQDLMIGAIESNLFADQISWKSDQPVWLNQWPLKQEKLQALQQLVTEQLQLGHLEESNSPWNTPVFVIKKKSGKWRLLQDLRAVNATMHDMGALQPGLPSPVAVPKGWEIIIIDLQDCFFNIKLHPEDCKRFAFSVPSPNFKRPYQRFQWKVLPQGMKNSPTLCQKFVDKAILTVRDKYQDSYIVHYMDDILLAHPSRSIVDEILTSMIQALNKHGLVVSTEKIQKYDNLKYLGTHIQGDSVSYQKLQIRTDKLRTLNDFQKLLGNINWIRPFLKLTTGELKPLFEILNGDSNPISTRKLTPEACKALQLMNERLSTARVKRLDLSQPWSLCILKTEYTPTACLWQDGVVEWIHLPHISPKVITPYDIFCTQLIIKGRHRSKELFSKDPDYIVVPYTKVQFDLLLQEKEDWPISLLGFLGEVHFHLPKDPLLTFTLQTAIIFPHMTSTTPLEKGIVIFTDGSANGRSVTYIQGREPIIKENTQNTAQQAEIVAVITAFEEVSQPFNLYTDSKYVTGLFPEIETATLSPRTKIYTELKHLQRLIHKRQEKFYIGHIRGHTGLPGPLAQGNAYADSLTRILTAGKRTADGSEFEKRTADGSEFESPKKKAKVE

SEQ ID NO: 3172 - protein, 2135 aa, synthetic construct
MPAAKRVKLDGGDKKYSIGLDIGTNSVGWAVITDEYKVPSKKFKVLGNTDRHSIKKNLIGALLFDSGETAEATRLKRTARRRYTRRKNRICYLQEIFSNEMAKVDDSFFHRLEESFLVEEDKKHERHPIFGNIVDEVAYHEKYPTIYHLRKKLVDSTDKADLRLIYLALAHMIKFRGHFLIEGDLNPDNSDVDKLFIQLVQTYNQLFEENPINASGVDAKAILSARLSKSRRLENLIAQLPGEKKNGLFGNLIALSLGLTPNFKSNFDLAEDAKLQLSKDTYDDDLDNLLAQIGDQYADLFLAAKNLSDAILLSDILRVNTEITKAPLSASMIKRYDEHHQDLTLLKALVRQQLPEKYKEIFFDQSKNGYAGYIDGGASQEEFYKFIKPILEKMDGTEELLVKLNREDLLRKQRTFDNGSIPHQIHLGELHAILRRQEDFYPFLKDNREKIEKILTFRIPYYVGPLARGNSRFAWMTRKSEETITPWNFEEVVDKGASAQSFIERMTNFDKNLPNEKVLPKHSLLYEYFTVYNELTKVKYVTEGMRKPAFLSGEQKKAIVDLLFKTNRKVTVKQLKEDYFKKIECFDSVEISGVEDRFNASLGTYHDLLKIIKDKDFLDNEENEDILEDIVLTLTLFEDREMIEERLKTYAHLFDDKVMKQLKRRRYTGWGRLSRKLINGIRDKQSGKTILDFLKSDGFANRNFMQLIHDDSLTFKEDIQKAQVSGQGDSLHEHIANLAGSPAIKKGILQTVKVVDELVKVMGRHKPENIVIEMARENQTTQKGQKNSRERMKRIEEGIKELGSQILKEHPVENTQLQNEKLYLYYLQNGRDMYVDQELDINRLSDYDVDHIVPQSFLKDDSIDNKVLTRSDKARGKSDNVPSEEVVKKMKNYWRQLLNAKLITQRKFDNLTKAERGGLSELDKAGFIKRQLVETRQITKHVAQILDSRMNTKYDENDKLIREVKVITLKSKLVSDFRKDFQFYKVREINNYHHAHDAYLNAVVGTALIKKYPKLESEFVYGDYKVYDVRKMIAKSEQEIGKATAKYFFYSNIMNFFKTEITLANGEIRKRPLIETNGETGEIVWDKGRDFATVRKVLSMPQVNIVKKTEVQTGGFSKESILPKRNSDKLIARKKDWDPKKYGGFDSPTVAYSVLVVAKVEKGKSKKLKSVKELLGITIMERSSFEKNPIDFLEAKGYKEVKKDLIIKLPKYSLFELENGRKRMLASAGELQKGNELALPSKYVNFLYLASHYEKLKGSPEDNEQKQLFVEQHKHYLDEIIEQISEFSKRVILADANLDKVLSAYNKHRDKPIREQAENIIHLFTLTNLGAPAAFKYFDTTIDRKRYTSTKEVLDATLIHQSITGLYETRIDLSQLGGDGGEAAAKEAAAKEAAAKEAAAKEAAAKEAAAKGGWVQEISDSRPMLHIYLNGRRFLGLLNTGADKTCIAGRDWPANWPIHQTESSLQGLGMACGVARSSQPLRWQHEDKSGIIHPFVIPTLPFTLWGRDIMKDIKVRLMTDSPDDSQDLMIGAIESNLFADQISWKSDQPVWLNQWPLKQEKLQALQQLVTEQLQLGHLEESNSPWNTPVFVIKKKSGKWRLLQDLRAVNATMHDMGALQPGLPSPVAVPKGWEIIIIDLQDCFFNIKLHPEDCKRFAFSVPSPNFKRPYQRFQWKVLPQGMKNSPTLCQKFVDKAILTVRDKYQDSYIVHYMDDILLAHPSRSIVDEILTSMIQALNKHGLVVSTEKIQKYDNLKYLGTHIQGDSVSYQKLQIRTDKLRTLNDFQKLLGNINWIRPFLKLTTGELKPLFEILNGDSNPISTRKLTPEACKALQLMNERLSTARVKRLDLSQPWSLCILKTEYTPTACLWQDGVVEWIHLPHISPKVITPYDIFCTQLIIKGRHRSKELFSKDPDYIVVPYTKVQFDLLLQEKEDWPISLLGFLGEVHFHLPKDPLLTFTLQTAIIFPHMTSTTPLEKGIVIFTDGSANGRSVTYIQGREPIIKENTQNTAQQAEIVAVITAFEEVSQPFNLYTDSKYVTGLFPEIETATLSPRTKIYTELKHLQRLIHKRQEKFYIGHIRGHTGLPGPLAQGNAYADSLTRILTAGKRTADGSEFEKRTADGSEFESPKKKAKVE

SEQ ID NO: 3173 - protein, 2135 aa, synthetic construct
MPAAKRVKLDGGDKKYSIGLDIGTNSVGWAVITDEYKVPSKKFKVLGNTDRHSIKKNLIGALLFDSGETAEATRLKRTARRRYTRRKNRICYLQEIFSNEMAKVDDSFFHRLEESFLVEEDKKHERHPIFGNIVDEVAYHEKYPTIYHLRKKLVDSTDKADLRLIYLALAHMIKFRGHFLIEGDLNPDNSDVDKLFIQLVQTYNQLFEENPINASGVDAKAILSARLSKSRRLENLIAQLPGEKKNGLFGNLIALSLGLTPNFKSNFDLAEDAKLQLSKDTYDDDLDNLLAQIGDQYADLFLAAKNLSDAILLSDILRVNTEITKAPLSASMIKRYDEHHQDLTLLKALVRQQLPEKYKEIFFDQSKNGYAGYIDGGASQEEFYKFIKPILEKMDGTEELLVKLNREDLLRKQRTFDNGSIPHQIHLGELHAILRRQEDFYPFLKDNREKIEKILTFRIPYYVGPLARGNSRFAWMTRKSEETITPWNFEEVVDKGASAQSFIERMTNFDKNLPNEKVLPKHSLLYEYFTVYNELTKVKYVTEGMRKPAFLSGEQKKAIVDLLFKTNRKVTVKQLKEDYFKKIECFDSVEISGVEDRFNASLGTYHDLLKIIKDKDFLDNEENEDILEDIVLTLTLFEDREMIEERLKTYAHLFDDKVMKQLKRRRYTGWGRLSRKLINGIRDKQSGKTILDFLKSDGFANRNFMQLIHDDSLTFKEDIQKAQVSGQGDSLHEHIANLAGSPAIKKGILQTVKVVDELVKVMGRHKPENIVIEMARENQTTQKGQKNSRERMKRIEEGIKELGSQILKEHPVENTQLQNEKLYLYYLQNGRDMYVDQELDINRLSDYDVDHIVPQSFLKDDSIDNKVLTRSDKARGKSDNVPSEEVVKKMKNYWRQLLNAKLITQRKFDNLTKAERGGLSELDKAGFIKRQLVETRQITKHVAQILDSRMNTKYDENDKLIREVKVITLKSKLVSDFRKDFQFYKVREINNYHHAHDAYLNAVVGTALIKKYPKLESEFVYGDYKVYDVRKMIAKSEQEIGKATAKYFFYSNIMNFFKTEITLANGEIRKRPLIETNGETGEIVWDKGRDFATVRKVLSMPQVNIVKKTEVQTGGFSKESILPKRNSDKLIARKKDWDPKKYGGFDSPTVAYSVLVVAKVEKGKSKKLKSVKELLGITIMERSSFEKNPIDFLEAKGYKEVKKDLIIKLPKYSLFELENGRKRMLASAGELQKGNELALPSKYVNFLYLASHYEKLKGSPEDNEQKQLFVEQHKHYLDEIIEQISEFSKRVILADANLDKVLSAYNKHRDKPIREQAENIIHLFTLTNLGAPAAFKYFDTTIDRKRYTSTKEVLDATLIHQSITGLYETRIDLSQLGGDGGGGGGSGGGGSGGGGSGGGGSGGGGSGGGGSGGWVQEISDSRPMLHIYLNGRRFLGLLNTGADKTCIAGRDWPANWPIHQTESSLQGLGMACGVARSSQPLRWQHEDKSGIIHPFVIPTLPFTLWGRDIMKDIKVRLMTDSPDDSQDLMIGAIESNLFADQISWKSDQPVWLNQWPLKQEKLQALQQLVTEQLQLGHLEESNSPWNTPVFVIKKKSGKWRLLQDLRAVNATMHDMGALQPGLPSPVAVPKGWEIIIIDLQDCFFNIKLHPEDCKRFAFSVPSPNFKRPYQRFQWKVLPQGMKNSPTLCQKFVDKAILTVRDKYQDSYIVHYMDDILLAHPSRSIVDEILTSMIQALNKHGLVVSTEKIQKYDNLKYLGTHIQGDSVSYQKLQIRTDKLRTLNDFQKLLGNINWIRPFLKLTTGELKPLFEILNGDSNPISTRKLTPEACKALQLMNERLSTARVKRLDLSQPWSLCILKTEYTPTACLWQDGVVEWIHLPHISPKVITPYDIFCTQLIIKGRHRSKELFSKDPDYIVVPYTKVQFDLLLQEKEDWPISLLGFLGEVHFHLPKDPLLTFTLQTAIIFPHMTSTTPLEKGIVIFTDGSANGRSVTYIQGREPIIKENTQNTAQQAEIVAVITAFEEVSQPFNLYTDSKYVTGLFPEIETATLSPRTKIYTELKHLQRLIHKRQEKFYIGHIRGHTGLPGPLAQGNAYADSLTRILTAGKRTADGSEFEKRTADGSEFESPKKKAKVE

SEQ ID NO: 3174 - protein, 2130 aa, synthetic construct
MPAAKRVKLDGGDKKYSIGLDIGTNSVGWAVITDEYKVPSKKFKVLGNTDRHSIKKNLIGALLFDSGETAEATRLKRTARRRYTRRKNRICYLQEIFSNEMAKVDDSFFHRLEESFLVEEDKKHERHPIFGNIVDEVAYHEKYPTIYHLRKKLVDSTDKADLRLIYLALAHMIKFRGHFLIEGDLNPDNSDVDKLFIQLVQTYNQLFEENPINASGVDAKAILSARLSKSRRLENLIAQLPGEKKNGLFGNLIALSLGLTPNFKSNFDLAEDAKLQLSKDTYDDDLDNLLAQIGDQYADLFLAAKNLSDAILLSDILRVNTEITKAPLSASMIKRYDEHHQDLTLLKALVRQQLPEKYKEIFFDQSKNGYAGYIDGGASQEEFYKFIKPILEKMDGTEELLVKLNREDLLRKQRTFDNGSIPHQIHLGELHAILRRQEDFYPFLKDNREKIEKILTFRIPYYVGPLARGNSRFAWMTRKSEETITPWNFEEVVDKGASAQSFIERMTNFDKNLPNEKVLPKHSLLYEYFTVYNELTKVKYVTEGMRKPAFLSGEQKKAIVDLLFKTNRKVTVKQLKEDYFKKIECFDSVEISGVEDRFNASLGTYHDLLKIIKDKDFLDNEENEDILEDIVLTLTLFEDREMIEERLKTYAHLFDDKVMKQLKRRRYTGWGRLSRKLINGIRDKQSGKTILDFLKSDGFANRNFMQLIHDDSLTFKEDIQKAQVSGQGDSLHEHIANLAGSPAIKKGILQTVKVVDELVKVMGRHKPENIVIEMARENQTTQKGQKNSRERMKRIEEGIKELGSQILKEHPVENTQLQNEKLYLYYLQNGRDMYVDQELDINRLSDYDVDHIVPQSFLKDDSIDNKVLTRSDKARGKSDNVPSEEVVKKMKNYWRQLLNAKLITQRKFDNLTKAERGGLSELDKAGFIKRQLVETRQITKHVAQILDSRMNTKYDENDKLIREVKVITLKSKLVSDFRKDFQFYKVREINNYHHAHDAYLNAVVGTALIKKYPKLESEFVYGDYKVYDVRKMIAKSEQEIGKATAKYFFYSNIMNFFKTEITLANGEIRKRPLIETNGETGEIVWDKGRDFATVRKVLSMPQVNIVKKTEVQTGGFSKESILPKRNSDKLIARKKDWDPKKYGGFDSPTVAYSVLVVAKVEKGKSKKLKSVKELLGITIMERSSFEKNPIDFLEAKGYKEVKKDLIIKLPKYSLFELENGRKRMLASAGELQKGNELALPSKYVNFLYLASHYEKLKGSPEDNEQKQLFVEQHKHYLDEIIEQISEFSKRVILADANLDKVLSAYNKHRDKPIREQAENIIHLFTLTNLGAPAAFKYFDTTIDRKRYTSTKEVLDATLIHQSITGLYETRIDLSQLGGDGGEAAAKEAAAKEAAAKEAAAKEAAAKGGWVQEISDSRPMLHIYLNGRRFLGLLNTGADKTCIAGRDWPANWPIHQTESSLQGLGMACGVARSSQPLRWQHEDKSGIIHPFVIPTLPFTLWGRDIMKDIKVRLMTDSPDDSQDLMIGAIESNLFADQISWKSDQPVWLNQWPLKQEKLQALQQLVTEQLQLGHLEESNSPWNTPVFVIKKKSGKWRLLQDLRAVNATMHDMGALQPGLPSPVAVPKGWEIIIIDLQDCFFNIKLHPEDCKRFAFSVPSPNFKRPYQRFQWKVLPQGMKNSPTLCQKFVDKAILTVRDKYQDSYIVHYMDDILLAHPSRSIVDEILTSMIQALNKHGLVVSTEKIQKYDNLKYLGTHIQGDSVSYQKLQIRTDKLRTLNDFQKLLGNINWIRPFLKLTTGELKPLFEILNGDSNPISTRKLTPEACKALQLMNERLSTARVKRLDLSQPWSLCILKTEYTPTACLWQDGVVEWIHLPHISPKVITPYDIFCTQLIIKGRHRSKELFSKDPDYIVVPYTKVQFDLLLQEKEDWPISLLGFLGEVHFHLPKDPLLTFTLQTAIIFPHMTSTTPLEKGIVIFTDGSANGRSVTYIQGREPIIKENTQNTAQQAEIVAVITAFEEVSQPFNLYTDSKYVTGLFPEIETATLSPRTKIYTELKHLQRLIHKRQEKFYIGHIRGHTGLPGPLAQGNAYADSLTRILTAGKRTADGSEFEKRTADGSEFESPKKKAKVE

SEQ ID NO: 3175 - protein, 2116 aa, synthetic construct
MPAAKRVKLDGGDKKYSIGLDIGTNSVGWAVITDEYKVPSKKFKVLGNTDRHSIKKNLIGALLFDSGETAEATRLKRTARRRYTRRKNRICYLQEIFSNEMAKVDDSFFHRLEESFLVEEDKKHERHPIFGNIVDEVAYHEKYPTIYHLRKKLVDSTDKADLRLIYLALAHMIKFRGHFLIEGDLNPDNSDVDKLFIQLVQTYNQLFEENPINASGVDAKAILSARLSKSRRLENLIAQLPGEKKNGLFGNLIALSLGLTPNFKSNFDLAEDAKLQLSKDTYDDDLDNLLAQIGDQYADLFLAAKNLSDAILLSDILRVNTEITKAPLSASMIKRYDEHHQDLTLLKALVRQQLPEKYKEIFFDQSKNGYAGYIDGGASQEEFYKFIKPILEKMDGTEELLVKLNREDLLRKQRTFDNGSIPHQIHLGELHAILRRQEDFYPFLKDNREKIEKILTFRIPYYVGPLARGNSRFAWMTRKSEETITPWNFEEVVDKGASAQSFIERMTNFDKNLPNEKVLPKHSLLYEYFTVYNELTKVKYVTEGMRKPAFLSGEQKKAIVDLLFKTNRKVTVKQLKEDYFKKIECFDSVEISGVEDRFNASLGTYHDLLKIIKDKDFLDNEENEDILEDIVLTLTLFEDREMIEERLKTYAHLFDDKVMKQLKRRRYTGWGRLSRKLINGIRDKQSGKTILDFLKSDGFANRNFMQLIHDDSLTFKEDIQKAQVSGQGDSLHEHIANLAGSPAIKKGILQTVKVVDELVKVMGRHKPENIVIEMARENQTTQKGQKNSRERMKRIEEGIKELGSQILKEHPVENTQLQNEKLYLYYLQNGRDMYVDQELDINRLSDYDVDHIVPQSFLKDDSIDNKVLTRSDKARGKSDNVPSEEVVKKMKNYWRQLLNAKLITQRKFDNLTKAERGGLSELDKAGFIKRQLVETRQITKHVAQILDSRMNTKYDENDKLIREVKVITLKSKLVSDFRKDFQFYKVREINNYHHAHDAYLNAVVGTALIKKYPKLESEFVYGDYKVYDVRKMIAKSEQEIGKATAKYFFYSNIMNFFKTEITLANGEIRKRPLIETNGETGEIVWDKGRDFATVRKVLSMPQVNIVKKTEVQTGGFSKESILPKRNSDKLIARKKDWDPKKYGGFDSPTVAYSVLVVAKVEKGKSKKLKSVKELLGITIMERSSFEKNPIDFLEAKGYKEVKKDLIIKLPKYSLFELENGRKRMLASAGELQKGNELALPSKYVNFLYLASHYEKLKGSPEDNEQKQLFVEQHKHYLDEIIEQISEFSKRVILADANLDKVLSAYNKHRDKPIREQAENIIHLFTLTNLGAPAAFKYFDTTIDRKRYTSTKEVLDATLIHQSITGLYETRIDLSQLGGDGGPAPAPAPAPAPGGWVQEISDSRPMLHIYLNGRRFLGLLNTGADKTCIAGRDWPANWPIHQTESSLQGLGMACGVARSSQPLRWQHEDKSGIIHPFVIPTLPFTLWGRDIMKDIKVRLMTDSPDDSQDLMIGAIESNLFADQISWKSDQPVWLNQWPLKQEKLQALQQLVTEQLQLGHLEESNSPWNTPVFVIKKKSGKWRLLQDLRAVNATMHDMGALQPGLPSPVAVPKGWEIIIIDLQDCFFNIKLHPEDCKRFAFSVPSPNFKRPYQRFQWKVLPQGMKNSPTLCQKFVDKAILTVRDKYQDSYIVHYMDDILLAHPSRSIVDEILTSMIQALNKHGLVVSTEKIQKYDNLKYLGTHIQGDSVSYQKLQIRTDKLRTLNDFQKLLGNINWIRPFLKLTTGELKPLFEILNGDSNPISTRKLTPEACKALQLMNERLSTARVKRLDLSQPWSLCILKTEYTPTACLWQDGVVEWIHLPHISPKVITPYDIFCTQLIIKGRHRSKELFSKDPDYIVVPYTKVQFDLLLQEKEDWPISLLGFLGEVHFHLPKDPLLTFTLQTAIIFPHMTSTTPLEKGIVIFTDGSANGRSVTYIQGREPIIKENTQNTAQQAEIVAVITAFEEVSQPFNLYTDSKYVTGLFPEIETATLSPRTKIYTELKHLQRLIHKRQEKFYIGHIRGHTGLPGPLAQGNAYADSLTRILTAGKRTADGSEFEKRTADGSEFESPKKKAKVE

SEQ ID NO: 3176 - protein, 2114 aa, synthetic construct
MPAAKRVKLDGGDKKYSIGLDIGTNSVGWAVITDEYKVPSKKFKVLGNTDRHSIKKNLIGALLFDSGETAEATRLKRTARRRYTRRKNRICYLQEIFSNEMAKVDDSFFHRLEESFLVEEDKKHERHPIFGNIVDEVAYHEKYPTIYHLRKKLVDSTDKADLRLIYLALAHMIKFRGHFLIEGDLNPDNSDVDKLFIQLVQTYNQLFEENPINASGVDAKAILSARLSKSRRLENLIAQLPGEKKNGLFGNLIALSLGLTPNFKSNFDLAEDAKLQLSKDTYDDDLDNLLAQIGDQYADLFLAAKNLSDAILLSDILRVNTEITKAPLSASMIKRYDEHHQDLTLLKALVRQQLPEKYKEIFFDQSKNGYAGYIDGGASQEEFYKFIKPILEKMDGTEELLVKLNREDLLRKQRTFDNGSIPHQIHLGELHAILRRQEDFYPFLKDNREKIEKILTFRIPYYVGPLARGNSRFAWMTRKSEETITPWNFEEVVDKGASAQSFIERMTNFDKNLPNEKVLPKHSLLYEYFTVYNELTKVKYVTEGMRKPAFLSGEQKKAIVDLLFKTNRKVTVKQLKEDYFKKIECFDSVEISGVEDRFNASLGTYHDLLKIIKDKDFLDNEENEDILEDIVLTLTLFEDREMIEERLKTYAHLFDDKVMKQLKRRRYTGWGRLSRKLINGIRDKQSGKTILDFLKSDGFANRNFMQLIHDDSLTFKEDIQKAQVSGQGDSLHEHIANLAGSPAIKKGILQTVKVVDELVKVMGRHKPENIVIEMARENQTTQKGQKNSRERMKRIEEGIKELGSQILKEHPVENTQLQNEKLYLYYLQNGRDMYVDQELDINRLSDYDVDHIVPQSFLKDDSIDNKVLTRSDKARGKSDNVPSEEVVKKMKNYWRQLLNAKLITQRKFDNLTKAERGGLSELDKAGFIKRQLVETRQITKHVAQILDSRMNTKYDENDKLIREVKVITLKSKLVSDFRKDFQFYKVREINNYHHAHDAYLNAVVGTALIKKYPKLESEFVYGDYKVYDVRKMIAKSEQEIGKATAKYFFYSNIMNFFKTEITLANGEIRKRPLIETNGETGEIVWDKGRDFATVRKVLSMPQVNIVKKTEVQTGGFSKESILPKRNSDKLIARKKDWDPKKYGGFDSPTVAYSVLVVAKVEKGKSKKLKSVKELLGITIMERSSFEKNPIDFLEAKGYKEVKKDLIIKLPKYSLFELENGRKRMLASAGELQKGNELALPSKYVNFLYLASHYEKLKGSPEDNEQKQLFVEQHKHYLDEIIEQISEFSKRVILADANLDKVLSAYNKHRDKPIREQAENIIHLFTLTNLGAPAAFKYFDTTIDRKRYTSTKEVLDATLIHQSITGLYETRIDLSQLGGDGGPAPGSSGGSGGWVQEISDSRPMLHIYLNGRRFLGLLNTGADKTCIAGRDWPANWPIHQTESSLQGLGMACGVARSSQPLRWQHEDKSGIIHPFVIPTLPFTLWGRDIMKDIKVRLMTDSPDDSQDLMIGAIESNLFADQISWKSDQPVWLNQWPLKQEKLQALQQLVTEQLQLGHLEESNSPWNTPVFVIKKKSGKWRLLQDLRAVNATMHDMGALQPGLPSPVAVPKGWEIIIIDLQDCFFNIKLHPEDCKRFAFSVPSPNFKRPYQRFQWKVLPQGMKNSPTLCQKFVDKAILTVRDKYQDSYIVHYMDDILLAHPSRSIVDEILTSMIQALNKHGLVVSTEKIQKYDNLKYLGTHIQGDSVSYQKLQIRTDKLRTLNDFQKLLGNINWIRPFLKLTTGELKPLFEILNGDSNPISTRKLTPEACKALQLMNERLSTARVKRLDLSQPWSLCILKTEYTPTACLWQDGVVEWIHLPHISPKVITPYDIFCTQLIIKGRHRSKELFSKDPDYIVVPYTKVQFDLLLQEKEDWPISLLGFLGEVHFHLPKDPLLTFTLQTAIIFPHMTSTTPLEKGIVIFTDGSANGRSVTYIQGREPIIKENTQNTAQQAEIVAVITAFEEVSQPFNLYTDSKYVTGLFPEIETATLSPRTKIYTELKHLQRLIHKRQEKFYIGHIRGHTGLPGPLAQGNAYADSLTRILTAGKRTADGSEFEKRTADGSEFESPKKKAKVE

SEQ ID NO: 3177 - protein, 2113 aa, synthetic construct
MPAAKRVKLDGGDKKYSIGLDIGTNSVGWAVITDEYKVPSKKFKVLGNTDRHSIKKNLIGALLFDSGETAEATRLKRTARRRYTRRKNRICYLQEIFSNEMAKVDDSFFHRLEESFLVEEDKKHERHPIFGNIVDEVAYHEKYPTIYHLRKKLVDSTDKADLRLIYLALAHMIKFRGHFLIEGDLNPDNSDVDKLFIQLVQTYNQLFEENPINASGVDAKAILSARLSKSRRLENLIAQLPGEKKNGLFGNLIALSLGLTPNFKSNFDLAEDAKLQLSKDTYDDDLDNLLAQIGDQYADLFLAAKNLSDAILLSDILRVNTEITKAPLSASMIKRYDEHHQDLTLLKALVRQQLPEKYKEIFFDQSKNGYAGYIDGGASQEEFYKFIKPILEKMDGTEELLVKLNREDLLRKQRTFDNGSIPHQIHLGELHAILRRQEDFYPFLKDNREKIEKILTFRIPYYVGPLARGNSRFAWMTRKSEETITPWNFEEVVDKGASAQSFIERMTNFDKNLPNEKVLPKHSLLYEYFTVYNELTKVKYVTEGMRKPAFLSGEQKKAIVDLLFKTNRKVTVKQLKEDYFKKIECFDSVEISGVEDRFNASLGTYHDLLKIIKDKDFLDNEENEDILEDIVLTLTLFEDREMIEERLKTYAHLFDDKVMKQLKRRRYTGWGRLSRKLINGIRDKQSGKTILDFLKSDGFANRNFMQLIHDDSLTFKEDIQKAQVSGQGDSLHEHIANLAGSPAIKKGILQTVKVVDELVKVMGRHKPENIVIEMARENQTTQKGQKNSRERMKRIEEGIKELGSQILKEHPVENTQLQNEKLYLYYLQNGRDMYVDQELDINRLSDYDVDHIVPQSFLKDDSIDNKVLTRSDKARGKSDNVPSEEVVKKMKNYWRQLLNAKLITQRKFDNLTKAERGGLSELDKAGFIKRQLVETRQITKHVAQILDSRMNTKYDENDKLIREVKVITLKSKLVSDFRKDFQFYKVREINNYHHAHDAYLNAVVGTALIKKYPKLESEFVYGDYKVYDVRKMIAKSEQEIGKATAKYFFYSNIMNFFKTEITLANGEIRKRPLIETNGETGEIVWDKGRDFATVRKVLSMPQVNIVKKTEVQTGGFSKESILPKRNSDKLIARKKDWDPKKYGGFDSPTVAYSVLVVAKVEKGKSKKLKSVKELLGITIMERSSFEKNPIDFLEAKGYKEVKKDLIIKLPKYSLFELENGRKRMLASAGELQKGNELALPSKYVNFLYLASHYEKLKGSPEDNEQKQLFVEQHKHYLDEIIEQISEFSKRVILADANLDKVLSAYNKHRDKPIREQAENIIHLFTLTNLGAPAAFKYFDTTIDRKRYTSTKEVLDATLIHQSITGLYETRIDLSQLGGDGGGGGEAAAKGGWVQEISDSRPMLHIYLNGRRFLGLLNTGADKTCIAGRDWPANWPIHQTESSLQGLGMACGVARSSQPLRWQHEDKSGIIHPFVIPTLPFTLWGRDIMKDIKVRLMTDSPDDSQDLMIGAIESNLFADQISWKSDQPVWLNQWPLKQEKLQALQQLVTEQLQLGHLEESNSPWNTPVFVIKKKSGKWRLLQDLRAVNATMHDMGALQPGLPSPVAVPKGWEIIIIDLQDCFFNIKLHPEDCKRFAFSVPSPNFKRPYQRFQWKVLPQGMKNSPTLCQKFVDKAILTVRDKYQDSYIVHYMDDILLAHPSRSIVDEILTSMIQALNKHGLVVSTEKIQKYDNLKYLGTHIQGDSVSYQKLQIRTDKLRTLNDFQKLLGNINWIRPFLKLTTGELKPLFEILNGDSNPISTRKLTPEACKALQLMNERLSTARVKRLDLSQPWSLCILKTEYTPTACLWQDGVVEWIHLPHISPKVITPYDIFCTQLIIKGRHRSKELFSKDPDYIVVPYTKVQFDLLLQEKEDWPISLLGFLGEVHFHLPKDPLLTFTLQTAIIFPHMTSTTPLEKGIVIFTDGSANGRSVTYIQGREPIIKENTQNTAQQAEIVAVITAFEEVSQPFNLYTDSKYVTGLFPEIETATLSPRTKIYTELKHLQRLIHKRQEKFYIGHIRGHTGLPGPLAQGNAYADSLTRILTAGKRTADGSEFEKRTADGSEFESPKKKAKVE

SEQ ID NO: 3178 - protein, 2116 aa, synthetic construct
MPAAKRVKLDGGDKKYSIGLDIGTNSVGWAVITDEYKVPSKKFKVLGNTDRHSIKKNLIGALLFDSGETAEATRLKRTARRRYTRRKNRICYLQEIFSNEMAKVDDSFFHRLEESFLVEEDKKHERHPIFGNIVDEVAYHEKYPTIYHLRKKLVDSTDKADLRLIYLALAHMIKFRGHFLIEGDLNPDNSDVDKLFIQLVQTYNQLFEENPINASGVDAKAILSARLSKSRRLENLIAQLPGEKKNGLFGNLIALSLGLTPNFKSNFDLAEDAKLQLSKDTYDDDLDNLLAQIGDQYADLFLAAKNLSDAILLSDILRVNTEITKAPLSASMIKRYDEHHQDLTLLKALVRQQLPEKYKEIFFDQSKNGYAGYIDGGASQEEFYKFIKPILEKMDGTEELLVKLNREDLLRKQRTFDNGSIPHQIHLGELHAILRRQEDFYPFLKDNREKIEKILTFRIPYYVGPLARGNSRFAWMTRKSEETITPWNFEEVVDKGASAQSFIERMTNFDKNLPNEKVLPKHSLLYEYFTVYNELTKVKYVTEGMRKPAFLSGEQKKAIVDLLFKTNRKVTVKQLKEDYFKKIECFDSVEISGVEDRFNASLGTYHDLLKIIKDKDFLDNEENEDILEDIVLTLTLFEDREMIEERLKTYAHLFDDKVMKQLKRRRYTGWGRLSRKLINGIRDKQSGKTILDFLKSDGFANRNFMQLIHDDSLTFKEDIQKAQVSGQGDSLHEHIANLAGSPAIKKGILQTVKVVDELVKVMGRHKPENIVIEMARENQTTQKGQKNSRERMKRIEEGIKELGSQILKEHPVENTQLQNEKLYLYYLQNGRDMYVDQELDINRLSDYDVDHIVPQSFLKDDSIDNKVLTRSDKARGKSDNVPSEEVVKKMKNYWRQLLNAKLITQRKFDNLTKAERGGLSELDKAGFIKRQLVETRQITKHVAQILDSRMNTKYDENDKLIREVKVITLKSKLVSDFRKDFQFYKVREINNYHHAHDAYLNAVVGTALIKKYPKLESEFVYGDYKVYDVRKMIAKSEQEIGKATAKYFFYSNIMNFFKTEITLANGEIRKRPLIETNGETGEIVWDKGRDFATVRKVLSMPQVNIVKKTEVQTGGFSKESILPKRNSDKLIARKKDWDPKKYGGFDSPTVAYSVLVVAKVEKGKSKKLKSVKELLGITIMERSSFEKNPIDFLEAKGYKEVKKDLIIKLPKYSLFELENGRKRMLASAGELQKGNELALPSKYVNFLYLASHYEKLKGSPEDNEQKQLFVEQHKHYLDEIIEQISEFSKRVILADANLDKVLSAYNKHRDKPIREQAENIIHLFTLTNLGAPAAFKYFDTTIDRKRYTSTKEVLDATLIHQSITGLYETRIDLSQLGGDGGGGSPAPEAAAKGGWVQEISDSRPMLHIYLNGRRFLGLLNTGADKTCIAGRDWPANWPIHQTESSLQGLGMACGVARSSQPLRWQHEDKSGIIHPFVIPTLPFTLWGRDIMKDIKVRLMTDSPDDSQDLMIGAIESNLFADQISWKSDQPVWLNQWPLKQEKLQALQQLVTEQLQLGHLEESNSPWNTPVFVIKKKSGKWRLLQDLRAVNATMHDMGALQPGLPSPVAVPKGWEIIIIDLQDCFFNIKLHPEDCKRFAFSVPSPNFKRPYQRFQWKVLPQGMKNSPTLCQKFVDKAILTVRDKYQDSYIVHYMDDILLAHPSRSIVDEILTSMIQALNKHGLVVSTEKIQKYDNLKYLGTHIQGDSVSYQKLQIRTDKLRTLNDFQKLLGNINWIRPFLKLTTGELKPLFEILNGDSNPISTRKLTPEACKALQLMNERLSTARVKRLDLSQPWSLCILKTEYTPTACLWQDGVVEWIHLPHISPKVITPYDIFCTQLIIKGRHRSKELFSKDPDYIVVPYTKVQFDLLLQEKEDWPISLLGFLGEVHFHLPKDPLLTFTLQTAIIFPHMTSTTPLEKGIVIFTDGSANGRSVTYIQGREPIIKENTQNTAQQAEIVAVITAFEEVSQPFNLYTDSKYVTGLFPEIETATLSPRTKIYTELKHLQRLIHKRQEKFYIGHIRGHTGLPGPLAQGNAYADSLTRILTAGKRTADGSEFEKRTADGSEFESPKKKAKVE

SEQ ID NO: 3179 - protein, 2114 aa, synthetic construct
MPAAKRVKLDGGDKKYSIGLDIGTNSVGWAVITDEYKVPSKKFKVLGNTDRHSIKKNLIGALLFDSGETAEATRLKRTARRRYTRRKNRICYLQEIFSNEMAKVDDSFFHRLEESFLVEEDKKHERHPIFGNIVDEVAYHEKYPTIYHLRKKLVDSTDKADLRLIYLALAHMIKFRGHFLIEGDLNPDNSDVDKLFIQLVQTYNQLFEENPINASGVDAKAILSARLSKSRRLENLIAQLPGEKKNGLFGNLIALSLGLTPNFKSNFDLAEDAKLQLSKDTYDDDLDNLLAQIGDQYADLFLAAKNLSDAILLSDILRVNTEITKAPLSASMIKRYDEHHQDLTLLKALVRQQLPEKYKEIFFDQSKNGYAGYIDGGASQEEFYKFIKPILEKMDGTEELLVKLNREDLLRKQRTFDNGSIPHQIHLGELHAILRRQEDFYPFLKDNREKIEKILTFRIPYYVGPLARGNSRFAWMTRKSEETITPWNFEEVVDKGASAQSFIERMTNFDKNLPNEKVLPKHSLLYEYFTVYNELTKVKYVTEGMRKPAFLSGEQKKAIVDLLFKTNRKVTVKQLKEDYFKKIECFDSVEISGVEDRFNASLGTYHDLLKIIKDKDFLDNEENEDILEDIVLTLTLFEDREMIEERLKTYAHLFDDKVMKQLKRRRYTGWGRLSRKLINGIRDKQSGKTILDFLKSDGFANRNFMQLIHDDSLTFKEDIQKAQVSGQGDSLHEHIANLAGSPAIKKGILQTVKVVDELVKVMGRHKPENIVIEMARENQTTQKGQKNSRERMKRIEEGIKELGSQILKEHPVENTQLQNEKLYLYYLQNGRDMYVDQELDINRLSDYDVDHIVPQSFLKDDSIDNKVLTRSDKARGKSDNVPSEEVVKKMKNYWRQLLNAKLITQRKFDNLTKAERGGLSELDKAGFIKRQLVETRQITKHVAQILDSRMNTKYDENDKLIREVKVITLKSKLVSDFRKDFQFYKVREINNYHHAHDAYLNAVVGTALIKKYPKLESEFVYGDYKVYDVRKMIAKSEQEIGKATAKYFFYSNIMNFFKTEITLANGEIRKRPLIETNGETGEIVWDKGRDFATVRKVLSMPQVNIVKKTEVQTGGFSKESILPKRNSDKLIARKKDWDPKKYGGFDSPTVAYSVLVVAKVEKGKSKKLKSVKELLGITIMERSSFEKNPIDFLEAKGYKEVKKDLIIKLPKYSLFELENGRKRMLASAGELQKGNELALPSKYVNFLYLASHYEKLKGSPEDNEQKQLFVEQHKHYLDEIIEQISEFSKRVILADANLDKVLSAYNKHRDKPIREQAENIIHLFTLTNLGAPAAFKYFDTTIDRKRYTSTKEVLDATLIHQSITGLYETRIDLSQLGGDGGGGSGSSGGGGGWVQEISDSRPMLHIYLNGRRFLGLLNTGADKTCIAGRDWPANWPIHQTESSLQGLGMACGVARSSQPLRWQHEDKSGIIHPFVIPTLPFTLWGRDIMKDIKVRLMTDSPDDSQDLMIGAIESNLFADQISWKSDQPVWLNQWPLKQEKLQALQQLVTEQLQLGHLEESNSPWNTPVFVIKKKSGKWRLLQDLRAVNATMHDMGALQPGLPSPVAVPKGWEIIIIDLQDCFFNIKLHPEDCKRFAFSVPSPNFKRPYQRFQWKVLPQGMKNSPTLCQKFVDKAILTVRDKYQDSYIVHYMDDILLAHPSRSIVDEILTSMIQALNKHGLVVSTEKIQKYDNLKYLGTHIQGDSVSYQKLQIRTDKLRTLNDFQKLLGNINWIRPFLKLTTGELKPLFEILNGDSNPISTRKLTPEACKALQLMNERLSTARVKRLDLSQPWSLCILKTEYTPTACLWQDGVVEWIHLPHISPKVITPYDIFCTQLIIKGRHRSKELFSKDPDYIVVPYTKVQFDLLLQEKEDWPISLLGFLGEVHFHLPKDPLLTFTLQTAIIFPHMTSTTPLEKGIVIFTDGSANGRSVTYIQGREPIIKENTQNTAQQAEIVAVITAFEEVSQPFNLYTDSKYVTGLFPEIETATLSPRTKIYTELKHLQRLIHKRQEKFYIGHIRGHTGLPGPLAQGNAYADSLTRILTAGKRTADGSEFEKRTADGSEFESPKKKAKVE

SEQ ID NO: 3180 - protein, 2114 aa, synthetic construct
MPAAKRVKLDGGDKKYSIGLDIGTNSVGWAVITDEYKVPSKKFKVLGNTDRHSIKKNLIGALLFDSGETAEATRLKRTARRRYTRRKNRICYLQEIFSNEMAKVDDSFFHRLEESFLVEEDKKHERHPIFGNIVDEVAYHEKYPTIYHLRKKLVDSTDKADLRLIYLALAHMIKFRGHFLIEGDLNPDNSDVDKLFIQLVQTYNQLFEENPINASGVDAKAILSARLSKSRRLENLIAQLPGEKKNGLFGNLIALSLGLTPNFKSNFDLAEDAKLQLSKDTYDDDLDNLLAQIGDQYADLFLAAKNLSDAILLSDILRVNTEITKAPLSASMIKRYDEHHQDLTLLKALVRQQLPEKYKEIFFDQSKNGYAGYIDGGASQEEFYKFIKPILEKMDGTEELLVKLNREDLLRKQRTFDNGSIPHQIHLGELHAILRRQEDFYPFLKDNREKIEKILTFRIPYYVGPLARGNSRFAWMTRKSEETITPWNFEEVVDKGASAQSFIERMTNFDKNLPNEKVLPKHSLLYEYFTVYNELTKVKYVTEGMRKPAFLSGEQKKAIVDLLFKTNRKVTVKQLKEDYFKKIECFDSVEISGVEDRFNASLGTYHDLLKIIKDKDFLDNEENEDILEDIVLTLTLFEDREMIEERLKTYAHLFDDKVMKQLKRRRYTGWGRLSRKLINGIRDKQSGKTILDFLKSDGFANRNFMQLIHDDSLTFKEDIQKAQVSGQGDSLHEHIANLAGSPAIKKGILQTVKVVDELVKVMGRHKPENIVIEMARENQTTQKGQKNSRERMKRIEEGIKELGSQILKEHPVENTQLQNEKLYLYYLQNGRDMYVDQELDINRLSDYDVDHIVPQSFLKDDSIDNKVLTRSDKARGKSDNVPSEEVVKKMKNYWRQLLNAKLITQRKFDNLTKAERGGLSELDKAGFIKRQLVETRQITKHVAQILDSRMNTKYDENDKLIREVKVITLKSKLVSDFRKDFQFYKVREINNYHHAHDAYLNAVVGTALIKKYPKLESEFVYGDYKVYDVRKMIAKSEQEIGKATAKYFFYSNIMNFFKTEITLANGEIRKRPLIETNGETGEIVWDKGRDFATVRKVLSMPQVNIVKKTEVQTGGFSKESILPKRNSDKLIARKKDWDPKKYGGFDSPTVAYSVLVVAKVEKGKSKKLKSVKELLGITIMERSSFEKNPIDFLEAKGYKEVKKDLIIKLPKYSLFELENGRKRMLASAGELQKGNELALPSKYVNFLYLASHYEKLKGSPEDNEQKQLFVEQHKHYLDEIIEQISEFSKRVILADANLDKVLSAYNKHRDKPIREQAENIIHLFTLTNLGAPAAFKYFDTTIDRKRYTSTKEVLDATLIHQSITGLYETRIDLSQLGGDGGPAPAPAPAPGGWVQEISDSRPMLHIYLNGRRFLGLLNTGADKTCIAGRDWPANWPIHQTESSLQGLGMACGVARSSQPLRWQHEDKSGIIHPFVIPTLPFTLWGRDIMKDIKVRLMTDSPDDSQDLMIGAIESNLFADQISWKSDQPVWLNQWPLKQEKLQALQQLVTEQLQLGHLEESNSPWNTPVFVIKKKSGKWRLLQDLRAVNATMHDMGALQPGLPSPVAVPKGWEIIIIDLQDCFFNIKLHPEDCKRFAFSVPSPNFKRPYQRFQWKVLPQGMKNSPTLCQKFVDKAILTVRDKYQDSYIVHYMDDILLAHPSRSIVDEILTSMIQALNKHGLVVSTEKIQKYDNLKYLGTHIQGDSVSYQKLQIRTDKLRTLNDFQKLLGNINWIRPFLKLTTGELKPLFEILNGDSNPISTRKLTPEACKALQLMNERLSTARVKRLDLSQPWSLCILKTEYTPTACLWQDGVVEWIHLPHISPKVITPYDIFCTQLIIKGRHRSKELFSKDPDYIVVPYTKVQFDLLLQEKEDWPISLLGFLGEVHFHLPKDPLLTFTLQTAIIFPHMTSTTPLEKGIVIFTDGSANGRSVTYIQGREPIIKENTQNTAQQAEIVAVITAFEEVSQPFNLYTDSKYVTGLFPEIETATLSPRTKIYTELKHLQRLIHKRQEKFYIGHIRGHTGLPGPLAQGNAYADSLTRILTAGKRTADGSEFEKRTADGSEFESPKKKAKVE

SEQ ID NO: 3181 - protein, 2116 aa, synthetic construct
MPAAKRVKLDGGDKKYSIGLDIGTNSVGWAVITDEYKVPSKKFKVLGNTDRHSIKKNLIGALLFDSGETAEATRLKRTARRRYTRRKNRICYLQEIFSNEMAKVDDSFFHRLEESFLVEEDKKHERHPIFGNIVDEVAYHEKYPTIYHLRKKLVDSTDKADLRLIYLALAHMIKFRGHFLIEGDLNPDNSDVDKLFIQLVQTYNQLFEENPINASGVDAKAILSARLSKSRRLENLIAQLPGEKKNGLFGNLIALSLGLTPNFKSNFDLAEDAKLQLSKDTYDDDLDNLLAQIGDQYADLFLAAKNLSDAILLSDILRVNTEITKAPLSASMIKRYDEHHQDLTLLKALVRQQLPEKYKEIFFDQSKNGYAGYIDGGASQEEFYKFIKPILEKMDGTEELLVKLNREDLLRKQRTFDNGSIPHQIHLGELHAILRRQEDFYPFLKDNREKIEKILTFRIPYYVGPLARGNSRFAWMTRKSEETITPWNFEEVVDKGASAQSFIERMTNFDKNLPNEKVLPKHSLLYEYFTVYNELTKVKYVTEGMRKPAFLSGEQKKAIVDLLFKTNRKVTVKQLKEDYFKKIECFDSVEISGVEDRFNASLGTYHDLLKIIKDKDFLDNEENEDILEDIVLTLTLFEDREMIEERLKTYAHLFDDKVMKQLKRRRYTGWGRLSRKLINGIRDKQSGKTILDFLKSDGFANRNFMQLIHDDSLTFKEDIQKAQVSGQGDSLHEHIANLAGSPAIKKGILQTVKVVDELVKVMGRHKPENIVIEMARENQTTQKGQKNSRERMKRIEEGIKELGSQILKEHPVENTQLQNEKLYLYYLQNGRDMYVDQELDINRLSDYDVDHIVPQSFLKDDSIDNKVLTRSDKARGKSDNVPSEEVVKKMKNYWRQLLNAKLITQRKFDNLTKAERGGLSELDKAGFIKRQLVETRQITKHVAQILDSRMNTKYDENDKLIREVKVITLKSKLVSDFRKDFQFYKVREINNYHHAHDAYLNAVVGTALIKKYPKLESEFVYGDYKVYDVRKMIAKSEQEIGKATAKYFFYSNIMNFFKTEITLANGEIRKRPLIETNGETGEIVWDKGRDFATVRKVLSMPQVNIVKKTEVQTGGFSKESILPKRNSDKLIARKKDWDPKKYGGFDSPTVAYSVLVVAKVEKGKSKKLKSVKELLGITIMERSSFEKNPIDFLEAKGYKEVKKDLIIKLPKYSLFELENGRKRMLASAGELQKGNELALPSKYVNFLYLASHYEKLKGSPEDNEQKQLFVEQHKHYLDEIIEQISEFSKRVILADANLDKVLSAYNKHRDKPIREQAENIIHLFTLTNLGAPAAFKYFDTTIDRKRYTSTKEVLDATLIHQSITGLYETRIDLSQLGGDGGGSSGGGEAAAKGGWVQEISDSRPMLHIYLNGRRFLGLLNTGADKTCIAGRDWPANWPIHQTESSLQGLGMACGVARSSQPLRWQHEDKSGIIHPFVIPTLPFTLWGRDIMKDIKVRLMTDSPDDSQDLMIGAIESNLFADQISWKSDQPVWLNQWPLKQEKLQALQQLVTEQLQLGHLEESNSPWNTPVFVIKKKSGKWRLLQDLRAVNATMHDMGALQPGLPSPVAVPKGWEIIIIDLQDCFFNIKLHPEDCKRFAFSVPSPNFKRPYQRFQWKVLPQGMKNSPTLCQKFVDKAILTVRDKYQDSYIVHYMDDILLAHPSRSIVDEILTSMIQALNKHGLVVSTEKIQKYDNLKYLGTHIQGDSVSYQKLQIRTDKLRTLNDFQKLLGNINWIRPFLKLTTGELKPLFEILNGDSNPISTRKLTPEACKALQLMNERLSTARVKRLDLSQPWSLCILKTEYTPTACLWQDGVVEWIHLPHISPKVITPYDIFCTQLIIKGRHRSKELFSKDPDYIVVPYTKVQFDLLLQEKEDWPISLLGFLGEVHFHLPKDPLLTFTLQTAIIFPHMTSTTPLEKGIVIFTDGSANGRSVTYIQGREPIIKENTQNTAQQAEIVAVITAFEEVSQPFNLYTDSKYVTGLFPEIETATLSPRTKIYTELKHLQRLIHKRQEKFYIGHIRGHTGLPGPLAQGNAYADSLTRILTAGKRTADGSEFEKRTADGSEFESPKKKAKVE

SEQ ID NO: 3182 - protein, 2116 aa, synthetic construct
MPAAKRVKLDGGDKKYSIGLDIGTNSVGWAVITDEYKVPSKKFKVLGNTDRHSIKKNLIGALLFDSGETAEATRLKRTARRRYTRRKNRICYLQEIFSNEMAKVDDSFFHRLEESFLVEEDKKHERHPIFGNIVDEVAYHEKYPTIYHLRKKLVDSTDKADLRLIYLALAHMIKFRGHFLIEGDLNPDNSDVDKLFIQLVQTYNQLFEENPINASGVDAKAILSARLSKSRRLENLIAQLPGEKKNGLFGNLIALSLGLTPNFKSNFDLAEDAKLQLSKDTYDDDLDNLLAQIGDQYADLFLAAKNLSDAILLSDILRVNTEITKAPLSASMIKRYDEHHQDLTLLKALVRQQLPEKYKEIFFDQSKNGYAGYIDGGASQEEFYKFIKPILEKMDGTEELLVKLNREDLLRKQRTFDNGSIPHQIHLGELHAILRRQEDFYPFLKDNREKIEKILTFRIPYYVGPLARGNSRFAWMTRKSEETITPWNFEEVVDKGASAQSFIERMTNFDKNLPNEKVLPKHSLLYEYFTVYNELTKVKYVTEGMRKPAFLSGEQKKAIVDLLFKTNRKVTVKQLKEDYFKKIECFDSVEISGVEDRFNASLGTYHDLLKIIKDKDFLDNEENEDILEDIVLTLTLFEDREMIEERLKTYAHLFDDKVMKQLKRRRYTGWGRLSRKLINGIRDKQSGKTILDFLKSDGFANRNFMQLIHDDSLTFKEDIQKAQVSGQGDSLHEHIANLAGSPAIKKGILQTVKVVDELVKVMGRHKPENIVIEMARENQTTQKGQKNSRERMKRIEEGIKELGSQILKEHPVENTQLQNEKLYLYYLQNGRDMYVDQELDINRLSDYDVDHIVPQSFLKDDSIDNKVLTRSDKARGKSDNVPSEEVVKKMKNYWRQLLNAKLITQRKFDNLTKAERGGLSELDKAGFIKRQLVETRQITKHVAQILDSRMNTKYDENDKLIREVKVITLKSKLVSDFRKDFQFYKVREINNYHHAHDAYLNAVVGTALIKKYPKLESEFVYGDYKVYDVRKMIAKSEQEIGKATAKYFFYSNIMNFFKTEITLANGEIRKRPLIETNGETGEIVWDKGRDFATVRKVLSMPQVNIVKKTEVQTGGFSKESILPKRNSDKLIARKKDWDPKKYGGFDSPTVAYSVLVVAKVEKGKSKKLKSVKELLGITIMERSSFEKNPIDFLEAKGYKEVKKDLIIKLPKYSLFELENGRKRMLASAGELQKGNELALPSKYVNFLYLASHYEKLKGSPEDNEQKQLFVEQHKHYLDEIIEQISEFSKRVILADANLDKVLSAYNKHRDKPIREQAENIIHLFTLTNLGAPAAFKYFDTTIDRKRYTSTKEVLDATLIHQSITGLYETRIDLSQLGGDGGGSSEAAAKPAPGGWVQEISDSRPMLHIYLNGRRFLGLLNTGADKTCIAGRDWPANWPIHQTESSLQGLGMACGVARSSQPLRWQHEDKSGIIHPFVIPTLPFTLWGRDIMKDIKVRLMTDSPDDSQDLMIGAIESNLFADQISWKSDQPVWLNQWPLKQEKLQALQQLVTEQLQLGHLEESNSPWNTPVFVIKKKSGKWRLLQDLRAVNATMHDMGALQPGLPSPVAVPKGWEIIIIDLQDCFFNIKLHPEDCKRFAFSVPSPNFKRPYQRFQWKVLPQGMKNSPTLCQKFVDKAILTVRDKYQDSYIVHYMDDILLAHPSRSIVDEILTSMIQALNKHGLVVSTEKIQKYDNLKYLGTHIQGDSVSYQKLQIRTDKLRTLNDFQKLLGNINWIRPFLKLTTGELKPLFEILNGDSNPISTRKLTPEACKALQLMNERLSTARVKRLDLSQPWSLCILKTEYTPTACLWQDGVVEWIHLPHISPKVITPYDIFCTQLIIKGRHRSKELFSKDPDYIVVPYTKVQFDLLLQEKEDWPISLLGFLGEVHFHLPKDPLLTFTLQTAIIFPHMTSTTPLEKGIVIFTDGSANGRSVTYIQGREPIIKENTQNTAQQAEIVAVITAFEEVSQPFNLYTDSKYVTGLFPEIETATLSPRTKIYTELKHLQRLIHKRQEKFYIGHIRGHTGLPGPLAQGNAYADSLTRILTAGKRTADGSEFEKRTADGSEFESPKKKAKVE

SEQ ID NO: 3183 - protein, 2111 aa, synthetic construct
MPAAKRVKLDGGDKKYSIGLDIGTNSVGWAVITDEYKVPSKKFKVLGNTDRHSIKKNLIGALLFDSGETAEATRLKRTARRRYTRRKNRICYLQEIFSNEMAKVDDSFFHRLEESFLVEEDKKHERHPIFGNIVDEVAYHEKYPTIYHLRKKLVDSTDKADLRLIYLALAHMIKFRGHFLIEGDLNPDNSDVDKLFIQLVQTYNQLFEENPINASGVDAKAILSARLSKSRRLENLIAQLPGEKKNGLFGNLIALSLGLTPNFKSNFDLAEDAKLQLSKDTYDDDLDNLLAQIGDQYADLFLAAKNLSDAILLSDILRVNTEITKAPLSASMIKRYDEHHQDLTLLKALVRQQLPEKYKEIFFDQSKNGYAGYIDGGASQEEFYKFIKPILEKMDGTEELLVKLNREDLLRKQRTFDNGSIPHQIHLGELHAILRRQEDFYPFLKDNREKIEKILTFRIPYYVGPLARGNSRFAWMTRKSEETITPWNFEEVVDKGASAQSFIERMTNFDKNLPNEKVLPKHSLLYEYFTVYNELTKVKYVTEGMRKPAFLSGEQKKAIVDLLFKTNRKVTVKQLKEDYFKKIECFDSVEISGVEDRFNASLGTYHDLLKIIKDKDFLDNEENEDILEDIVLTLTLFEDREMIEERLKTYAHLFDDKVMKQLKRRRYTGWGRLSRKLINGIRDKQSGKTILDFLKSDGFANRNFMQLIHDDSLTFKEDIQKAQVSGQGDSLHEHIANLAGSPAIKKGILQTVKVVDELVKVMGRHKPENIVIEMARENQTTQKGQKNSRERMKRIEEGIKELGSQILKEHPVENTQLQNEKLYLYYLQNGRDMYVDQELDINRLSDYDVDHIVPQSFLKDDSIDNKVLTRSDKARGKSDNVPSEEVVKKMKNYWRQLLNAKLITQRKFDNLTKAERGGLSELDKAGFIKRQLVETRQITKHVAQILDSRMNTKYDENDKLIREVKVITLKSKLVSDFRKDFQFYKVREINNYHHAHDAYLNAVVGTALIKKYPKLESEFVYGDYKVYDVRKMIAKSEQEIGKATAKYFFYSNIMNFFKTEITLANGEIRKRPLIETNGETGEIVWDKGRDFATVRKVLSMPQVNIVKKTEVQTGGFSKESILPKRNSDKLIARKKDWDPKKYGGFDSPTVAYSVLVVAKVEKGKSKKLKSVKELLGITIMERSSFEKNPIDFLEAKGYKEVKKDLIIKLPKYSLFELENGRKRMLASAGELQKGNELALPSKYVNFLYLASHYEKLKGSPEDNEQKQLFVEQHKHYLDEIIEQISEFSKRVILADANLDKVLSAYNKHRDKPIREQAENIIHLFTLTNLGAPAAFKYFDTTIDRKRYTSTKEVLDATLIHQSITGLYETRIDLSQLGGDGGGGSGSSGGWVQEISDSRPMLHIYLNGRRFLGLLNTGADKTCIAGRDWPANWPIHQTESSLQGLGMACGVARSSQPLRWQHEDKSGIIHPFVIPTLPFTLWGRDIMKDIKVRLMTDSPDDSQDLMIGAIESNLFADQISWKSDQPVWLNQWPLKQEKLQALQQLVTEQLQLGHLEESNSPWNTPVFVIKKKSGKWRLLQDLRAVNATMHDMGALQPGLPSPVAVPKGWEIIIIDLQDCFFNIKLHPEDCKRFAFSVPSPNFKRPYQRFQWKVLPQGMKNSPTLCQKFVDKAILTVRDKYQDSYIVHYMDDILLAHPSRSIVDEILTSMIQALNKHGLVVSTEKIQKYDNLKYLGTHIQGDSVSYQKLQIRTDKLRTLNDFQKLLGNINWIRPFLKLTTGELKPLFEILNGDSNPISTRKLTPEACKALQLMNERLSTARVKRLDLSQPWSLCILKTEYTPTACLWQDGVVEWIHLPHISPKVITPYDIFCTQLIIKGRHRSKELFSKDPDYIVVPYTKVQFDLLLQEKEDWPISLLGFLGEVHFHLPKDPLLTFTLQTAIIFPHMTSTTPLEKGIVIFTDGSANGRSVTYIQGREPIIKENTQNTAQQAEIVAVITAFEEVSQPFNLYTDSKYVTGLFPEIETATLSPRTKIYTELKHLQRLIHKRQEKFYIGHIRGHTGLPGPLAQGNAYADSLTRILTAGKRTADGSEFEKRTADGSEFESPKKKAKVE

SEQ ID NO: 3184 - protein, 2114 aa, synthetic construct
MPAAKRVKLDGGDKKYSIGLDIGTNSVGWAVITDEYKVPSKKFKVLGNTDRHSIKKNLIGALLFDSGETAEATRLKRTARRRYTRRKNRICYLQEIFSNEMAKVDDSFFHRLEESFLVEEDKKHERHPIFGNIVDEVAYHEKYPTIYHLRKKLVDSTDKADLRLIYLALAHMIKFRGHFLIEGDLNPDNSDVDKLFIQLVQTYNQLFEENPINASGVDAKAILSARLSKSRRLENLIAQLPGEKKNGLFGNLIALSLGLTPNFKSNFDLAEDAKLQLSKDTYDDDLDNLLAQIGDQYADLFLAAKNLSDAILLSDILRVNTEITKAPLSASMIKRYDEHHQDLTLLKALVRQQLPEKYKEIFFDQSKNGYAGYIDGGASQEEFYKFIKPILEKMDGTEELLVKLNREDLLRKQRTFDNGSIPHQIHLGELHAILRRQEDFYPFLKDNREKIEKILTFRIPYYVGPLARGNSRFAWMTRKSEETITPWNFEEVVDKGASAQSFIERMTNFDKNLPNEKVLPKHSLLYEYFTVYNELTKVKYVTEGMRKPAFLSGEQKKAIVDLLFKTNRKVTVKQLKEDYFKKIECFDSVEISGVEDRFNASLGTYHDLLKIIKDKDFLDNEENEDILEDIVLTLTLFEDREMIEERLKTYAHLFDDKVMKQLKRRRYTGWGRLSRKLINGIRDKQSGKTILDFLKSDGFANRNFMQLIHDDSLTFKEDIQKAQVSGQGDSLHEHIANLAGSPAIKKGILQTVKVVDELVKVMGRHKPENIVIEMARENQTTQKGQKNSRERMKRIEEGIKELGSQILKEHPVENTQLQNEKLYLYYLQNGRDMYVDQELDINRLSDYDVDHIVPQSFLKDDSIDNKVLTRSDKARGKSDNVPSEEVVKKMKNYWRQLLNAKLITQRKFDNLTKAERGGLSELDKAGFIKRQLVETRQITKHVAQILDSRMNTKYDENDKLIREVKVITLKSKLVSDFRKDFQFYKVREINNYHHAHDAYLNAVVGTALIKKYPKLESEFVYGDYKVYDVRKMIAKSEQEIGKATAKYFFYSNIMNFFKTEITLANGEIRKRPLIETNGETGEIVWDKGRDFATVRKVLSMPQVNIVKKTEVQTGGFSKESILPKRNSDKLIARKKDWDPKKYGGFDSPTVAYSVLVVAKVEKGKSKKLKSVKELLGITIMERSSFEKNPIDFLEAKGYKEVKKDLIIKLPKYSLFELENGRKRMLASAGELQKGNELALPSKYVNFLYLASHYEKLKGSPEDNEQKQLFVEQHKHYLDEIIEQISEFSKRVILADANLDKVLSAYNKHRDKPIREQAENIIHLFTLTNLGAPAAFKYFDTTIDRKRYTSTKEVLDATLIHQSITGLYETRIDLSQLGGDGGGGGGSSGGSGGWVQEISDSRPMLHIYLNGRRFLGLLNTGADKTCIAGRDWPANWPIHQTESSLQGLGMACGVARSSQPLRWQHEDKSGIIHPFVIPTLPFTLWGRDIMKDIKVRLMTDSPDDSQDLMIGAIESNLFADQISWKSDQPVWLNQWPLKQEKLQALQQLVTEQLQLGHLEESNSPWNTPVFVIKKKSGKWRLLQDLRAVNATMHDMGALQPGLPSPVAVPKGWEIIIIDLQDCFFNIKLHPEDCKRFAFSVPSPNFKRPYQRFQWKVLPQGMKNSPTLCQKFVDKAILTVRDKYQDSYIVHYMDDILLAHPSRSIVDEILTSMIQALNKHGLVVSTEKIQKYDNLKYLGTHIQGDSVSYQKLQIRTDKLRTLNDFQKLLGNINWIRPFLKLTTGELKPLFEILNGDSNPISTRKLTPEACKALQLMNERLSTARVKRLDLSQPWSLCILKTEYTPTACLWQDGVVEWIHLPHISPKVITPYDIFCTQLIIKGRHRSKELFSKDPDYIVVPYTKVQFDLLLQEKEDWPISLLGFLGEVHFHLPKDPLLTFTLQTAIIFPHMTSTTPLEKGIVIFTDGSANGRSVTYIQGREPIIKENTQNTAQQAEIVAVITAFEEVSQPFNLYTDSKYVTGLFPEIETATLSPRTKIYTELKHLQRLIHKRQEKFYIGHIRGHTGLPGPLAQGNAYADSLTRILTAGKRTADGSEFEKRTADGSEFESPKKKAKVE

SEQ ID NO: 3185 - protein, 2120 aa, synthetic construct
MPAAKRVKLDGGDKKYSIGLDIGTNSVGWAVITDEYKVPSKKFKVLGNTDRHSIKKNLIGALLFDSGETAEATRLKRTARRRYTRRKNRICYLQEIFSNEMAKVDDSFFHRLEESFLVEEDKKHERHPIFGNIVDEVAYHEKYPTIYHLRKKLVDSTDKADLRLIYLALAHMIKFRGHFLIEGDLNPDNSDVDKLFIQLVQTYNQLFEENPINASGVDAKAILSARLSKSRRLENLIAQLPGEKKNGLFGNLIALSLGLTPNFKSNFDLAEDAKLQLSKDTYDDDLDNLLAQIGDQYADLFLAAKNLSDAILLSDILRVNTEITKAPLSASMIKRYDEHHQDLTLLKALVRQQLPEKYKEIFFDQSKNGYAGYIDGGASQEEFYKFIKPILEKMDGTEELLVKLNREDLLRKQRTFDNGSIPHQIHLGELHAILRRQEDFYPFLKDNREKIEKILTFRIPYYVGPLARGNSRFAWMTRKSEETITPWNFEEVVDKGASAQSFIERMTNFDKNLPNEKVLPKHSLLYEYFTVYNELTKVKYVTEGMRKPAFLSGEQKKAIVDLLFKTNRKVTVKQLKEDYFKKIECFDSVEISGVEDRFNASLGTYHDLLKIIKDKDFLDNEENEDILEDIVLTLTLFEDREMIEERLKTYAHLFDDKVMKQLKRRRYTGWGRLSRKLINGIRDKQSGKTILDFLKSDGFANRNFMQLIHDDSLTFKEDIQKAQVSGQGDSLHEHIANLAGSPAIKKGILQTVKVVDELVKVMGRHKPENIVIEMARENQTTQKGQKNSRERMKRIEEGIKELGSQILKEHPVENTQLQNEKLYLYYLQNGRDMYVDQELDINRLSDYDVDHIVPQSFLKDDSIDNKVLTRSDKARGKSDNVPSEEVVKKMKNYWRQLLNAKLITQRKFDNLTKAERGGLSELDKAGFIKRQLVETRQITKHVAQILDSRMNTKYDENDKLIREVKVITLKSKLVSDFRKDFQFYKVREINNYHHAHDAYLNAVVGTALIKKYPKLESEFVYGDYKVYDVRKMIAKSEQEIGKATAKYFFYSNIMNFFKTEITLANGEIRKRPLIETNGETGEIVWDKGRDFATVRKVLSMPQVNIVKKTEVQTGGFSKESILPKRNSDKLIARKKDWDPKKYGGFDSPTVAYSVLVVAKVEKGKSKKLKSVKELLGITIMERSSFEKNPIDFLEAKGYKEVKKDLIIKLPKYSLFELENGRKRMLASAGELQKGNELALPSKYVNFLYLASHYEKLKGSPEDNEQKQLFVEQHKHYLDEIIEQISEFSKRVILADANLDKVLSAYNKHRDKPIREQAENIIHLFTLTNLGAPAAFKYFDTTIDRKRYTSTKEVLDATLIHQSITGLYETRIDLSQLGGDGGEAAAKGGGGSEAAAKGGWVQEISDSRPMLHIYLNGRRFLGLLNTGADKTCIAGRDWPANWPIHQTESSLQGLGMACGVARSSQPLRWQHEDKSGIIHPFVIPTLPFTLWGRDIMKDIKVRLMTDSPDDSQDLMIGAIESNLFADQISWKSDQPVWLNQWPLKQEKLQALQQLVTEQLQLGHLEESNSPWNTPVFVIKKKSGKWRLLQDLRAVNATMHDMGALQPGLPSPVAVPKGWEIIIIDLQDCFFNIKLHPEDCKRFAFSVPSPNFKRPYQRFQWKVLPQGMKNSPTLCQKFVDKAILTVRDKYQDSYIVHYMDDILLAHPSRSIVDEILTSMIQALNKHGLVVSTEKIQKYDNLKYLGTHIQGDSVSYQKLQIRTDKLRTLNDFQKLLGNINWIRPFLKLTTGELKPLFEILNGDSNPISTRKLTPEACKALQLMNERLSTARVKRLDLSQPWSLCILKTEYTPTACLWQDGVVEWIHLPHISPKVITPYDIFCTQLIIKGRHRSKELFSKDPDYIVVPYTKVQFDLLLQEKEDWPISLLGFLGEVHFHLPKDPLLTFTLQTAIIFPHMTSTTPLEKGIVIFTDGSANGRSVTYIQGREPIIKENTQNTAQQAEIVAVITAFEEVSQPFNLYTDSKYVTGLFPEIETATLSPRTKIYTELKHLQRLIHKRQEKFYIGHIRGHTGLPGPLAQGNAYADSLTRILTAGKRTADGSEFEKRTADGSEFESPKKKAKVE

SEQ ID NO: 3186 - protein, 2108 aa, synthetic construct
MPAAKRVKLDGGDKKYSIGLDIGTNSVGWAVITDEYKVPSKKFKVLGNTDRHSIKKNLIGALLFDSGETAEATRLKRTARRRYTRRKNRICYLQEIFSNEMAKVDDSFFHRLEESFLVEEDKKHERHPIFGNIVDEVAYHEKYPTIYHLRKKLVDSTDKADLRLIYLALAHMIKFRGHFLIEGDLNPDNSDVDKLFIQLVQTYNQLFEENPINASGVDAKAILSARLSKSRRLENLIAQLPGEKKNGLFGNLIALSLGLTPNFKSNFDLAEDAKLQLSKDTYDDDLDNLLAQIGDQYADLFLAAKNLSDAILLSDILRVNTEITKAPLSASMIKRYDEHHQDLTLLKALVRQQLPEKYKEIFFDQSKNGYAGYIDGGASQEEFYKFIKPILEKMDGTEELLVKLNREDLLRKQRTFDNGSIPHQIHLGELHAILRRQEDFYPFLKDNREKIEKILTFRIPYYVGPLARGNSRFAWMTRKSEETITPWNFEEVVDKGASAQSFIERMTNFDKNLPNEKVLPKHSLLYEYFTVYNELTKVKYVTEGMRKPAFLSGEQKKAIVDLLFKTNRKVTVKQLKEDYFKKIECFDSVEISGVEDRFNASLGTYHDLLKIIKDKDFLDNEENEDILEDIVLTLTLFEDREMIEERLKTYAHLFDDKVMKQLKRRRYTGWGRLSRKLINGIRDKQSGKTILDFLKSDGFANRNFMQLIHDDSLTFKEDIQKAQVSGQGDSLHEHIANLAGSPAIKKGILQTVKVVDELVKVMGRHKPENIVIEMARENQTTQKGQKNSRERMKRIEEGIKELGSQILKEHPVENTQLQNEKLYLYYLQNGRDMYVDQELDINRLSDYDVDHIVPQSFLKDDSIDNKVLTRSDKARGKSDNVPSEEVVKKMKNYWRQLLNAKLITQRKFDNLTKAERGGLSELDKAGFIKRQLVETRQITKHVAQILDSRMNTKYDENDKLIREVKVITLKSKLVSDFRKDFQFYKVREINNYHHAHDAYLNAVVGTALIKKYPKLESEFVYGDYKVYDVRKMIAKSEQEIGKATAKYFFYSNIMNFFKTEITLANGEIRKRPLIETNGETGEIVWDKGRDFATVRKVLSMPQVNIVKKTEVQTGGFSKESILPKRNSDKLIARKKDWDPKKYGGFDSPTVAYSVLVVAKVEKGKSKKLKSVKELLGITIMERSSFEKNPIDFLEAKGYKEVKKDLIIKLPKYSLFELENGRKRMLASAGELQKGNELALPSKYVNFLYLASHYEKLKGSPEDNEQKQLFVEQHKHYLDEIIEQISEFSKRVILADANLDKVLSAYNKHRDKPIREQAENIIHLFTLTNLGAPAAFKYFDTTIDRKRYTSTKEVLDATLIHQSITGLYETRIDLSQLGGDGGGGSGGWVQEISDSRPMLHIYLNGRRFLGLLNTGADKTCIAGRDWPANWPIHQTESSLQGLGMACGVARSSQPLRWQHEDKSGIIHPFVIPTLPFTLWGRDIMKDIKVRLMTDSPDDSQDLMIGAIESNLFADQISWKSDQPVWLNQWPLKQEKLQALQQLVTEQLQLGHLEESNSPWNTPVFVIKKKSGKWRLLQDLRAVNATMHDMGALQPGLPSPVAVPKGWEIIIIDLQDCFFNIKLHPEDCKRFAFSVPSPNFKRPYQRFQWKVLPQGMKNSPTLCQKFVDKAILTVRDKYQDSYIVHYMDDILLAHPSRSIVDEILTSMIQALNKHGLVVSTEKIQKYDNLKYLGTHIQGDSVSYQKLQIRTDKLRTLNDFQKLLGNINWIRPFLKLTTGELKPLFEILNGDSNPISTRKLTPEACKALQLMNERLSTARVKRLDLSQPWSLCILKTEYTPTACLWQDGVVEWIHLPHISPKVITPYDIFCTQLIIKGRHRSKELFSKDPDYIVVPYTKVQFDLLLQEKEDWPISLLGFLGEVHFHLPKDPLLTFTLQTAIIFPHMTSTTPLEKGIVIFTDGSANGRSVTYIQGREPIIKENTQNTAQQAEIVAVITAFEEVSQPFNLYTDSKYVTGLFPEIETATLSPRTKIYTELKHLQRLIHKRQEKFYIGHIRGHTGLPGPLAQGNAYADSLTRILTAGKRTADGSEFEKRTADGSEFESPKKKAKVE

SEQ ID NO: 3187 - protein, 2114 aa, synthetic construct
MPAAKRVKLDGGDKKYSIGLDIGTNSVGWAVITDEYKVPSKKFKVLGNTDRHSIKKNLIGALLFDSGETAEATRLKRTARRRYTRRKNRICYLQEIFSNEMAKVDDSFFHRLEESFLVEEDKKHERHPIFGNIVDEVAYHEKYPTIYHLRKKLVDSTDKADLRLIYLALAHMIKFRGHFLIEGDLNPDNSDVDKLFIQLVQTYNQLFEENPINASGVDAKAILSARLSKSRRLENLIAQLPGEKKNGLFGNLIALSLGLTPNFKSNFDLAEDAKLQLSKDTYDDDLDNLLAQIGDQYADLFLAAKNLSDAILLSDILRVNTEITKAPLSASMIKRYDEHHQDLTLLKALVRQQLPEKYKEIFFDQSKNGYAGYIDGGASQEEFYKFIKPILEKMDGTEELLVKLNREDLLRKQRTFDNGSIPHQIHLGELHAILRRQEDFYPFLKDNREKIEKILTFRIPYYVGPLARGNSRFAWMTRKSEETITPWNFEEVVDKGASAQSFIERMTNFDKNLPNEKVLPKHSLLYEYFTVYNELTKVKYVTEGMRKPAFLSGEQKKAIVDLLFKTNRKVTVKQLKEDYFKKIECFDSVEISGVEDRFNASLGTYHDLLKIIKDKDFLDNEENEDILEDIVLTLTLFEDREMIEERLKTYAHLFDDKVMKQLKRRRYTGWGRLSRKLINGIRDKQSGKTILDFLKSDGFANRNFMQLIHDDSLTFKEDIQKAQVSGQGDSLHEHIANLAGSPAIKKGILQTVKVVDELVKVMGRHKPENIVIEMARENQTTQKGQKNSRERMKRIEEGIKELGSQILKEHPVENTQLQNEKLYLYYLQNGRDMYVDQELDINRLSDYDVDHIVPQSFLKDDSIDNKVLTRSDKARGKSDNVPSEEVVKKMKNYWRQLLNAKLITQRKFDNLTKAERGGLSELDKAGFIKRQLVETRQITKHVAQILDSRMNTKYDENDKLIREVKVITLKSKLVSDFRKDFQFYKVREINNYHHAHDAYLNAVVGTALIKKYPKLESEFVYGDYKVYDVRKMIAKSEQEIGKATAKYFFYSNIMNFFKTEITLANGEIRKRPLIETNGETGEIVWDKGRDFATVRKVLSMPQVNIVKKTEVQTGGFSKESILPKRNSDKLIARKKDWDPKKYGGFDSPTVAYSVLVVAKVEKGKSKKLKSVKELLGITIMERSSFEKNPIDFLEAKGYKEVKKDLIIKLPKYSLFELENGRKRMLASAGELQKGNELALPSKYVNFLYLASHYEKLKGSPEDNEQKQLFVEQHKHYLDEIIEQISEFSKRVILADANLDKVLSAYNKHRDKPIREQAENIIHLFTLTNLGAPAAFKYFDTTIDRKRYTSTKEVLDATLIHQSITGLYETRIDLSQLGGDGGGSSPAPGGGGGWVQEISDSRPMLHIYLNGRRFLGLLNTGADKTCIAGRDWPANWPIHQTESSLQGLGMACGVARSSQPLRWQHEDKSGIIHPFVIPTLPFTLWGRDIMKDIKVRLMTDSPDDSQDLMIGAIESNLFADQISWKSDQPVWLNQWPLKQEKLQALQQLVTEQLQLGHLEESNSPWNTPVFVIKKKSGKWRLLQDLRAVNATMHDMGALQPGLPSPVAVPKGWEIIIIDLQDCFFNIKLHPEDCKRFAFSVPSPNFKRPYQRFQWKVLPQGMKNSPTLCQKFVDKAILTVRDKYQDSYIVHYMDDILLAHPSRSIVDEILTSMIQALNKHGLVVSTEKIQKYDNLKYLGTHIQGDSVSYQKLQIRTDKLRTLNDFQKLLGNINWIRPFLKLTTGELKPLFEILNGDSNPISTRKLTPEACKALQLMNERLSTARVKRLDLSQPWSLCILKTEYTPTACLWQDGVVEWIHLPHISPKVITPYDIFCTQLIIKGRHRSKELFSKDPDYIVVPYTKVQFDLLLQEKEDWPISLLGFLGEVHFHLPKDPLLTFTLQTAIIFPHMTSTTPLEKGIVIFTDGSANGRSVTYIQGREPIIKENTQNTAQQAEIVAVITAFEEVSQPFNLYTDSKYVTGLFPEIETATLSPRTKIYTELKHLQRLIHKRQEKFYIGHIRGHTGLPGPLAQGNAYADSLTRILTAGKRTADGSEFEKRTADGSEFESPKKKAKVE

SEQ ID NO: 3188 - protein, 2114 aa, synthetic construct
MPAAKRVKLDGGDKKYSIGLDIGTNSVGWAVITDEYKVPSKKFKVLGNTDRHSIKKNLIGALLFDSGETAEATRLKRTARRRYTRRKNRICYLQEIFSNEMAKVDDSFFHRLEESFLVEEDKKHERHPIFGNIVDEVAYHEKYPTIYHLRKKLVDSTDKADLRLIYLALAHMIKFRGHFLIEGDLNPDNSDVDKLFIQLVQTYNQLFEENPINASGVDAKAILSARLSKSRRLENLIAQLPGEKKNGLFGNLIALSLGLTPNFKSNFDLAEDAKLQLSKDTYDDDLDNLLAQIGDQYADLFLAAKNLSDAILLSDILRVNTEITKAPLSASMIKRYDEHHQDLTLLKALVRQQLPEKYKEIFFDQSKNGYAGYIDGGASQEEFYKFIKPILEKMDGTEELLVKLNREDLLRKQRTFDNGSIPHQIHLGELHAILRRQEDFYPFLKDNREKIEKILTFRIPYYVGPLARGNSRFAWMTRKSEETITPWNFEEVVDKGASAQSFIERMTNFDKNLPNEKVLPKHSLLYEYFTVYNELTKVKYVTEGMRKPAFLSGEQKKAIVDLLFKTNRKVTVKQLKEDYFKKIECFDSVEISGVEDRFNASLGTYHDLLKIIKDKDFLDNEENEDILEDIVLTLTLFEDREMIEERLKTYAHLFDDKVMKQLKRRRYTGWGRLSRKLINGIRDKQSGKTILDFLKSDGFANRNFMQLIHDDSLTFKEDIQKAQVSGQGDSLHEHIANLAGSPAIKKGILQTVKVVDELVKVMGRHKPENIVIEMARENQTTQKGQKNSRERMKRIEEGIKELGSQILKEHPVENTQLQNEKLYLYYLQNGRDMYVDQELDINRLSDYDVDHIVPQSFLKDDSIDNKVLTRSDKARGKSDNVPSEEVVKKMKNYWRQLLNAKLITQRKFDNLTKAERGGLSELDKAGFIKRQLVETRQITKHVAQILDSRMNTKYDENDKLIREVKVITLKSKLVSDFRKDFQFYKVREINNYHHAHDAYLNAVVGTALIKKYPKLESEFVYGDYKVYDVRKMIAKSEQEIGKATAKYFFYSNIMNFFKTEITLANGEIRKRPLIETNGETGEIVWDKGRDFATVRKVLSMPQVNIVKKTEVQTGGFSKESILPKRNSDKLIARKKDWDPKKYGGFDSPTVAYSVLVVAKVEKGKSKKLKSVKELLGITIMERSSFEKNPIDFLEAKGYKEVKKDLIIKLPKYSLFELENGRKRMLASAGELQKGNELALPSKYVNFLYLASHYEKLKGSPEDNEQKQLFVEQHKHYLDEIIEQISEFSKRVILADANLDKVLSAYNKHRDKPIREQAENIIHLFTLTNLGAPAAFKYFDTTIDRKRYTSTKEVLDATLIHQSITGLYETRIDLSQLGGDGGPAPGSSGGGGGWVQEISDSRPMLHIYLNGRRFLGLLNTGADKTCIAGRDWPANWPIHQTESSLQGLGMACGVARSSQPLRWQHEDKSGIIHPFVIPTLPFTLWGRDIMKDIKVRLMTDSPDDSQDLMIGAIESNLFADQISWKSDQPVWLNQWPLKQEKLQALQQLVTEQLQLGHLEESNSPWNTPVFVIKKKSGKWRLLQDLRAVNATMHDMGALQPGLPSPVAVPKGWEIIIIDLQDCFFNIKLHPEDCKRFAFSVPSPNFKRPYQRFQWKVLPQGMKNSPTLCQKFVDKAILTVRDKYQDSYIVHYMDDILLAHPSRSIVDEILTSMIQALNKHGLVVSTEKIQKYDNLKYLGTHIQGDSVSYQKLQIRTDKLRTLNDFQKLLGNINWIRPFLKLTTGELKPLFEILNGDSNPISTRKLTPEACKALQLMNERLSTARVKRLDLSQPWSLCILKTEYTPTACLWQDGVVEWIHLPHISPKVITPYDIFCTQLIIKGRHRSKELFSKDPDYIVVPYTKVQFDLLLQEKEDWPISLLGFLGEVHFHLPKDPLLTFTLQTAIIFPHMTSTTPLEKGIVIFTDGSANGRSVTYIQGREPIIKENTQNTAQQAEIVAVITAFEEVSQPFNLYTDSKYVTGLFPEIETATLSPRTKIYTELKHLQRLIHKRQEKFYIGHIRGHTGLPGPLAQGNAYADSLTRILTAGKRTADGSEFEKRTADGSEFESPKKKAKVE

SEQ ID NO: 3189 - protein, 2116 aa, synthetic construct
MPAAKRVKLDGGDKKYSIGLDIGTNSVGWAVITDEYKVPSKKFKVLGNTDRHSIKKNLIGALLFDSGETAEATRLKRTARRRYTRRKNRICYLQEIFSNEMAKVDDSFFHRLEESFLVEEDKKHERHPIFGNIVDEVAYHEKYPTIYHLRKKLVDSTDKADLRLIYLALAHMIKFRGHFLIEGDLNPDNSDVDKLFIQLVQTYNQLFEENPINASGVDAKAILSARLSKSRRLENLIAQLPGEKKNGLFGNLIALSLGLTPNFKSNFDLAEDAKLQLSKDTYDDDLDNLLAQIGDQYADLFLAAKNLSDAILLSDILRVNTEITKAPLSASMIKRYDEHHQDLTLLKALVRQQLPEKYKEIFFDQSKNGYAGYIDGGASQEEFYKFIKPILEKMDGTEELLVKLNREDLLRKQRTFDNGSIPHQIHLGELHAILRRQEDFYPFLKDNREKIEKILTFRIPYYVGPLARGNSRFAWMTRKSEETITPWNFEEVVDKGASAQSFIERMTNFDKNLPNEKVLPKHSLLYEYFTVYNELTKVKYVTEGMRKPAFLSGEQKKAIVDLLFKTNRKVTVKQLKEDYFKKIECFDSVEISGVEDRFNASLGTYHDLLKIIKDKDFLDNEENEDILEDIVLTLTLFEDREMIEERLKTYAHLFDDKVMKQLKRRRYTGWGRLSRKLINGIRDKQSGKTILDFLKSDGFANRNFMQLIHDDSLTFKEDIQKAQVSGQGDSLHEHIANLAGSPAIKKGILQTVKVVDELVKVMGRHKPENIVIEMARENQTTQKGQKNSRERMKRIEEGIKELGSQILKEHPVENTQLQNEKLYLYYLQNGRDMYVDQELDINRLSDYDVDHIVPQSFLKDDSIDNKVLTRSDKARGKSDNVPSEEVVKKMKNYWRQLLNAKLITQRKFDNLTKAERGGLSELDKAGFIKRQLVETRQITKHVAQILDSRMNTKYDENDKLIREVKVITLKSKLVSDFRKDFQFYKVREINNYHHAHDAYLNAVVGTALIKKYPKLESEFVYGDYKVYDVRKMIAKSEQEIGKATAKYFFYSNIMNFFKTEITLANGEIRKRPLIETNGETGEIVWDKGRDFATVRKVLSMPQVNIVKKTEVQTGGFSKESILPKRNSDKLIARKKDWDPKKYGGFDSPTVAYSVLVVAKVEKGKSKKLKSVKELLGITIMERSSFEKNPIDFLEAKGYKEVKKDLIIKLPKYSLFELENGRKRMLASAGELQKGNELALPSKYVNFLYLASHYEKLKGSPEDNEQKQLFVEQHKHYLDEIIEQISEFSKRVILADANLDKVLSAYNKHRDKPIREQAENIIHLFTLTNLGAPAAFKYFDTTIDRKRYTSTKEVLDATLIHQSITGLYETRIDLSQLGGDGGEAAAKGGSPAPGGWVQEISDSRPMLHIYLNGRRFLGLLNTGADKTCIAGRDWPANWPIHQTESSLQGLGMACGVARSSQPLRWQHEDKSGIIHPFVIPTLPFTLWGRDIMKDIKVRLMTDSPDDSQDLMIGAIESNLFADQISWKSDQPVWLNQWPLKQEKLQALQQLVTEQLQLGHLEESNSPWNTPVFVIKKKSGKWRLLQDLRAVNATMHDMGALQPGLPSPVAVPKGWEIIIIDLQDCFFNIKLHPEDCKRFAFSVPSPNFKRPYQRFQWKVLPQGMKNSPTLCQKFVDKAILTVRDKYQDSYIVHYMDDILLAHPSRSIVDEILTSMIQALNKHGLVVSTEKIQKYDNLKYLGTHIQGDSVSYQKLQIRTDKLRTLNDFQKLLGNINWIRPFLKLTTGELKPLFEILNGDSNPISTRKLTPEACKALQLMNERLSTARVKRLDLSQPWSLCILKTEYTPTACLWQDGVVEWIHLPHISPKVITPYDIFCTQLIIKGRHRSKELFSKDPDYIVVPYTKVQFDLLLQEKEDWPISLLGFLGEVHFHLPKDPLLTFTLQTAIIFPHMTSTTPLEKGIVIFTDGSANGRSVTYIQGREPIIKENTQNTAQQAEIVAVITAFEEVSQPFNLYTDSKYVTGLFPEIETATLSPRTKIYTELKHLQRLIHKRQEKFYIGHIRGHTGLPGPLAQGNAYADSLTRILTAGKRTADGSEFEKRTADGSEFESPKKKAKVE

SEQ ID NO: 3190 - protein, 2114 aa, synthetic construct
MPAAKRVKLDGGDKKYSIGLDIGTNSVGWAVITDEYKVPSKKFKVLGNTDRHSIKKNLIGALLFDSGETAEATRLKRTARRRYTRRKNRICYLQEIFSNEMAKVDDSFFHRLEESFLVEEDKKHERHPIFGNIVDEVAYHEKYPTIYHLRKKLVDSTDKADLRLIYLALAHMIKFRGHFLIEGDLNPDNSDVDKLFIQLVQTYNQLFEENPINASGVDAKAILSARLSKSRRLENLIAQLPGEKKNGLFGNLIALSLGLTPNFKSNFDLAEDAKLQLSKDTYDDDLDNLLAQIGDQYADLFLAAKNLSDAILLSDILRVNTEITKAPLSASMIKRYDEHHQDLTLLKALVRQQLPEKYKEIFFDQSKNGYAGYIDGGASQEEFYKFIKPILEKMDGTEELLVKLNREDLLRKQRTFDNGSIPHQIHLGELHAILRRQEDFYPFLKDNREKIEKILTFRIPYYVGPLARGNSRFAWMTRKSEETITPWNFEEVVDKGASAQSFIERMTNFDKNLPNEKVLPKHSLLYEYFTVYNELTKVKYVTEGMRKPAFLSGEQKKAIVDLLFKTNRKVTVKQLKEDYFKKIECFDSVEISGVEDRFNASLGTYHDLLKIIKDKDFLDNEENEDILEDIVLTLTLFEDREMIEERLKTYAHLFDDKVMKQLKRRRYTGWGRLSRKLINGIRDKQSGKTILDFLKSDGFANRNFMQLIHDDSLTFKEDIQKAQVSGQGDSLHEHIANLAGSPAIKKGILQTVKVVDELVKVMGRHKPENIVIEMARENQTTQKGQKNSRERMKRIEEGIKELGSQILKEHPVENTQLQNEKLYLYYLQNGRDMYVDQELDINRLSDYDVDHIVPQSFLKDDSIDNKVLTRSDKARGKSDNVPSEEVVKKMKNYWRQLLNAKLITQRKFDNLTKAERGGLSELDKAGFIKRQLVETRQITKHVAQILDSRMNTKYDENDKLIREVKVITLKSKLVSDFRKDFQFYKVREINNYHHAHDAYLNAVVGTALIKKYPKLESEFVYGDYKVYDVRKMIAKSEQEIGKATAKYFFYSNIMNFFKTEITLANGEIRKRPLIETNGETGEIVWDKGRDFATVRKVLSMPQVNIVKKTEVQTGGFSKESILPKRNSDKLIARKKDWDPKKYGGFDSPTVAYSVLVVAKVEKGKSKKLKSVKELLGITIMERSSFEKNPIDFLEAKGYKEVKKDLIIKLPKYSLFELENGRKRMLASAGELQKGNELALPSKYVNFLYLASHYEKLKGSPEDNEQKQLFVEQHKHYLDEIIEQISEFSKRVILADANLDKVLSAYNKHRDKPIREQAENIIHLFTLTNLGAPAAFKYFDTTIDRKRYTSTKEVLDATLIHQSITGLYETRIDLSQLGGDGGGSSGGSGGGGGWVQEISDSRPMLHIYLNGRRFLGLLNTGADKTCIAGRDWPANWPIHQTESSLQGLGMACGVARSSQPLRWQHEDKSGIIHPFVIPTLPFTLWGRDIMKDIKVRLMTDSPDDSQDLMIGAIESNLFADQISWKSDQPVWLNQWPLKQEKLQALQQLVTEQLQLGHLEESNSPWNTPVFVIKKKSGKWRLLQDLRAVNATMHDMGALQPGLPSPVAVPKGWEIIIIDLQDCFFNIKLHPEDCKRFAFSVPSPNFKRPYQRFQWKVLPQGMKNSPTLCQKFVDKAILTVRDKYQDSYIVHYMDDILLAHPSRSIVDEILTSMIQALNKHGLVVSTEKIQKYDNLKYLGTHIQGDSVSYQKLQIRTDKLRTLNDFQKLLGNINWIRPFLKLTTGELKPLFEILNGDSNPISTRKLTPEACKALQLMNERLSTARVKRLDLSQPWSLCILKTEYTPTACLWQDGVVEWIHLPHISPKVITPYDIFCTQLIIKGRHRSKELFSKDPDYIVVPYTKVQFDLLLQEKEDWPISLLGFLGEVHFHLPKDPLLTFTLQTAIIFPHMTSTTPLEKGIVIFTDGSANGRSVTYIQGREPIIKENTQNTAQQAEIVAVITAFEEVSQPFNLYTDSKYVTGLFPEIETATLSPRTKIYTELKHLQRLIHKRQEKFYIGHIRGHTGLPGPLAQGNAYADSLTRILTAGKRTADGSEFEKRTADGSEFESPKKKAKVE

SEQ ID NO: 3191 - protein, 2116 aa, synthetic construct
MPAAKRVKLDGGDKKYSIGLDIGTNSVGWAVITDEYKVPSKKFKVLGNTDRHSIKKNLIGALLFDSGETAEATRLKRTARRRYTRRKNRICYLQEIFSNEMAKVDDSFFHRLEESFLVEEDKKHERHPIFGNIVDEVAYHEKYPTIYHLRKKLVDSTDKADLRLIYLALAHMIKFRGHFLIEGDLNPDNSDVDKLFIQLVQTYNQLFEENPINASGVDAKAILSARLSKSRRLENLIAQLPGEKKNGLFGNLIALSLGLTPNFKSNFDLAEDAKLQLSKDTYDDDLDNLLAQIGDQYADLFLAAKNLSDAILLSDILRVNTEITKAPLSASMIKRYDEHHQDLTLLKALVRQQLPEKYKEIFFDQSKNGYAGYIDGGASQEEFYKFIKPILEKMDGTEELLVKLNREDLLRKQRTFDNGSIPHQIHLGELHAILRRQEDFYPFLKDNREKIEKILTFRIPYYVGPLARGNSRFAWMTRKSEETITPWNFEEVVDKGASAQSFIERMTNFDKNLPNEKVLPKHSLLYEYFTVYNELTKVKYVTEGMRKPAFLSGEQKKAIVDLLFKTNRKVTVKQLKEDYFKKIECFDSVEISGVEDRFNASLGTYHDLLKIIKDKDFLDNEENEDILEDIVLTLTLFEDREMIEERLKTYAHLFDDKVMKQLKRRRYTGWGRLSRKLINGIRDKQSGKTILDFLKSDGFANRNFMQLIHDDSLTFKEDIQKAQVSGQGDSLHEHIANLAGSPAIKKGILQTVKVVDELVKVMGRHKPENIVIEMARENQTTQKGQKNSRERMKRIEEGIKELGSQILKEHPVENTQLQNEKLYLYYLQNGRDMYVDQELDINRLSDYDVDHIVPQSFLKDDSIDNKVLTRSDKARGKSDNVPSEEVVKKMKNYWRQLLNAKLITQRKFDNLTKAERGGLSELDKAGFIKRQLVETRQITKHVAQILDSRMNTKYDENDKLIREVKVITLKSKLVSDFRKDFQFYKVREINNYHHAHDAYLNAVVGTALIKKYPKLESEFVYGDYKVYDVRKMIAKSEQEIGKATAKYFFYSNIMNFFKTEITLANGEIRKRPLIETNGETGEIVWDKGRDFATVRKVLSMPQVNIVKKTEVQTGGFSKESILPKRNSDKLIARKKDWDPKKYGGFDSPTVAYSVLVVAKVEKGKSKKLKSVKELLGITIMERSSFEKNPIDFLEAKGYKEVKKDLIIKLPKYSLFELENGRKRMLASAGELQKGNELALPSKYVNFLYLASHYEKLKGSPEDNEQKQLFVEQHKHYLDEIIEQISEFSKRVILADANLDKVLSAYNKHRDKPIREQAENIIHLFTLTNLGAPAAFKYFDTTIDRKRYTSTKEVLDATLIHQSITGLYETRIDLSQLGGDGGGGGEAAAKPAPGGWVQEISDSRPMLHIYLNGRRFLGLLNTGADKTCIAGRDWPANWPIHQTESSLQGLGMACGVARSSQPLRWQHEDKSGIIHPFVIPTLPFTLWGRDIMKDIKVRLMTDSPDDSQDLMIGAIESNLFADQISWKSDQPVWLNQWPLKQEKLQALQQLVTEQLQLGHLEESNSPWNTPVFVIKKKSGKWRLLQDLRAVNATMHDMGALQPGLPSPVAVPKGWEIIIIDLQDCFFNIKLHPEDCKRFAFSVPSPNFKRPYQRFQWKVLPQGMKNSPTLCQKFVDKAILTVRDKYQDSYIVHYMDDILLAHPSRSIVDEILTSMIQALNKHGLVVSTEKIQKYDNLKYLGTHIQGDSVSYQKLQIRTDKLRTLNDFQKLLGNINWIRPFLKLTTGELKPLFEILNGDSNPISTRKLTPEACKALQLMNERLSTARVKRLDLSQPWSLCILKTEYTPTACLWQDGVVEWIHLPHISPKVITPYDIFCTQLIIKGRHRSKELFSKDPDYIVVPYTKVQFDLLLQEKEDWPISLLGFLGEVHFHLPKDPLLTFTLQTAIIFPHMTSTTPLEKGIVIFTDGSANGRSVTYIQGREPIIKENTQNTAQQAEIVAVITAFEEVSQPFNLYTDSKYVTGLFPEIETATLSPRTKIYTELKHLQRLIHKRQEKFYIGHIRGHTGLPGPLAQGNAYADSLTRILTAGKRTADGSEFEKRTADGSEFESPKKKAKVE

SEQ ID NO: 3192 - protein, 2116 aa, synthetic construct
MPAAKRVKLDGGDKKYSIGLDIGTNSVGWAVITDEYKVPSKKFKVLGNTDRHSIKKNLIGALLFDSGETAEATRLKRTARRRYTRRKNRICYLQEIFSNEMAKVDDSFFHRLEESFLVEEDKKHERHPIFGNIVDEVAYHEKYPTIYHLRKKLVDSTDKADLRLIYLALAHMIKFRGHFLIEGDLNPDNSDVDKLFIQLVQTYNQLFEENPINASGVDAKAILSARLSKSRRLENLIAQLPGEKKNGLFGNLIALSLGLTPNFKSNFDLAEDAKLQLSKDTYDDDLDNLLAQIGDQYADLFLAAKNLSDAILLSDILRVNTEITKAPLSASMIKRYDEHHQDLTLLKALVRQQLPEKYKEIFFDQSKNGYAGYIDGGASQEEFYKFIKPILEKMDGTEELLVKLNREDLLRKQRTFDNGSIPHQIHLGELHAILRRQEDFYPFLKDNREKIEKILTFRIPYYVGPLARGNSRFAWMTRKSEETITPWNFEEVVDKGASAQSFIERMTNFDKNLPNEKVLPKHSLLYEYFTVYNELTKVKYVTEGMRKPAFLSGEQKKAIVDLLFKTNRKVTVKQLKEDYFKKIECFDSVEISGVEDRFNASLGTYHDLLKIIKDKDFLDNEENEDILEDIVLTLTLFEDREMIEERLKTYAHLFDDKVMKQLKRRRYTGWGRLSRKLINGIRDKQSGKTILDFLKSDGFANRNFMQLIHDDSLTFKEDIQKAQVSGQGDSLHEHIANLAGSPAIKKGILQTVKVVDELVKVMGRHKPENIVIEMARENQTTQKGQKNSRERMKRIEEGIKELGSQILKEHPVENTQLQNEKLYLYYLQNGRDMYVDQELDINRLSDYDVDHIVPQSFLKDDSIDNKVLTRSDKARGKSDNVPSEEVVKKMKNYWRQLLNAKLITQRKFDNLTKAERGGLSELDKAGFIKRQLVETRQITKHVAQILDSRMNTKYDENDKLIREVKVITLKSKLVSDFRKDFQFYKVREINNYHHAHDAYLNAVVGTALIKKYPKLESEFVYGDYKVYDVRKMIAKSEQEIGKATAKYFFYSNIMNFFKTEITLANGEIRKRPLIETNGETGEIVWDKGRDFATVRKVLSMPQVNIVKKTEVQTGGFSKESILPKRNSDKLIARKKDWDPKKYGGFDSPTVAYSVLVVAKVEKGKSKKLKSVKELLGITIMERSSFEKNPIDFLEAKGYKEVKKDLIIKLPKYSLFELENGRKRMLASAGELQKGNELALPSKYVNFLYLASHYEKLKGSPEDNEQKQLFVEQHKHYLDEIIEQISEFSKRVILADANLDKVLSAYNKHRDKPIREQAENIIHLFTLTNLGAPAAFKYFDTTIDRKRYTSTKEVLDATLIHQSITGLYETRIDLSQLGGDGGGSSEAAAKGGSGGWVQEISDSRPMLHIYLNGRRFLGLLNTGADKTCIAGRDWPANWPIHQTESSLQGLGMACGVARSSQPLRWQHEDKSGIIHPFVIPTLPFTLWGRDIMKDIKVRLMTDSPDDSQDLMIGAIESNLFADQISWKSDQPVWLNQWPLKQEKLQALQQLVTEQLQLGHLEESNSPWNTPVFVIKKKSGKWRLLQDLRAVNATMHDMGALQPGLPSPVAVPKGWEIIIIDLQDCFFNIKLHPEDCKRFAFSVPSPNFKRPYQRFQWKVLPQGMKNSPTLCQKFVDKAILTVRDKYQDSYIVHYMDDILLAHPSRSIVDEILTSMIQALNKHGLVVSTEKIQKYDNLKYLGTHIQGDSVSYQKLQIRTDKLRTLNDFQKLLGNINWIRPFLKLTTGELKPLFEILNGDSNPISTRKLTPEACKALQLMNERLSTARVKRLDLSQPWSLCILKTEYTPTACLWQDGVVEWIHLPHISPKVITPYDIFCTQLIIKGRHRSKELFSKDPDYIVVPYTKVQFDLLLQEKEDWPISLLGFLGEVHFHLPKDPLLTFTLQTAIIFPHMTSTTPLEKGIVIFTDGSANGRSVTYIQGREPIIKENTQNTAQQAEIVAVITAFEEVSQPFNLYTDSKYVTGLFPEIETATLSPRTKIYTELKHLQRLIHKRQEKFYIGHIRGHTGLPGPLAQGNAYADSLTRILTAGKRTADGSEFEKRTADGSEFESPKKKAKVE

SEQ ID NO: 3193 - protein, 2125 aa, synthetic construct
MPAAKRVKLDGGDKKYSIGLDIGTNSVGWAVITDEYKVPSKKFKVLGNTDRHSIKKNLIGALLFDSGETAEATRLKRTARRRYTRRKNRICYLQEIFSNEMAKVDDSFFHRLEESFLVEEDKKHERHPIFGNIVDEVAYHEKYPTIYHLRKKLVDSTDKADLRLIYLALAHMIKFRGHFLIEGDLNPDNSDVDKLFIQLVQTYNQLFEENPINASGVDAKAILSARLSKSRRLENLIAQLPGEKKNGLFGNLIALSLGLTPNFKSNFDLAEDAKLQLSKDTYDDDLDNLLAQIGDQYADLFLAAKNLSDAILLSDILRVNTEITKAPLSASMIKRYDEHHQDLTLLKALVRQQLPEKYKEIFFDQSKNGYAGYIDGGASQEEFYKFIKPILEKMDGTEELLVKLNREDLLRKQRTFDNGSIPHQIHLGELHAILRRQEDFYPFLKDNREKIEKILTFRIPYYVGPLARGNSRFAWMTRKSEETITPWNFEEVVDKGASAQSFIERMTNFDKNLPNEKVLPKHSLLYEYFTVYNELTKVKYVTEGMRKPAFLSGEQKKAIVDLLFKTNRKVTVKQLKEDYFKKIECFDSVEISGVEDRFNASLGTYHDLLKIIKDKDFLDNEENEDILEDIVLTLTLFEDREMIEERLKTYAHLFDDKVMKQLKRRRYTGWGRLSRKLINGIRDKQSGKTILDFLKSDGFANRNFMQLIHDDSLTFKEDIQKAQVSGQGDSLHEHIANLAGSPAIKKGILQTVKVVDELVKVMGRHKPENIVIEMARENQTTQKGQKNSRERMKRIEEGIKELGSQILKEHPVENTQLQNEKLYLYYLQNGRDMYVDQELDINRLSDYDVDHIVPQSFLKDDSIDNKVLTRSDKARGKSDNVPSEEVVKKMKNYWRQLLNAKLITQRKFDNLTKAERGGLSELDKAGFIKRQLVETRQITKHVAQILDSRMNTKYDENDKLIREVKVITLKSKLVSDFRKDFQFYKVREINNYHHAHDAYLNAVVGTALIKKYPKLESEFVYGDYKVYDVRKMIAKSEQEIGKATAKYFFYSNIMNFFKTEITLANGEIRKRPLIETNGETGEIVWDKGRDFATVRKVLSMPQVNIVKKTEVQTGGFSKESILPKRNSDKLIARKKDWDPKKYGGFDSPTVAYSVLVVAKVEKGKSKKLKSVKELLGITIMERSSFEKNPIDFLEAKGYKEVKKDLIIKLPKYSLFELENGRKRMLASAGELQKGNELALPSKYVNFLYLASHYEKLKGSPEDNEQKQLFVEQHKHYLDEIIEQISEFSKRVILADANLDKVLSAYNKHRDKPIREQAENIIHLFTLTNLGAPAAFKYFDTTIDRKRYTSTKEVLDATLIHQSITGLYETRIDLSQLGGDGGGGGGSGGGGSGGGGSGGGGSGGWVQEISDSRPMLHIYLNGRRFLGLLNTGADKTCIAGRDWPANWPIHQTESSLQGLGMACGVARSSQPLRWQHEDKSGIIHPFVIPTLPFTLWGRDIMKDIKVRLMTDSPDDSQDLMIGAIESNLFADQISWKSDQPVWLNQWPLKQEKLQALQQLVTEQLQLGHLEESNSPWNTPVFVIKKKSGKWRLLQDLRAVNATMHDMGALQPGLPSPVAVPKGWEIIIIDLQDCFFNIKLHPEDCKRFAFSVPSPNFKRPYQRFQWKVLPQGMKNSPTLCQKFVDKAILTVRDKYQDSYIVHYMDDILLAHPSRSIVDEILTSMIQALNKHGLVVSTEKIQKYDNLKYLGTHIQGDSVSYQKLQIRTDKLRTLNDFQKLLGNINWIRPFLKLTTGELKPLFEILNGDSNPISTRKLTPEACKALQLMNERLSTARVKRLDLSQPWSLCILKTEYTPTACLWQDGVVEWIHLPHISPKVITPYDIFCTQLIIKGRHRSKELFSKDPDYIVVPYTKVQFDLLLQEKEDWPISLLGFLGEVHFHLPKDPLLTFTLQTAIIFPHMTSTTPLEKGIVIFTDGSANGRSVTYIQGREPIIKENTQNTAQQAEIVAVITAFEEVSQPFNLYTDSKYVTGLFPEIETATLSPRTKIYTELKHLQRLIHKRQEKFYIGHIRGHTGLPGPLAQGNAYADSLTRILTAGKRTADGSEFEKRTADGSEFESPKKKAKVE

SEQ ID NO: 3194 - protein, 2115 aa, synthetic construct
MPAAKRVKLDGGDKKYSIGLDIGTNSVGWAVITDEYKVPSKKFKVLGNTDRHSIKKNLIGALLFDSGETAEATRLKRTARRRYTRRKNRICYLQEIFSNEMAKVDDSFFHRLEESFLVEEDKKHERHPIFGNIVDEVAYHEKYPTIYHLRKKLVDSTDKADLRLIYLALAHMIKFRGHFLIEGDLNPDNSDVDKLFIQLVQTYNQLFEENPINASGVDAKAILSARLSKSRRLENLIAQLPGEKKNGLFGNLIALSLGLTPNFKSNFDLAEDAKLQLSKDTYDDDLDNLLAQIGDQYADLFLAAKNLSDAILLSDILRVNTEITKAPLSASMIKRYDEHHQDLTLLKALVRQQLPEKYKEIFFDQSKNGYAGYIDGGASQEEFYKFIKPILEKMDGTEELLVKLNREDLLRKQRTFDNGSIPHQIHLGELHAILRRQEDFYPFLKDNREKIEKILTFRIPYYVGPLARGNSRFAWMTRKSEETITPWNFEEVVDKGASAQSFIERMTNFDKNLPNEKVLPKHSLLYEYFTVYNELTKVKYVTEGMRKPAFLSGEQKKAIVDLLFKTNRKVTVKQLKEDYFKKIECFDSVEISGVEDRFNASLGTYHDLLKIIKDKDFLDNEENEDILEDIVLTLTLFEDREMIEERLKTYAHLFDDKVMKQLKRRRYTGWGRLSRKLINGIRDKQSGKTILDFLKSDGFANRNFMQLIHDDSLTFKEDIQKAQVSGQGDSLHEHIANLAGSPAIKKGILQTVKVVDELVKVMGRHKPENIVIEMARENQTTQKGQKNSRERMKRIEEGIKELGSQILKEHPVENTQLQNEKLYLYYLQNGRDMYVDQELDINRLSDYDVDHIVPQSFLKDDSIDNKVLTRSDKARGKSDNVPSEEVVKKMKNYWRQLLNAKLITQRKFDNLTKAERGGLSELDKAGFIKRQLVETRQITKHVAQILDSRMNTKYDENDKLIREVKVITLKSKLVSDFRKDFQFYKVREINNYHHAHDAYLNAVVGTALIKKYPKLESEFVYGDYKVYDVRKMIAKSEQEIGKATAKYFFYSNIMNFFKTEITLANGEIRKRPLIETNGETGEIVWDKGRDFATVRKVLSMPQVNIVKKTEVQTGGFSKESILPKRNSDKLIARKKDWDPKKYGGFDSPTVAYSVLVVAKVEKGKSKKLKSVKELLGITIMERSSFEKNPIDFLEAKGYKEVKKDLIIKLPKYSLFELENGRKRMLASAGELQKGNELALPSKYVNFLYLASHYEKLKGSPEDNEQKQLFVEQHKHYLDEIIEQISEFSKRVILADANLDKVLSAYNKHRDKPIREQAENIIHLFTLTNLGAPAAFKYFDTTIDRKRYTSTKEVLDATLIHQSITGLYETRIDLSQLGGDGGGGGGSGGGGSGGWVQEISDSRPMLHIYLNGRRFLGLLNTGADKTCIAGRDWPANWPIHQTESSLQGLGMACGVARSSQPLRWQHEDKSGIIHPFVIPTLPFTLWGRDIMKDIKVRLMTDSPDDSQDLMIGAIESNLFADQISWKSDQPVWLNQWPLKQEKLQALQQLVTEQLQLGHLEESNSPWNTPVFVIKKKSGKWRLLQDLRAVNATMHDMGALQPGLPSPVAVPKGWEIIIIDLQDCFFNIKLHPEDCKRFAFSVPSPNFKRPYQRFQWKVLPQGMKNSPTLCQKFVDKAILTVRDKYQDSYIVHYMDDILLAHPSRSIVDEILTSMIQALNKHGLVVSTEKIQKYDNLKYLGTHIQGDSVSYQKLQIRTDKLRTLNDFQKLLGNINWIRPFLKLTTGELKPLFEILNGDSNPISTRKLTPEACKALQLMNERLSTARVKRLDLSQPWSLCILKTEYTPTACLWQDGVVEWIHLPHISPKVITPYDIFCTQLIIKGRHRSKELFSKDPDYIVVPYTKVQFDLLLQEKEDWPISLLGFLGEVHFHLPKDPLLTFTLQTAIIFPHMTSTTPLEKGIVIFTDGSANGRSVTYIQGREPIIKENTQNTAQQAEIVAVITAFEEVSQPFNLYTDSKYVTGLFPEIETATLSPRTKIYTELKHLQRLIHKRQEKFYIGHIRGHTGLPGPLAQGNAYADSLTRILTAGKRTADGSEFEKRTADGSEFESPKKKAKVE

SEQ ID NO: 3195 - protein, 2114 aa, synthetic construct
MPAAKRVKLDGGDKKYSIGLDIGTNSVGWAVITDEYKVPSKKFKVLGNTDRHSIKKNLIGALLFDSGETAEATRLKRTARRRYTRRKNRICYLQEIFSNEMAKVDDSFFHRLEESFLVEEDKKHERHPIFGNIVDEVAYHEKYPTIYHLRKKLVDSTDKADLRLIYLALAHMIKFRGHFLIEGDLNPDNSDVDKLFIQLVQTYNQLFEENPINASGVDAKAILSARLSKSRRLENLIAQLPGEKKNGLFGNLIALSLGLTPNFKSNFDLAEDAKLQLSKDTYDDDLDNLLAQIGDQYADLFLAAKNLSDAILLSDILRVNTEITKAPLSASMIKRYDEHHQDLTLLKALVRQQLPEKYKEIFFDQSKNGYAGYIDGGASQEEFYKFIKPILEKMDGTEELLVKLNREDLLRKQRTFDNGSIPHQIHLGELHAILRRQEDFYPFLKDNREKIEKILTFRIPYYVGPLARGNSRFAWMTRKSEETITPWNFEEVVDKGASAQSFIERMTNFDKNLPNEKVLPKHSLLYEYFTVYNELTKVKYVTEGMRKPAFLSGEQKKAIVDLLFKTNRKVTVKQLKEDYFKKIECFDSVEISGVEDRFNASLGTYHDLLKIIKDKDFLDNEENEDILEDIVLTLTLFEDREMIEERLKTYAHLFDDKVMKQLKRRRYTGWGRLSRKLINGIRDKQSGKTILDFLKSDGFANRNFMQLIHDDSLTFKEDIQKAQVSGQGDSLHEHIANLAGSPAIKKGILQTVKVVDELVKVMGRHKPENIVIEMARENQTTQKGQKNSRERMKRIEEGIKELGSQILKEHPVENTQLQNEKLYLYYLQNGRDMYVDQELDINRLSDYDVDHIVPQSFLKDDSIDNKVLTRSDKARGKSDNVPSEEVVKKMKNYWRQLLNAKLITQRKFDNLTKAERGGLSELDKAGFIKRQLVETRQITKHVAQILDSRMNTKYDENDKLIREVKVITLKSKLVSDFRKDFQFYKVREINNYHHAHDAYLNAVVGTALIKKYPKLESEFVYGDYKVYDVRKMIAKSEQEIGKATAKYFFYSNIMNFFKTEITLANGEIRKRPLIETNGETGEIVWDKGRDFATVRKVLSMPQVNIVKKTEVQTGGFSKESILPKRNSDKLIARKKDWDPKKYGGFDSPTVAYSVLVVAKVEKGKSKKLKSVKELLGITIMERSSFEKNPIDFLEAKGYKEVKKDLIIKLPKYSLFELENGRKRMLASAGELQKGNELALPSKYVNFLYLASHYEKLKGSPEDNEQKQLFVEQHKHYLDEIIEQISEFSKRVILADANLDKVLSAYNKHRDKPIREQAENIIHLFTLTNLGAPAAFKYFDTTIDRKRYTSTKEVLDATLIHQSITGLYETRIDLSQLGGDGGPAPGGGGSSGGWVQEISDSRPMLHIYLNGRRFLGLLNTGADKTCIAGRDWPANWPIHQTESSLQGLGMACGVARSSQPLRWQHEDKSGIIHPFVIPTLPFTLWGRDIMKDIKVRLMTDSPDDSQDLMIGAIESNLFADQISWKSDQPVWLNQWPLKQEKLQALQQLVTEQLQLGHLEESNSPWNTPVFVIKKKSGKWRLLQDLRAVNATMHDMGALQPGLPSPVAVPKGWEIIIIDLQDCFFNIKLHPEDCKRFAFSVPSPNFKRPYQRFQWKVLPQGMKNSPTLCQKFVDKAILTVRDKYQDSYIVHYMDDILLAHPSRSIVDEILTSMIQALNKHGLVVSTEKIQKYDNLKYLGTHIQGDSVSYQKLQIRTDKLRTLNDFQKLLGNINWIRPFLKLTTGELKPLFEILNGDSNPISTRKLTPEACKALQLMNERLSTARVKRLDLSQPWSLCILKTEYTPTACLWQDGVVEWIHLPHISPKVITPYDIFCTQLIIKGRHRSKELFSKDPDYIVVPYTKVQFDLLLQEKEDWPISLLGFLGEVHFHLPKDPLLTFTLQTAIIFPHMTSTTPLEKGIVIFTDGSANGRSVTYIQGREPIIKENTQNTAQQAEIVAVITAFEEVSQPFNLYTDSKYVTGLFPEIETATLSPRTKIYTELKHLQRLIHKRQEKFYIGHIRGHTGLPGPLAQGNAYADSLTRILTAGKRTADGSEFEKRTADGSEFESPKKKAKVE

SEQ ID NO: 3196 - protein, 2024 aa, synthetic construct
MPAAKRVKLDGGDKKYSIGLDIGTNSVGWAVITDEYKVPSKKFKVLGNTDRHSIKKNLIGALLFDSGETAEATRLKRTARRRYTRRKNRICYLQEIFSNEMAKVDDSFFHRLEESFLVEEDKKHERHPIFGNIVDEVAYHEKYPTIYHLRKKLVDSTDKADLRLIYLALAHMIKFRGHFLIEGDLNPDNSDVDKLFIQLVQTYNQLFEENPINASGVDAKAILSARLSKSRRLENLIAQLPGEKKNGLFGNLIALSLGLTPNFKSNFDLAEDAKLQLSKDTYDDDLDNLLAQIGDQYADLFLAAKNLSDAILLSDILRVNTEITKAPLSASMIKRYDEHHQDLTLLKALVRQQLPEKYKEIFFDQSKNGYAGYIDGGASQEEFYKFIKPILEKMDGTEELLVKLNREDLLRKQRTFDNGSIPHQIHLGELHAILRRQEDFYPFLKDNREKIEKILTFRIPYYVGPLARGNSRFAWMTRKSEETITPWNFEEVVDKGASAQSFIERMTNFDKNLPNEKVLPKHSLLYEYFTVYNELTKVKYVTEGMRKPAFLSGEQKKAIVDLLFKTNRKVTVKQLKEDYFKKIECFDSVEISGVEDRFNASLGTYHDLLKIIKDKDFLDNEENEDILEDIVLTLTLFEDREMIEERLKTYAHLFDDKVMKQLKRRRYTGWGRLSRKLINGIRDKQSGKTILDFLKSDGFANRNFMQLIHDDSLTFKEDIQKAQVSGQGDSLHEHIANLAGSPAIKKGILQTVKVVDELVKVMGRHKPENIVIEMARENQTTQKGQKNSRERMKRIEEGIKELGSQILKEHPVENTQLQNEKLYLYYLQNGRDMYVDQELDINRLSDYDVDHIVPQSFLKDDSIDNKVLTRSDKARGKSDNVPSEEVVKKMKNYWRQLLNAKLITQRKFDNLTKAERGGLSELDKAGFIKRQLVETRQITKHVAQILDSRMNTKYDENDKLIREVKVITLKSKLVSDFRKDFQFYKVREINNYHHAHDAYLNAVVGTALIKKYPKLESEFVYGDYKVYDVRKMIAKSEQEIGKATAKYFFYSNIMNFFKTEITLANGEIRKRPLIETNGETGEIVWDKGRDFATVRKVLSMPQVNIVKKTEVQTGGFSKESILPKRNSDKLIARKKDWDPKKYGGFDSPTVAYSVLVVAKVEKGKSKKLKSVKELLGITIMERSSFEKNPIDFLEAKGYKEVKKDLIIKLPKYSLFELENGRKRMLASAGELQKGNELALPSKYVNFLYLASHYEKLKGSPEDNEQKQLFVEQHKHYLDEIIEQISEFSKRVILADANLDKVLSAYNKHRDKPIREQAENIIHLFTLTNLGAPAAFKYFDTTIDRKRYTSTKEVLDATLIHQSITGLYETRIDLSQLGGDGGGGGPAPEAAAKGGGRDIMKDIKVRLMTDSPDDSQDLMIGAIESNLFADQISWKSDQPVWLNQWPLKQEKLQALQQLVTEQLQLGHLEESNSPWNTPVFVIKKKSGKWRLLQDLRAVNATMHDMGALQPGLPSPVAVPKGWEIIIIDLQDCFFNIKLHPEDCKRFAFSVPSPNFKRPYQRFQWKVLPQGMKNSPTLCQKFVDKAILTVRDKYQDSYIVHYMDDILLAHPSRSIVDEILTSMIQALNKHGLVVSTEKIQKYDNLKYLGTHIQGDSVSYQKLQIRTDKLRTLNDFQKLLGNINWIRPFLKLTTGELKPLFEILNGDSNPISTRKLTPEACKALQLMNERLSTARVKRLDLSQPWSLCILKTEYTPTACLWQDGVVEWIHLPHISPKVITPYDIFCTQLIIKGRHRSKELFSKDPDYIVVPYTKVQFDLLLQEKEDWPISLLGFLGEVHFHLPKDPLLTFTLQTAIIFPHMTSTTPLEKGIVIFTDGSANGRSVTYIQGREPIIKENTQNTAQQAEIVAVITAFEEVSQPFNLYTDSKYVTGLFPEIETATLSPRTKIYTELKHLQRLIHKRQEKFYIGHIRGHTGLPGPLAQGNAYADSLTRILTAGKRTADGSEFEKRTADGSEFESPKKKAKVE

SEQ ID NO: 3197 - protein, 2059 aa, synthetic construct
MPAAKRVKLDGGDKKYSIGLDIGTNSVGWAVITDEYKVPSKKFKVLGNTDRHSIKKNLIGALLFDSGETAEATRLKRTARRRYTRRKNRICYLQEIFSNEMAKVDDSFFHRLEESFLVEEDKKHERHPIFGNIVDEVAYHEKYPTIYHLRKKLVDSTDKADLRLIYLALAHMIKFRGHFLIEGDLNPDNSDVDKLFIQLVQTYNQLFEENPINASGVDAKAILSARLSKSRRLENLIAQLPGEKKNGLFGNLIALSLGLTPNFKSNFDLAEDAKLQLSKDTYDDDLDNLLAQIGDQYADLFLAAKNLSDAILLSDILRVNTEITKAPLSASMIKRYDEHHQDLTLLKALVRQQLPEKYKEIFFDQSKNGYAGYIDGGASQEEFYKFIKPILEKMDGTEELLVKLNREDLLRKQRTFDNGSIPHQIHLGELHAILRRQEDFYPFLKDNREKIEKILTFRIPYYVGPLARGNSRFAWMTRKSEETITPWNFEEVVDKGASAQSFIERMTNFDKNLPNEKVLPKHSLLYEYFTVYNELTKVKYVTEGMRKPAFLSGEQKKAIVDLLFKTNRKVTVKQLKEDYFKKIECFDSVEISGVEDRFNASLGTYHDLLKIIKDKDFLDNEENEDILEDIVLTLTLFEDREMIEERLKTYAHLFDDKVMKQLKRRRYTGWGRLSRKLINGIRDKQSGKTILDFLKSDGFANRNFMQLIHDDSLTFKEDIQKAQVSGQGDSLHEHIANLAGSPAIKKGILQTVKVVDELVKVMGRHKPENIVIEMARENQTTQKGQKNSRERMKRIEEGIKELGSQILKEHPVENTQLQNEKLYLYYLQNGRDMYVDQELDINRLSDYDVDHIVPQSFLKDDSIDNKVLTRSDKARGKSDNVPSEEVVKKMKNYWRQLLNAKLITQRKFDNLTKAERGGLSELDKAGFIKRQLVETRQITKHVAQILDSRMNTKYDENDKLIREVKVITLKSKLVSDFRKDFQFYKVREINNYHHAHDAYLNAVVGTALIKKYPKLESEFVYGDYKVYDVRKMIAKSEQEIGKATAKYFFYSNIMNFFKTEITLANGEIRKRPLIETNGETGEIVWDKGRDFATVRKVLSMPQVNIVKKTEVQTGGFSKESILPKRNSDKLIARKKDWDPKKYGGFDSPTVAYSVLVVAKVEKGKSKKLKSVKELLGITIMERSSFEKNPIDFLEAKGYKEVKKDLIIKLPKYSLFELENGRKRMLASAGELQKGNELALPSKYVNFLYLASHYEKLKGSPEDNEQKQLFVEQHKHYLDEIIEQISEFSKRVILADANLDKVLSAYNKHRDKPIREQAENIIHLFTLTNLGAPAAFKYFDTTIDRKRYTSTKEVLDATLIHQSITGLYETRIDLSQLGGDGGAEAAAKEAAAKEAAAKEAAAKALEAEAAAKEAAAKEAAAKEAAAKAGGGRDIMKDIKVRLMTDSPDDSQDLMIGAIESNLFADQISWKSDQPVWLNQWPLKQEKLQALQQLVTEQLQLGHLEESNSPWNTPVFVIKKKSGKWRLLQDLRAVNATMHDMGALQPGLPSPVAVPKGWEIIIIDLQDCFFNIKLHPEDCKRFAFSVPSPNFKRPYQRFQWKVLPQGMKNSPTLCQKFVDKAILTVRDKYQDSYIVHYMDDILLAHPSRSIVDEILTSMIQALNKHGLVVSTEKIQKYDNLKYLGTHIQGDSVSYQKLQIRTDKLRTLNDFQKLLGNINWIRPFLKLTTGELKPLFEILNGDSNPISTRKLTPEACKALQLMNERLSTARVKRLDLSQPWSLCILKTEYTPTACLWQDGVVEWIHLPHISPKVITPYDIFCTQLIIKGRHRSKELFSKDPDYIVVPYTKVQFDLLLQEKEDWPISLLGFLGEVHFHLPKDPLLTFTLQTAIIFPHMTSTTPLEKGIVIFTDGSANGRSVTYIQGREPIIKENTQNTAQQAEIVAVITAFEEVSQPFNLYTDSKYVTGLFPEIETATLSPRTKIYTELKHLQRLIHKRQEKFYIGHIRGHTGLPGPLAQGNAYADSLTRILTAGKRTADGSEFEKRTADGSEFESPKKKAKVE

SEQ ID NO: 3198 - protein, 2024 aa, synthetic construct
MPAAKRVKLDGGDKKYSIGLDIGTNSVGWAVITDEYKVPSKKFKVLGNTDRHSIKKNLIGALLFDSGETAEATRLKRTARRRYTRRKNRICYLQEIFSNEMAKVDDSFFHRLEESFLVEEDKKHERHPIFGNIVDEVAYHEKYPTIYHLRKKLVDSTDKADLRLIYLALAHMIKFRGHFLIEGDLNPDNSDVDKLFIQLVQTYNQLFEENPINASGVDAKAILSARLSKSRRLENLIAQLPGEKKNGLFGNLIALSLGLTPNFKSNFDLAEDAKLQLSKDTYDDDLDNLLAQIGDQYADLFLAAKNLSDAILLSDILRVNTEITKAPLSASMIKRYDEHHQDLTLLKALVRQQLPEKYKEIFFDQSKNGYAGYIDGGASQEEFYKFIKPILEKMDGTEELLVKLNREDLLRKQRTFDNGSIPHQIHLGELHAILRRQEDFYPFLKDNREKIEKILTFRIPYYVGPLARGNSRFAWMTRKSEETITPWNFEEVVDKGASAQSFIERMTNFDKNLPNEKVLPKHSLLYEYFTVYNELTKVKYVTEGMRKPAFLSGEQKKAIVDLLFKTNRKVTVKQLKEDYFKKIECFDSVEISGVEDRFNASLGTYHDLLKIIKDKDFLDNEENEDILEDIVLTLTLFEDREMIEERLKTYAHLFDDKVMKQLKRRRYTGWGRLSRKLINGIRDKQSGKTILDFLKSDGFANRNFMQLIHDDSLTFKEDIQKAQVSGQGDSLHEHIANLAGSPAIKKGILQTVKVVDELVKVMGRHKPENIVIEMARENQTTQKGQKNSRERMKRIEEGIKELGSQILKEHPVENTQLQNEKLYLYYLQNGRDMYVDQELDINRLSDYDVDHIVPQSFLKDDSIDNKVLTRSDKARGKSDNVPSEEVVKKMKNYWRQLLNAKLITQRKFDNLTKAERGGLSELDKAGFIKRQLVETRQITKHVAQILDSRMNTKYDENDKLIREVKVITLKSKLVSDFRKDFQFYKVREINNYHHAHDAYLNAVVGTALIKKYPKLESEFVYGDYKVYDVRKMIAKSEQEIGKATAKYFFYSNIMNFFKTEITLANGEIRKRPLIETNGETGEIVWDKGRDFATVRKVLSMPQVNIVKKTEVQTGGFSKESILPKRNSDKLIARKKDWDPKKYGGFDSPTVAYSVLVVAKVEKGKSKKLKSVKELLGITIMERSSFEKNPIDFLEAKGYKEVKKDLIIKLPKYSLFELENGRKRMLASAGELQKGNELALPSKYVNFLYLASHYEKLKGSPEDNEQKQLFVEQHKHYLDEIIEQISEFSKRVILADANLDKVLSAYNKHRDKPIREQAENIIHLFTLTNLGAPAAFKYFDTTIDRKRYTSTKEVLDATLIHQSITGLYETRIDLSQLGGDGGPAPGSSEAAAKGGGRDIMKDIKVRLMTDSPDDSQDLMIGAIESNLFADQISWKSDQPVWLNQWPLKQEKLQALQQLVTEQLQLGHLEESNSPWNTPVFVIKKKSGKWRLLQDLRAVNATMHDMGALQPGLPSPVAVPKGWEIIIIDLQDCFFNIKLHPEDCKRFAFSVPSPNFKRPYQRFQWKVLPQGMKNSPTLCQKFVDKAILTVRDKYQDSYIVHYMDDILLAHPSRSIVDEILTSMIQALNKHGLVVSTEKIQKYDNLKYLGTHIQGDSVSYQKLQIRTDKLRTLNDFQKLLGNINWIRPFLKLTTGELKPLFEILNGDSNPISTRKLTPEACKALQLMNERLSTARVKRLDLSQPWSLCILKTEYTPTACLWQDGVVEWIHLPHISPKVITPYDIFCTQLIIKGRHRSKELFSKDPDYIVVPYTKVQFDLLLQEKEDWPISLLGFLGEVHFHLPKDPLLTFTLQTAIIFPHMTSTTPLEKGIVIFTDGSANGRSVTYIQGREPIIKENTQNTAQQAEIVAVITAFEEVSQPFNLYTDSKYVTGLFPEIETATLSPRTKIYTELKHLQRLIHKRQEKFYIGHIRGHTGLPGPLAQGNAYADSLTRILTAGKRTADGSEFEKRTADGSEFESPKKKAKVE

SEQ ID NO: 3199 - protein, 2022 aa, synthetic construct
MPAAKRVKLDGGDKKYSIGLDIGTNSVGWAVITDEYKVPSKKFKVLGNTDRHSIKKNLIGALLFDSGETAEATRLKRTARRRYTRRKNRICYLQEIFSNEMAKVDDSFFHRLEESFLVEEDKKHERHPIFGNIVDEVAYHEKYPTIYHLRKKLVDSTDKADLRLIYLALAHMIKFRGHFLIEGDLNPDNSDVDKLFIQLVQTYNQLFEENPINASGVDAKAILSARLSKSRRLENLIAQLPGEKKNGLFGNLIALSLGLTPNFKSNFDLAEDAKLQLSKDTYDDDLDNLLAQIGDQYADLFLAAKNLSDAILLSDILRVNTEITKAPLSASMIKRYDEHHQDLTLLKALVRQQLPEKYKEIFFDQSKNGYAGYIDGGASQEEFYKFIKPILEKMDGTEELLVKLNREDLLRKQRTFDNGSIPHQIHLGELHAILRRQEDFYPFLKDNREKIEKILTFRIPYYVGPLARGNSRFAWMTRKSEETITPWNFEEVVDKGASAQSFIERMTNFDKNLPNEKVLPKHSLLYEYFTVYNELTKVKYVTEGMRKPAFLSGEQKKAIVDLLFKTNRKVTVKQLKEDYFKKIECFDSVEISGVEDRFNASLGTYHDLLKIIKDKDFLDNEENEDILEDIVLTLTLFEDREMIEERLKTYAHLFDDKVMKQLKRRRYTGWGRLSRKLINGIRDKQSGKTILDFLKSDGFANRNFMQLIHDDSLTFKEDIQKAQVSGQGDSLHEHIANLAGSPAIKKGILQTVKVVDELVKVMGRHKPENIVIEMARENQTTQKGQKNSRERMKRIEEGIKELGSQILKEHPVENTQLQNEKLYLYYLQNGRDMYVDQELDINRLSDYDVDHIVPQSFLKDDSIDNKVLTRSDKARGKSDNVPSEEVVKKMKNYWRQLLNAKLITQRKFDNLTKAERGGLSELDKAGFIKRQLVETRQITKHVAQILDSRMNTKYDENDKLIREVKVITLKSKLVSDFRKDFQFYKVREINNYHHAHDAYLNAVVGTALIKKYPKLESEFVYGDYKVYDVRKMIAKSEQEIGKATAKYFFYSNIMNFFKTEITLANGEIRKRPLIETNGETGEIVWDKGRDFATVRKVLSMPQVNIVKKTEVQTGGFSKESILPKRNSDKLIARKKDWDPKKYGGFDSPTVAYSVLVVAKVEKGKSKKLKSVKELLGITIMERSSFEKNPIDFLEAKGYKEVKKDLIIKLPKYSLFELENGRKRMLASAGELQKGNELALPSKYVNFLYLASHYEKLKGSPEDNEQKQLFVEQHKHYLDEIIEQISEFSKRVILADANLDKVLSAYNKHRDKPIREQAENIIHLFTLTNLGAPAAFKYFDTTIDRKRYTSTKEVLDATLIHQSITGLYETRIDLSQLGGDGGGGSGGGGSSGGGRDIMKDIKVRLMTDSPDDSQDLMIGAIESNLFADQISWKSDQPVWLNQWPLKQEKLQALQQLVTEQLQLGHLEESNSPWNTPVFVIKKKSGKWRLLQDLRAVNATMHDMGALQPGLPSPVAVPKGWEIIIIDLQDCFFNIKLHPEDCKRFAFSVPSPNFKRPYQRFQWKVLPQGMKNSPTLCQKFVDKAILTVRDKYQDSYIVHYMDDILLAHPSRSIVDEILTSMIQALNKHGLVVSTEKIQKYDNLKYLGTHIQGDSVSYQKLQIRTDKLRTLNDFQKLLGNINWIRPFLKLTTGELKPLFEILNGDSNPISTRKLTPEACKALQLMNERLSTARVKRLDLSQPWSLCILKTEYTPTACLWQDGVVEWIHLPHISPKVITPYDIFCTQLIIKGRHRSKELFSKDPDYIVVPYTKVQFDLLLQEKEDWPISLLGFLGEVHFHLPKDPLLTFTLQTAIIFPHMTSTTPLEKGIVIFTDGSANGRSVTYIQGREPIIKENTQNTAQQAEIVAVITAFEEVSQPFNLYTDSKYVTGLFPEIETATLSPRTKIYTELKHLQRLIHKRQEKFYIGHIRGHTGLPGPLAQGNAYADSLTRILTAGKRTADGSEFEKRTADGSEFESPKKKAKVE

SEQ ID NO: 3200 - protein, 2024 aa, synthetic construct
MPAAKRVKLDGGDKKYSIGLDIGTNSVGWAVITDEYKVPSKKFKVLGNTDRHSIKKNLIGALLFDSGETAEATRLKRTARRRYTRRKNRICYLQEIFSNEMAKVDDSFFHRLEESFLVEEDKKHERHPIFGNIVDEVAYHEKYPTIYHLRKKLVDSTDKADLRLIYLALAHMIKFRGHFLIEGDLNPDNSDVDKLFIQLVQTYNQLFEENPINASGVDAKAILSARLSKSRRLENLIAQLPGEKKNGLFGNLIALSLGLTPNFKSNFDLAEDAKLQLSKDTYDDDLDNLLAQIGDQYADLFLAAKNLSDAILLSDILRVNTEITKAPLSASMIKRYDEHHQDLTLLKALVRQQLPEKYKEIFFDQSKNGYAGYIDGGASQEEFYKFIKPILEKMDGTEELLVKLNREDLLRKQRTFDNGSIPHQIHLGELHAILRRQEDFYPFLKDNREKIEKILTFRIPYYVGPLARGNSRFAWMTRKSEETITPWNFEEVVDKGASAQSFIERMTNFDKNLPNEKVLPKHSLLYEYFTVYNELTKVKYVTEGMRKPAFLSGEQKKAIVDLLFKTNRKVTVKQLKEDYFKKIECFDSVEISGVEDRFNASLGTYHDLLKIIKDKDFLDNEENEDILEDIVLTLTLFEDREMIEERLKTYAHLFDDKVMKQLKRRRYTGWGRLSRKLINGIRDKQSGKTILDFLKSDGFANRNFMQLIHDDSLTFKEDIQKAQVSGQGDSLHEHIANLAGSPAIKKGILQTVKVVDELVKVMGRHKPENIVIEMARENQTTQKGQKNSRERMKRIEEGIKELGSQILKEHPVENTQLQNEKLYLYYLQNGRDMYVDQELDINRLSDYDVDHIVPQSFLKDDSIDNKVLTRSDKARGKSDNVPSEEVVKKMKNYWRQLLNAKLITQRKFDNLTKAERGGLSELDKAGFIKRQLVETRQITKHVAQILDSRMNTKYDENDKLIREVKVITLKSKLVSDFRKDFQFYKVREINNYHHAHDAYLNAVVGTALIKKYPKLESEFVYGDYKVYDVRKMIAKSEQEIGKATAKYFFYSNIMNFFKTEITLANGEIRKRPLIETNGETGEIVWDKGRDFATVRKVLSMPQVNIVKKTEVQTGGFSKESILPKRNSDKLIARKKDWDPKKYGGFDSPTVAYSVLVVAKVEKGKSKKLKSVKELLGITIMERSSFEKNPIDFLEAKGYKEVKKDLIIKLPKYSLFELENGRKRMLASAGELQKGNELALPSKYVNFLYLASHYEKLKGSPEDNEQKQLFVEQHKHYLDEIIEQISEFSKRVILADANLDKVLSAYNKHRDKPIREQAENIIHLFTLTNLGAPAAFKYFDTTIDRKRYTSTKEVLDATLIHQSITGLYETRIDLSQLGGDGGPAPEAAAKGGGGGGRDIMKDIKVRLMTDSPDDSQDLMIGAIESNLFADQISWKSDQPVWLNQWPLKQEKLQALQQLVTEQLQLGHLEESNSPWNTPVFVIKKKSGKWRLLQDLRAVNATMHDMGALQPGLPSPVAVPKGWEIIIIDLQDCFFNIKLHPEDCKRFAFSVPSPNFKRPYQRFQWKVLPQGMKNSPTLCQKFVDKAILTVRDKYQDSYIVHYMDDILLAHPSRSIVDEILTSMIQALNKHGLVVSTEKIQKYDNLKYLGTHIQGDSVSYQKLQIRTDKLRTLNDFQKLLGNINWIRPFLKLTTGELKPLFEILNGDSNPISTRKLTPEACKALQLMNERLSTARVKRLDLSQPWSLCILKTEYTPTACLWQDGVVEWIHLPHISPKVITPYDIFCTQLIIKGRHRSKELFSKDPDYIVVPYTKVQFDLLLQEKEDWPISLLGFLGEVHFHLPKDPLLTFTLQTAIIFPHMTSTTPLEKGIVIFTDGSANGRSVTYIQGREPIIKENTQNTAQQAEIVAVITAFEEVSQPFNLYTDSKYVTGLFPEIETATLSPRTKIYTELKHLQRLIHKRQEKFYIGHIRGHTGLPGPLAQGNAYADSLTRILTAGKRTADGSEFEKRTADGSEFESPKKKAKVE

SEQ ID NO: 3201 - protein, 2028 aa, synthetic construct
MPAAKRVKLDGGDKKYSIGLDIGTNSVGWAVITDEYKVPSKKFKVLGNTDRHSIKKNLIGALLFDSGETAEATRLKRTARRRYTRRKNRICYLQEIFSNEMAKVDDSFFHRLEESFLVEEDKKHERHPIFGNIVDEVAYHEKYPTIYHLRKKLVDSTDKADLRLIYLALAHMIKFRGHFLIEGDLNPDNSDVDKLFIQLVQTYNQLFEENPINASGVDAKAILSARLSKSRRLENLIAQLPGEKKNGLFGNLIALSLGLTPNFKSNFDLAEDAKLQLSKDTYDDDLDNLLAQIGDQYADLFLAAKNLSDAILLSDILRVNTEITKAPLSASMIKRYDEHHQDLTLLKALVRQQLPEKYKEIFFDQSKNGYAGYIDGGASQEEFYKFIKPILEKMDGTEELLVKLNREDLLRKQRTFDNGSIPHQIHLGELHAILRRQEDFYPFLKDNREKIEKILTFRIPYYVGPLARGNSRFAWMTRKSEETITPWNFEEVVDKGASAQSFIERMTNFDKNLPNEKVLPKHSLLYEYFTVYNELTKVKYVTEGMRKPAFLSGEQKKAIVDLLFKTNRKVTVKQLKEDYFKKIECFDSVEISGVEDRFNASLGTYHDLLKIIKDKDFLDNEENEDILEDIVLTLTLFEDREMIEERLKTYAHLFDDKVMKQLKRRRYTGWGRLSRKLINGIRDKQSGKTILDFLKSDGFANRNFMQLIHDDSLTFKEDIQKAQVSGQGDSLHEHIANLAGSPAIKKGILQTVKVVDELVKVMGRHKPENIVIEMARENQTTQKGQKNSRERMKRIEEGIKELGSQILKEHPVENTQLQNEKLYLYYLQNGRDMYVDQELDINRLSDYDVDHIVPQSFLKDDSIDNKVLTRSDKARGKSDNVPSEEVVKKMKNYWRQLLNAKLITQRKFDNLTKAERGGLSELDKAGFIKRQLVETRQITKHVAQILDSRMNTKYDENDKLIREVKVITLKSKLVSDFRKDFQFYKVREINNYHHAHDAYLNAVVGTALIKKYPKLESEFVYGDYKVYDVRKMIAKSEQEIGKATAKYFFYSNIMNFFKTEITLANGEIRKRPLIETNGETGEIVWDKGRDFATVRKVLSMPQVNIVKKTEVQTGGFSKESILPKRNSDKLIARKKDWDPKKYGGFDSPTVAYSVLVVAKVEKGKSKKLKSVKELLGITIMERSSFEKNPIDFLEAKGYKEVKKDLIIKLPKYSLFELENGRKRMLASAGELQKGNELALPSKYVNFLYLASHYEKLKGSPEDNEQKQLFVEQHKHYLDEIIEQISEFSKRVILADANLDKVLSAYNKHRDKPIREQAENIIHLFTLTNLGAPAAFKYFDTTIDRKRYTSTKEVLDATLIHQSITGLYETRIDLSQLGGDGGEAAAKGGGGSEAAAKGGGRDIMKDIKVRLMTDSPDDSQDLMIGAIESNLFADQISWKSDQPVWLNQWPLKQEKLQALQQLVTEQLQLGHLEESNSPWNTPVFVIKKKSGKWRLLQDLRAVNATMHDMGALQPGLPSPVAVPKGWEIIIIDLQDCFFNIKLHPEDCKRFAFSVPSPNFKRPYQRFQWKVLPQGMKNSPTLCQKFVDKAILTVRDKYQDSYIVHYMDDILLAHPSRSIVDEILTSMIQALNKHGLVVSTEKIQKYDNLKYLGTHIQGDSVSYQKLQIRTDKLRTLNDFQKLLGNINWIRPFLKLTTGELKPLFEILNGDSNPISTRKLTPEACKALQLMNERLSTARVKRLDLSQPWSLCILKTEYTPTACLWQDGVVEWIHLPHISPKVITPYDIFCTQLIIKGRHRSKELFSKDPDYIVVPYTKVQFDLLLQEKEDWPISLLGFLGEVHFHLPKDPLLTFTLQTAIIFPHMTSTTPLEKGIVIFTDGSANGRSVTYIQGREPIIKENTQNTAQQAEIVAVITAFEEVSQPFNLYTDSKYVTGLFPEIETATLSPRTKIYTELKHLQRLIHKRQEKFYIGHIRGHTGLPGPLAQGNAYADSLTRILTAGKRTADGSEFEKRTADGSEFESPKKKAKVE

SEQ ID NO: 3202 - protein, 2019 aa, synthetic construct
MPAAKRVKLDGGDKKYSIGLDIGTNSVGWAVITDEYKVPSKKFKVLGNTDRHSIKKNLIGALLFDSGETAEATRLKRTARRRYTRRKNRICYLQEIFSNEMAKVDDSFFHRLEESFLVEEDKKHERHPIFGNIVDEVAYHEKYPTIYHLRKKLVDSTDKADLRLIYLALAHMIKFRGHFLIEGDLNPDNSDVDKLFIQLVQTYNQLFEENPINASGVDAKAILSARLSKSRRLENLIAQLPGEKKNGLFGNLIALSLGLTPNFKSNFDLAEDAKLQLSKDTYDDDLDNLLAQIGDQYADLFLAAKNLSDAILLSDILRVNTEITKAPLSASMIKRYDEHHQDLTLLKALVRQQLPEKYKEIFFDQSKNGYAGYIDGGASQEEFYKFIKPILEKMDGTEELLVKLNREDLLRKQRTFDNGSIPHQIHLGELHAILRRQEDFYPFLKDNREKIEKILTFRIPYYVGPLARGNSRFAWMTRKSEETITPWNFEEVVDKGASAQSFIERMTNFDKNLPNEKVLPKHSLLYEYFTVYNELTKVKYVTEGMRKPAFLSGEQKKAIVDLLFKTNRKVTVKQLKEDYFKKIECFDSVEISGVEDRFNASLGTYHDLLKIIKDKDFLDNEENEDILEDIVLTLTLFEDREMIEERLKTYAHLFDDKVMKQLKRRRYTGWGRLSRKLINGIRDKQSGKTILDFLKSDGFANRNFMQLIHDDSLTFKEDIQKAQVSGQGDSLHEHIANLAGSPAIKKGILQTVKVVDELVKVMGRHKPENIVIEMARENQTTQKGQKNSRERMKRIEEGIKELGSQILKEHPVENTQLQNEKLYLYYLQNGRDMYVDQELDINRLSDYDVDHIVPQSFLKDDSIDNKVLTRSDKARGKSDNVPSEEVVKKMKNYWRQLLNAKLITQRKFDNLTKAERGGLSELDKAGFIKRQLVETRQITKHVAQILDSRMNTKYDENDKLIREVKVITLKSKLVSDFRKDFQFYKVREINNYHHAHDAYLNAVVGTALIKKYPKLESEFVYGDYKVYDVRKMIAKSEQEIGKATAKYFFYSNIMNFFKTEITLANGEIRKRPLIETNGETGEIVWDKGRDFATVRKVLSMPQVNIVKKTEVQTGGFSKESILPKRNSDKLIARKKDWDPKKYGGFDSPTVAYSVLVVAKVEKGKSKKLKSVKELLGITIMERSSFEKNPIDFLEAKGYKEVKKDLIIKLPKYSLFELENGRKRMLASAGELQKGNELALPSKYVNFLYLASHYEKLKGSPEDNEQKQLFVEQHKHYLDEIIEQISEFSKRVILADANLDKVLSAYNKHRDKPIREQAENIIHLFTLTNLGAPAAFKYFDTTIDRKRYTSTKEVLDATLIHQSITGLYETRIDLSQLGGDGGGGGPAPGGGRDIMKDIKVRLMTDSPDDSQDLMIGAIESNLFADQISWKSDQPVWLNQWPLKQEKLQALQQLVTEQLQLGHLEESNSPWNTPVFVIKKKSGKWRLLQDLRAVNATMHDMGALQPGLPSPVAVPKGWEIIIIDLQDCFFNIKLHPEDCKRFAFSVPSPNFKRPYQRFQWKVLPQGMKNSPTLCQKFVDKAILTVRDKYQDSYIVHYMDDILLAHPSRSIVDEILTSMIQALNKHGLVVSTEKIQKYDNLKYLGTHIQGDSVSYQKLQIRTDKLRTLNDFQKLLGNINWIRPFLKLTTGELKPLFEILNGDSNPISTRKLTPEACKALQLMNERLSTARVKRLDLSQPWSLCILKTEYTPTACLWQDGVVEWIHLPHISPKVITPYDIFCTQLIIKGRHRSKELFSKDPDYIVVPYTKVQFDLLLQEKEDWPISLLGFLGEVHFHLPKDPLLTFTLQTAIIFPHMTSTTPLEKGIVIFTDGSANGRSVTYIQGREPIIKENTQNTAQQAEIVAVITAFEEVSQPFNLYTDSKYVTGLFPEIETATLSPRTKIYTELKHLQRLIHKRQEKFYIGHIRGHTGLPGPLAQGNAYADSLTRILTAGKRTADGSEFEKRTADGSEFESPKKKAKVE

SEQ ID NO: 3203 - protein, 2028 aa, synthetic construct
MPAAKRVKLDGGDKKYSIGLDIGTNSVGWAVITDEYKVPSKKFKVLGNTDRHSIKKNLIGALLFDSGETAEATRLKRTARRRYTRRKNRICYLQEIFSNEMAKVDDSFFHRLEESFLVEEDKKHERHPIFGNIVDEVAYHEKYPTIYHLRKKLVDSTDKADLRLIYLALAHMIKFRGHFLIEGDLNPDNSDVDKLFIQLVQTYNQLFEENPINASGVDAKAILSARLSKSRRLENLIAQLPGEKKNGLFGNLIALSLGLTPNFKSNFDLAEDAKLQLSKDTYDDDLDNLLAQIGDQYADLFLAAKNLSDAILLSDILRVNTEITKAPLSASMIKRYDEHHQDLTLLKALVRQQLPEKYKEIFFDQSKNGYAGYIDGGASQEEFYKFIKPILEKMDGTEELLVKLNREDLLRKQRTFDNGSIPHQIHLGELHAILRRQEDFYPFLKDNREKIEKILTFRIPYYVGPLARGNSRFAWMTRKSEETITPWNFEEVVDKGASAQSFIERMTNFDKNLPNEKVLPKHSLLYEYFTVYNELTKVKYVTEGMRKPAFLSGEQKKAIVDLLFKTNRKVTVKQLKEDYFKKIECFDSVEISGVEDRFNASLGTYHDLLKIIKDKDFLDNEENEDILEDIVLTLTLFEDREMIEERLKTYAHLFDDKVMKQLKRRRYTGWGRLSRKLINGIRDKQSGKTILDFLKSDGFANRNFMQLIHDDSLTFKEDIQKAQVSGQGDSLHEHIANLAGSPAIKKGILQTVKVVDELVKVMGRHKPENIVIEMARENQTTQKGQKNSRERMKRIEEGIKELGSQILKEHPVENTQLQNEKLYLYYLQNGRDMYVDQELDINRLSDYDVDHIVPQSFLKDDSIDNKVLTRSDKARGKSDNVPSEEVVKKMKNYWRQLLNAKLITQRKFDNLTKAERGGLSELDKAGFIKRQLVETRQITKHVAQILDSRMNTKYDENDKLIREVKVITLKSKLVSDFRKDFQFYKVREINNYHHAHDAYLNAVVGTALIKKYPKLESEFVYGDYKVYDVRKMIAKSEQEIGKATAKYFFYSNIMNFFKTEITLANGEIRKRPLIETNGETGEIVWDKGRDFATVRKVLSMPQVNIVKKTEVQTGGFSKESILPKRNSDKLIARKKDWDPKKYGGFDSPTVAYSVLVVAKVEKGKSKKLKSVKELLGITIMERSSFEKNPIDFLEAKGYKEVKKDLIIKLPKYSLFELENGRKRMLASAGELQKGNELALPSKYVNFLYLASHYEKLKGSPEDNEQKQLFVEQHKHYLDEIIEQISEFSKRVILADANLDKVLSAYNKHRDKPIREQAENIIHLFTLTNLGAPAAFKYFDTTIDRKRYTSTKEVLDATLIHQSITGLYETRIDLSQLGGDGGGGGGSGGGGSGGGGSGGGRDIMKDIKVRLMTDSPDDSQDLMIGAIESNLFADQISWKSDQPVWLNQWPLKQEKLQALQQLVTEQLQLGHLEESNSPWNTPVFVIKKKSGKWRLLQDLRAVNATMHDMGALQPGLPSPVAVPKGWEIIIIDLQDCFFNIKLHPEDCKRFAFSVPSPNFKRPYQRFQWKVLPQGMKNSPTLCQKFVDKAILTVRDKYQDSYIVHYMDDILLAHPSRSIVDEILTSMIQALNKHGLVVSTEKIQKYDNLKYLGTHIQGDSVSYQKLQIRTDKLRTLNDFQKLLGNINWIRPFLKLTTGELKPLFEILNGDSNPISTRKLTPEACKALQLMNERLSTARVKRLDLSQPWSLCILKTEYTPTACLWQDGVVEWIHLPHISPKVITPYDIFCTQLIIKGRHRSKELFSKDPDYIVVPYTKVQFDLLLQEKEDWPISLLGFLGEVHFHLPKDPLLTFTLQTAIIFPHMTSTTPLEKGIVIFTDGSANGRSVTYIQGREPIIKENTQNTAQQAEIVAVITAFEEVSQPFNLYTDSKYVTGLFPEIETATLSPRTKIYTELKHLQRLIHKRQEKFYIGHIRGHTGLPGPLAQGNAYADSLTRILTAGKRTADGSEFEKRTADGSEFESPKKKAKVE

SEQ ID NO: 3204 - protein, 2022 aa, synthetic construct
MPAAKRVKLDGGDKKYSIGLDIGTNSVGWAVITDEYKVPSKKFKVLGNTDRHSIKKNLIGALLFDSGETAEATRLKRTARRRYTRRKNRICYLQEIFSNEMAKVDDSFFHRLEESFLVEEDKKHERHPIFGNIVDEVAYHEKYPTIYHLRKKLVDSTDKADLRLIYLALAHMIKFRGHFLIEGDLNPDNSDVDKLFIQLVQTYNQLFEENPINASGVDAKAILSARLSKSRRLENLIAQLPGEKKNGLFGNLIALSLGLTPNFKSNFDLAEDAKLQLSKDTYDDDLDNLLAQIGDQYADLFLAAKNLSDAILLSDILRVNTEITKAPLSASMIKRYDEHHQDLTLLKALVRQQLPEKYKEIFFDQSKNGYAGYIDGGASQEEFYKFIKPILEKMDGTEELLVKLNREDLLRKQRTFDNGSIPHQIHLGELHAILRRQEDFYPFLKDNREKIEKILTFRIPYYVGPLARGNSRFAWMTRKSEETITPWNFEEVVDKGASAQSFIERMTNFDKNLPNEKVLPKHSLLYEYFTVYNELTKVKYVTEGMRKPAFLSGEQKKAIVDLLFKTNRKVTVKQLKEDYFKKIECFDSVEISGVEDRFNASLGTYHDLLKIIKDKDFLDNEENEDILEDIVLTLTLFEDREMIEERLKTYAHLFDDKVMKQLKRRRYTGWGRLSRKLINGIRDKQSGKTILDFLKSDGFANRNFMQLIHDDSLTFKEDIQKAQVSGQGDSLHEHIANLAGSPAIKKGILQTVKVVDELVKVMGRHKPENIVIEMARENQTTQKGQKNSRERMKRIEEGIKELGSQILKEHPVENTQLQNEKLYLYYLQNGRDMYVDQELDINRLSDYDVDHIVPQSFLKDDSIDNKVLTRSDKARGKSDNVPSEEVVKKMKNYWRQLLNAKLITQRKFDNLTKAERGGLSELDKAGFIKRQLVETRQITKHVAQILDSRMNTKYDENDKLIREVKVITLKSKLVSDFRKDFQFYKVREINNYHHAHDAYLNAVVGTALIKKYPKLESEFVYGDYKVYDVRKMIAKSEQEIGKATAKYFFYSNIMNFFKTEITLANGEIRKRPLIETNGETGEIVWDKGRDFATVRKVLSMPQVNIVKKTEVQTGGFSKESILPKRNSDKLIARKKDWDPKKYGGFDSPTVAYSVLVVAKVEKGKSKKLKSVKELLGITIMERSSFEKNPIDFLEAKGYKEVKKDLIIKLPKYSLFELENGRKRMLASAGELQKGNELALPSKYVNFLYLASHYEKLKGSPEDNEQKQLFVEQHKHYLDEIIEQISEFSKRVILADANLDKVLSAYNKHRDKPIREQAENIIHLFTLTNLGAPAAFKYFDTTIDRKRYTSTKEVLDATLIHQSITGLYETRIDLSQLGGDGGGSSGGGPAPGGGRDIMKDIKVRLMTDSPDDSQDLMIGAIESNLFADQISWKSDQPVWLNQWPLKQEKLQALQQLVTEQLQLGHLEESNSPWNTPVFVIKKKSGKWRLLQDLRAVNATMHDMGALQPGLPSPVAVPKGWEIIIIDLQDCFFNIKLHPEDCKRFAFSVPSPNFKRPYQRFQWKVLPQGMKNSPTLCQKFVDKAILTVRDKYQDSYIVHYMDDILLAHPSRSIVDEILTSMIQALNKHGLVVSTEKIQKYDNLKYLGTHIQGDSVSYQKLQIRTDKLRTLNDFQKLLGNINWIRPFLKLTTGELKPLFEILNGDSNPISTRKLTPEACKALQLMNERLSTARVKRLDLSQPWSLCILKTEYTPTACLWQDGVVEWIHLPHISPKVITPYDIFCTQLIIKGRHRSKELFSKDPDYIVVPYTKVQFDLLLQEKEDWPISLLGFLGEVHFHLPKDPLLTFTLQTAIIFPHMTSTTPLEKGIVIFTDGSANGRSVTYIQGREPIIKENTQNTAQQAEIVAVITAFEEVSQPFNLYTDSKYVTGLFPEIETATLSPRTKIYTELKHLQRLIHKRQEKFYIGHIRGHTGLPGPLAQGNAYADSLTRILTAGKRTADGSEFEKRTADGSEFESPKKKAKVE

SEQ ID NO: 3205 - protein, 2022 aa, synthetic construct
MPAAKRVKLDGGDKKYSIGLDIGTNSVGWAVITDEYKVPSKKFKVLGNTDRHSIKKNLIGALLFDSGETAEATRLKRTARRRYTRRKNRICYLQEIFSNEMAKVDDSFFHRLEESFLVEEDKKHERHPIFGNIVDEVAYHEKYPTIYHLRKKLVDSTDKADLRLIYLALAHMIKFRGHFLIEGDLNPDNSDVDKLFIQLVQTYNQLFEENPINASGVDAKAILSARLSKSRRLENLIAQLPGEKKNGLFGNLIALSLGLTPNFKSNFDLAEDAKLQLSKDTYDDDLDNLLAQIGDQYADLFLAAKNLSDAILLSDILRVNTEITKAPLSASMIKRYDEHHQDLTLLKALVRQQLPEKYKEIFFDQSKNGYAGYIDGGASQEEFYKFIKPILEKMDGTEELLVKLNREDLLRKQRTFDNGSIPHQIHLGELHAILRRQEDFYPFLKDNREKIEKILTFRIPYYVGPLARGNSRFAWMTRKSEETITPWNFEEVVDKGASAQSFIERMTNFDKNLPNEKVLPKHSLLYEYFTVYNELTKVKYVTEGMRKPAFLSGEQKKAIVDLLFKTNRKVTVKQLKEDYFKKIECFDSVEISGVEDRFNASLGTYHDLLKIIKDKDFLDNEENEDILEDIVLTLTLFEDREMIEERLKTYAHLFDDKVMKQLKRRRYTGWGRLSRKLINGIRDKQSGKTILDFLKSDGFANRNFMQLIHDDSLTFKEDIQKAQVSGQGDSLHEHIANLAGSPAIKKGILQTVKVVDELVKVMGRHKPENIVIEMARENQTTQKGQKNSRERMKRIEEGIKELGSQILKEHPVENTQLQNEKLYLYYLQNGRDMYVDQELDINRLSDYDVDHIVPQSFLKDDSIDNKVLTRSDKARGKSDNVPSEEVVKKMKNYWRQLLNAKLITQRKFDNLTKAERGGLSELDKAGFIKRQLVETRQITKHVAQILDSRMNTKYDENDKLIREVKVITLKSKLVSDFRKDFQFYKVREINNYHHAHDAYLNAVVGTALIKKYPKLESEFVYGDYKVYDVRKMIAKSEQEIGKATAKYFFYSNIMNFFKTEITLANGEIRKRPLIETNGETGEIVWDKGRDFATVRKVLSMPQVNIVKKTEVQTGGFSKESILPKRNSDKLIARKKDWDPKKYGGFDSPTVAYSVLVVAKVEKGKSKKLKSVKELLGITIMERSSFEKNPIDFLEAKGYKEVKKDLIIKLPKYSLFELENGRKRMLASAGELQKGNELALPSKYVNFLYLASHYEKLKGSPEDNEQKQLFVEQHKHYLDEIIEQISEFSKRVILADANLDKVLSAYNKHRDKPIREQAENIIHLFTLTNLGAPAAFKYFDTTIDRKRYTSTKEVLDATLIHQSITGLYETRIDLSQLGGDGGGSSGGSGGGGGGRDIMKDIKVRLMTDSPDDSQDLMIGAIESNLFADQISWKSDQPVWLNQWPLKQEKLQALQQLVTEQLQLGHLEESNSPWNTPVFVIKKKSGKWRLLQDLRAVNATMHDMGALQPGLPSPVAVPKGWEIIIIDLQDCFFNIKLHPEDCKRFAFSVPSPNFKRPYQRFQWKVLPQGMKNSPTLCQKFVDKAILTVRDKYQDSYIVHYMDDILLAHPSRSIVDEILTSMIQALNKHGLVVSTEKIQKYDNLKYLGTHIQGDSVSYQKLQIRTDKLRTLNDFQKLLGNINWIRPFLKLTTGELKPLFEILNGDSNPISTRKLTPEACKALQLMNERLSTARVKRLDLSQPWSLCILKTEYTPTACLWQDGVVEWIHLPHISPKVITPYDIFCTQLIIKGRHRSKELFSKDPDYIVVPYTKVQFDLLLQEKEDWPISLLGFLGEVHFHLPKDPLLTFTLQTAIIFPHMTSTTPLEKGIVIFTDGSANGRSVTYIQGREPIIKENTQNTAQQAEIVAVITAFEEVSQPFNLYTDSKYVTGLFPEIETATLSPRTKIYTELKHLQRLIHKRQEKFYIGHIRGHTGLPGPLAQGNAYADSLTRILTAGKRTADGSEFEKRTADGSEFESPKKKAKVE

SEQ ID NO: 3206 - protein, 2021 aa, synthetic construct
MPAAKRVKLDGGDKKYSIGLDIGTNSVGWAVITDEYKVPSKKFKVLGNTDRHSIKKNLIGALLFDSGETAEATRLKRTARRRYTRRKNRICYLQEIFSNEMAKVDDSFFHRLEESFLVEEDKKHERHPIFGNIVDEVAYHEKYPTIYHLRKKLVDSTDKADLRLIYLALAHMIKFRGHFLIEGDLNPDNSDVDKLFIQLVQTYNQLFEENPINASGVDAKAILSARLSKSRRLENLIAQLPGEKKNGLFGNLIALSLGLTPNFKSNFDLAEDAKLQLSKDTYDDDLDNLLAQIGDQYADLFLAAKNLSDAILLSDILRVNTEITKAPLSASMIKRYDEHHQDLTLLKALVRQQLPEKYKEIFFDQSKNGYAGYIDGGASQEEFYKFIKPILEKMDGTEELLVKLNREDLLRKQRTFDNGSIPHQIHLGELHAILRRQEDFYPFLKDNREKIEKILTFRIPYYVGPLARGNSRFAWMTRKSEETITPWNFEEVVDKGASAQSFIERMTNFDKNLPNEKVLPKHSLLYEYFTVYNELTKVKYVTEGMRKPAFLSGEQKKAIVDLLFKTNRKVTVKQLKEDYFKKIECFDSVEISGVEDRFNASLGTYHDLLKIIKDKDFLDNEENEDILEDIVLTLTLFEDREMIEERLKTYAHLFDDKVMKQLKRRRYTGWGRLSRKLINGIRDKQSGKTILDFLKSDGFANRNFMQLIHDDSLTFKEDIQKAQVSGQGDSLHEHIANLAGSPAIKKGILQTVKVVDELVKVMGRHKPENIVIEMARENQTTQKGQKNSRERMKRIEEGIKELGSQILKEHPVENTQLQNEKLYLYYLQNGRDMYVDQELDINRLSDYDVDHIVPQSFLKDDSIDNKVLTRSDKARGKSDNVPSEEVVKKMKNYWRQLLNAKLITQRKFDNLTKAERGGLSELDKAGFIKRQLVETRQITKHVAQILDSRMNTKYDENDKLIREVKVITLKSKLVSDFRKDFQFYKVREINNYHHAHDAYLNAVVGTALIKKYPKLESEFVYGDYKVYDVRKMIAKSEQEIGKATAKYFFYSNIMNFFKTEITLANGEIRKRPLIETNGETGEIVWDKGRDFATVRKVLSMPQVNIVKKTEVQTGGFSKESILPKRNSDKLIARKKDWDPKKYGGFDSPTVAYSVLVVAKVEKGKSKKLKSVKELLGITIMERSSFEKNPIDFLEAKGYKEVKKDLIIKLPKYSLFELENGRKRMLASAGELQKGNELALPSKYVNFLYLASHYEKLKGSPEDNEQKQLFVEQHKHYLDEIIEQISEFSKRVILADANLDKVLSAYNKHRDKPIREQAENIIHLFTLTNLGAPAAFKYFDTTIDRKRYTSTKEVLDATLIHQSITGLYETRIDLSQLGGDGGEAAAKGGSGGGRDIMKDIKVRLMTDSPDDSQDLMIGAIESNLFADQISWKSDQPVWLNQWPLKQEKLQALQQLVTEQLQLGHLEESNSPWNTPVFVIKKKSGKWRLLQDLRAVNATMHDMGALQPGLPSPVAVPKGWEIIIIDLQDCFFNIKLHPEDCKRFAFSVPSPNFKRPYQRFQWKVLPQGMKNSPTLCQKFVDKAILTVRDKYQDSYIVHYMDDILLAHPSRSIVDEILTSMIQALNKHGLVVSTEKIQKYDNLKYLGTHIQGDSVSYQKLQIRTDKLRTLNDFQKLLGNINWIRPFLKLTTGELKPLFEILNGDSNPISTRKLTPEACKALQLMNERLSTARVKRLDLSQPWSLCILKTEYTPTACLWQDGVVEWIHLPHISPKVITPYDIFCTQLIIKGRHRSKELFSKDPDYIVVPYTKVQFDLLLQEKEDWPISLLGFLGEVHFHLPKDPLLTFTLQTAIIFPHMTSTTPLEKGIVIFTDGSANGRSVTYIQGREPIIKENTQNTAQQAEIVAVITAFEEVSQPFNLYTDSKYVTGLFPEIETATLSPRTKIYTELKHLQRLIHKRQEKFYIGHIRGHTGLPGPLAQGNAYADSLTRILTAGKRTADGSEFEKRTADGSEFESPKKKAKVE

SEQ ID NO: 3207 - protein, 2024 aa, synthetic construct
MPAAKRVKLDGGDKKYSIGLDIGTNSVGWAVITDEYKVPSKKFKVLGNTDRHSIKKNLIGALLFDSGETAEATRLKRTARRRYTRRKNRICYLQEIFSNEMAKVDDSFFHRLEESFLVEEDKKHERHPIFGNIVDEVAYHEKYPTIYHLRKKLVDSTDKADLRLIYLALAHMIKFRGHFLIEGDLNPDNSDVDKLFIQLVQTYNQLFEENPINASGVDAKAILSARLSKSRRLENLIAQLPGEKKNGLFGNLIALSLGLTPNFKSNFDLAEDAKLQLSKDTYDDDLDNLLAQIGDQYADLFLAAKNLSDAILLSDILRVNTEITKAPLSASMIKRYDEHHQDLTLLKALVRQQLPEKYKEIFFDQSKNGYAGYIDGGASQEEFYKFIKPILEKMDGTEELLVKLNREDLLRKQRTFDNGSIPHQIHLGELHAILRRQEDFYPFLKDNREKIEKILTFRIPYYVGPLARGNSRFAWMTRKSEETITPWNFEEVVDKGASAQSFIERMTNFDKNLPNEKVLPKHSLLYEYFTVYNELTKVKYVTEGMRKPAFLSGEQKKAIVDLLFKTNRKVTVKQLKEDYFKKIECFDSVEISGVEDRFNASLGTYHDLLKIIKDKDFLDNEENEDILEDIVLTLTLFEDREMIEERLKTYAHLFDDKVMKQLKRRRYTGWGRLSRKLINGIRDKQSGKTILDFLKSDGFANRNFMQLIHDDSLTFKEDIQKAQVSGQGDSLHEHIANLAGSPAIKKGILQTVKVVDELVKVMGRHKPENIVIEMARENQTTQKGQKNSRERMKRIEEGIKELGSQILKEHPVENTQLQNEKLYLYYLQNGRDMYVDQELDINRLSDYDVDHIVPQSFLKDDSIDNKVLTRSDKARGKSDNVPSEEVVKKMKNYWRQLLNAKLITQRKFDNLTKAERGGLSELDKAGFIKRQLVETRQITKHVAQILDSRMNTKYDENDKLIREVKVITLKSKLVSDFRKDFQFYKVREINNYHHAHDAYLNAVVGTALIKKYPKLESEFVYGDYKVYDVRKMIAKSEQEIGKATAKYFFYSNIMNFFKTEITLANGEIRKRPLIETNGETGEIVWDKGRDFATVRKVLSMPQVNIVKKTEVQTGGFSKESILPKRNSDKLIARKKDWDPKKYGGFDSPTVAYSVLVVAKVEKGKSKKLKSVKELLGITIMERSSFEKNPIDFLEAKGYKEVKKDLIIKLPKYSLFELENGRKRMLASAGELQKGNELALPSKYVNFLYLASHYEKLKGSPEDNEQKQLFVEQHKHYLDEIIEQISEFSKRVILADANLDKVLSAYNKHRDKPIREQAENIIHLFTLTNLGAPAAFKYFDTTIDRKRYTSTKEVLDATLIHQSITGLYETRIDLSQLGGDGGGSSEAAAKPAPGGGRDIMKDIKVRLMTDSPDDSQDLMIGAIESNLFADQISWKSDQPVWLNQWPLKQEKLQALQQLVTEQLQLGHLEESNSPWNTPVFVIKKKSGKWRLLQDLRAVNATMHDMGALQPGLPSPVAVPKGWEIIIIDLQDCFFNIKLHPEDCKRFAFSVPSPNFKRPYQRFQWKVLPQGMKNSPTLCQKFVDKAILTVRDKYQDSYIVHYMDDILLAHPSRSIVDEILTSMIQALNKHGLVVSTEKIQKYDNLKYLGTHIQGDSVSYQKLQIRTDKLRTLNDFQKLLGNINWIRPFLKLTTGELKPLFEILNGDSNPISTRKLTPEACKALQLMNERLSTARVKRLDLSQPWSLCILKTEYTPTACLWQDGVVEWIHLPHISPKVITPYDIFCTQLIIKGRHRSKELFSKDPDYIVVPYTKVQFDLLLQEKEDWPISLLGFLGEVHFHLPKDPLLTFTLQTAIIFPHMTSTTPLEKGIVIFTDGSANGRSVTYIQGREPIIKENTQNTAQQAEIVAVITAFEEVSQPFNLYTDSKYVTGLFPEIETATLSPRTKIYTELKHLQRLIHKRQEKFYIGHIRGHTGLPGPLAQGNAYADSLTRILTAGKRTADGSEFEKRTADGSEFESPKKKAKVE

SEQ ID NO: 3208 - protein, 2021 aa, synthetic construct
MPAAKRVKLDGGDKKYSIGLDIGTNSVGWAVITDEYKVPSKKFKVLGNTDRHSIKKNLIGALLFDSGETAEATRLKRTARRRYTRRKNRICYLQEIFSNEMAKVDDSFFHRLEESFLVEEDKKHERHPIFGNIVDEVAYHEKYPTIYHLRKKLVDSTDKADLRLIYLALAHMIKFRGHFLIEGDLNPDNSDVDKLFIQLVQTYNQLFEENPINASGVDAKAILSARLSKSRRLENLIAQLPGEKKNGLFGNLIALSLGLTPNFKSNFDLAEDAKLQLSKDTYDDDLDNLLAQIGDQYADLFLAAKNLSDAILLSDILRVNTEITKAPLSASMIKRYDEHHQDLTLLKALVRQQLPEKYKEIFFDQSKNGYAGYIDGGASQEEFYKFIKPILEKMDGTEELLVKLNREDLLRKQRTFDNGSIPHQIHLGELHAILRRQEDFYPFLKDNREKIEKILTFRIPYYVGPLARGNSRFAWMTRKSEETITPWNFEEVVDKGASAQSFIERMTNFDKNLPNEKVLPKHSLLYEYFTVYNELTKVKYVTEGMRKPAFLSGEQKKAIVDLLFKTNRKVTVKQLKEDYFKKIECFDSVEISGVEDRFNASLGTYHDLLKIIKDKDFLDNEENEDILEDIVLTLTLFEDREMIEERLKTYAHLFDDKVMKQLKRRRYTGWGRLSRKLINGIRDKQSGKTILDFLKSDGFANRNFMQLIHDDSLTFKEDIQKAQVSGQGDSLHEHIANLAGSPAIKKGILQTVKVVDELVKVMGRHKPENIVIEMARENQTTQKGQKNSRERMKRIEEGIKELGSQILKEHPVENTQLQNEKLYLYYLQNGRDMYVDQELDINRLSDYDVDHIVPQSFLKDDSIDNKVLTRSDKARGKSDNVPSEEVVKKMKNYWRQLLNAKLITQRKFDNLTKAERGGLSELDKAGFIKRQLVETRQITKHVAQILDSRMNTKYDENDKLIREVKVITLKSKLVSDFRKDFQFYKVREINNYHHAHDAYLNAVVGTALIKKYPKLESEFVYGDYKVYDVRKMIAKSEQEIGKATAKYFFYSNIMNFFKTEITLANGEIRKRPLIETNGETGEIVWDKGRDFATVRKVLSMPQVNIVKKTEVQTGGFSKESILPKRNSDKLIARKKDWDPKKYGGFDSPTVAYSVLVVAKVEKGKSKKLKSVKELLGITIMERSSFEKNPIDFLEAKGYKEVKKDLIIKLPKYSLFELENGRKRMLASAGELQKGNELALPSKYVNFLYLASHYEKLKGSPEDNEQKQLFVEQHKHYLDEIIEQISEFSKRVILADANLDKVLSAYNKHRDKPIREQAENIIHLFTLTNLGAPAAFKYFDTTIDRKRYTSTKEVLDATLIHQSITGLYETRIDLSQLGGDGGGGGEAAAKGGGRDIMKDIKVRLMTDSPDDSQDLMIGAIESNLFADQISWKSDQPVWLNQWPLKQEKLQALQQLVTEQLQLGHLEESNSPWNTPVFVIKKKSGKWRLLQDLRAVNATMHDMGALQPGLPSPVAVPKGWEIIIIDLQDCFFNIKLHPEDCKRFAFSVPSPNFKRPYQRFQWKVLPQGMKNSPTLCQKFVDKAILTVRDKYQDSYIVHYMDDILLAHPSRSIVDEILTSMIQALNKHGLVVSTEKIQKYDNLKYLGTHIQGDSVSYQKLQIRTDKLRTLNDFQKLLGNINWIRPFLKLTTGELKPLFEILNGDSNPISTRKLTPEACKALQLMNERLSTARVKRLDLSQPWSLCILKTEYTPTACLWQDGVVEWIHLPHISPKVITPYDIFCTQLIIKGRHRSKELFSKDPDYIVVPYTKVQFDLLLQEKEDWPISLLGFLGEVHFHLPKDPLLTFTLQTAIIFPHMTSTTPLEKGIVIFTDGSANGRSVTYIQGREPIIKENTQNTAQQAEIVAVITAFEEVSQPFNLYTDSKYVTGLFPEIETATLSPRTKIYTELKHLQRLIHKRQEKFYIGHIRGHTGLPGPLAQGNAYADSLTRILTAGKRTADGSEFEKRTADGSEFESPKKKAKVE

SEQ ID NO: 3209 - protein, 2022 aa, synthetic construct
MPAAKRVKLDGGDKKYSIGLDIGTNSVGWAVITDEYKVPSKKFKVLGNTDRHSIKKNLIGALLFDSGETAEATRLKRTARRRYTRRKNRICYLQEIFSNEMAKVDDSFFHRLEESFLVEEDKKHERHPIFGNIVDEVAYHEKYPTIYHLRKKLVDSTDKADLRLIYLALAHMIKFRGHFLIEGDLNPDNSDVDKLFIQLVQTYNQLFEENPINASGVDAKAILSARLSKSRRLENLIAQLPGEKKNGLFGNLIALSLGLTPNFKSNFDLAEDAKLQLSKDTYDDDLDNLLAQIGDQYADLFLAAKNLSDAILLSDILRVNTEITKAPLSASMIKRYDEHHQDLTLLKALVRQQLPEKYKEIFFDQSKNGYAGYIDGGASQEEFYKFIKPILEKMDGTEELLVKLNREDLLRKQRTFDNGSIPHQIHLGELHAILRRQEDFYPFLKDNREKIEKILTFRIPYYVGPLARGNSRFAWMTRKSEETITPWNFEEVVDKGASAQSFIERMTNFDKNLPNEKVLPKHSLLYEYFTVYNELTKVKYVTEGMRKPAFLSGEQKKAIVDLLFKTNRKVTVKQLKEDYFKKIECFDSVEISGVEDRFNASLGTYHDLLKIIKDKDFLDNEENEDILEDIVLTLTLFEDREMIEERLKTYAHLFDDKVMKQLKRRRYTGWGRLSRKLINGIRDKQSGKTILDFLKSDGFANRNFMQLIHDDSLTFKEDIQKAQVSGQGDSLHEHIANLAGSPAIKKGILQTVKVVDELVKVMGRHKPENIVIEMARENQTTQKGQKNSRERMKRIEEGIKELGSQILKEHPVENTQLQNEKLYLYYLQNGRDMYVDQELDINRLSDYDVDHIVPQSFLKDDSIDNKVLTRSDKARGKSDNVPSEEVVKKMKNYWRQLLNAKLITQRKFDNLTKAERGGLSELDKAGFIKRQLVETRQITKHVAQILDSRMNTKYDENDKLIREVKVITLKSKLVSDFRKDFQFYKVREINNYHHAHDAYLNAVVGTALIKKYPKLESEFVYGDYKVYDVRKMIAKSEQEIGKATAKYFFYSNIMNFFKTEITLANGEIRKRPLIETNGETGEIVWDKGRDFATVRKVLSMPQVNIVKKTEVQTGGFSKESILPKRNSDKLIARKKDWDPKKYGGFDSPTVAYSVLVVAKVEKGKSKKLKSVKELLGITIMERSSFEKNPIDFLEAKGYKEVKKDLIIKLPKYSLFELENGRKRMLASAGELQKGNELALPSKYVNFLYLASHYEKLKGSPEDNEQKQLFVEQHKHYLDEIIEQISEFSKRVILADANLDKVLSAYNKHRDKPIREQAENIIHLFTLTNLGAPAAFKYFDTTIDRKRYTSTKEVLDATLIHQSITGLYETRIDLSQLGGDGGPAPGGSGSSGGGRDIMKDIKVRLMTDSPDDSQDLMIGAIESNLFADQISWKSDQPVWLNQWPLKQEKLQALQQLVTEQLQLGHLEESNSPWNTPVFVIKKKSGKWRLLQDLRAVNATMHDMGALQPGLPSPVAVPKGWEIIIIDLQDCFFNIKLHPEDCKRFAFSVPSPNFKRPYQRFQWKVLPQGMKNSPTLCQKFVDKAILTVRDKYQDSYIVHYMDDILLAHPSRSIVDEILTSMIQALNKHGLVVSTEKIQKYDNLKYLGTHIQGDSVSYQKLQIRTDKLRTLNDFQKLLGNINWIRPFLKLTTGELKPLFEILNGDSNPISTRKLTPEACKALQLMNERLSTARVKRLDLSQPWSLCILKTEYTPTACLWQDGVVEWIHLPHISPKVITPYDIFCTQLIIKGRHRSKELFSKDPDYIVVPYTKVQFDLLLQEKEDWPISLLGFLGEVHFHLPKDPLLTFTLQTAIIFPHMTSTTPLEKGIVIFTDGSANGRSVTYIQGREPIIKENTQNTAQQAEIVAVITAFEEVSQPFNLYTDSKYVTGLFPEIETATLSPRTKIYTELKHLQRLIHKRQEKFYIGHIRGHTGLPGPLAQGNAYADSLTRILTAGKRTADGSEFEKRTADGSEFESPKKKAKVE

SEQ ID NO: 3210 - protein, 2016 aa, synthetic construct
MPAAKRVKLDGGDKKYSIGLDIGTNSVGWAVITDEYKVPSKKFKVLGNTDRHSIKKNLIGALLFDSGETAEATRLKRTARRRYTRRKNRICYLQEIFSNEMAKVDDSFFHRLEESFLVEEDKKHERHPIFGNIVDEVAYHEKYPTIYHLRKKLVDSTDKADLRLIYLALAHMIKFRGHFLIEGDLNPDNSDVDKLFIQLVQTYNQLFEENPINASGVDAKAILSARLSKSRRLENLIAQLPGEKKNGLFGNLIALSLGLTPNFKSNFDLAEDAKLQLSKDTYDDDLDNLLAQIGDQYADLFLAAKNLSDAILLSDILRVNTEITKAPLSASMIKRYDEHHQDLTLLKALVRQQLPEKYKEIFFDQSKNGYAGYIDGGASQEEFYKFIKPILEKMDGTEELLVKLNREDLLRKQRTFDNGSIPHQIHLGELHAILRRQEDFYPFLKDNREKIEKILTFRIPYYVGPLARGNSRFAWMTRKSEETITPWNFEEVVDKGASAQSFIERMTNFDKNLPNEKVLPKHSLLYEYFTVYNELTKVKYVTEGMRKPAFLSGEQKKAIVDLLFKTNRKVTVKQLKEDYFKKIECFDSVEISGVEDRFNASLGTYHDLLKIIKDKDFLDNEENEDILEDIVLTLTLFEDREMIEERLKTYAHLFDDKVMKQLKRRRYTGWGRLSRKLINGIRDKQSGKTILDFLKSDGFANRNFMQLIHDDSLTFKEDIQKAQVSGQGDSLHEHIANLAGSPAIKKGILQTVKVVDELVKVMGRHKPENIVIEMARENQTTQKGQKNSRERMKRIEEGIKELGSQILKEHPVENTQLQNEKLYLYYLQNGRDMYVDQELDINRLSDYDVDHIVPQSFLKDDSIDNKVLTRSDKARGKSDNVPSEEVVKKMKNYWRQLLNAKLITQRKFDNLTKAERGGLSELDKAGFIKRQLVETRQITKHVAQILDSRMNTKYDENDKLIREVKVITLKSKLVSDFRKDFQFYKVREINNYHHAHDAYLNAVVGTALIKKYPKLESEFVYGDYKVYDVRKMIAKSEQEIGKATAKYFFYSNIMNFFKTEITLANGEIRKRPLIETNGETGEIVWDKGRDFATVRKVLSMPQVNIVKKTEVQTGGFSKESILPKRNSDKLIARKKDWDPKKYGGFDSPTVAYSVLVVAKVEKGKSKKLKSVKELLGITIMERSSFEKNPIDFLEAKGYKEVKKDLIIKLPKYSLFELENGRKRMLASAGELQKGNELALPSKYVNFLYLASHYEKLKGSPEDNEQKQLFVEQHKHYLDEIIEQISEFSKRVILADANLDKVLSAYNKHRDKPIREQAENIIHLFTLTNLGAPAAFKYFDTTIDRKRYTSTKEVLDATLIHQSITGLYETRIDLSQLGGDGGGGGGGGRDIMKDIKVRLMTDSPDDSQDLMIGAIESNLFADQISWKSDQPVWLNQWPLKQEKLQALQQLVTEQLQLGHLEESNSPWNTPVFVIKKKSGKWRLLQDLRAVNATMHDMGALQPGLPSPVAVPKGWEIIIIDLQDCFFNIKLHPEDCKRFAFSVPSPNFKRPYQRFQWKVLPQGMKNSPTLCQKFVDKAILTVRDKYQDSYIVHYMDDILLAHPSRSIVDEILTSMIQALNKHGLVVSTEKIQKYDNLKYLGTHIQGDSVSYQKLQIRTDKLRTLNDFQKLLGNINWIRPFLKLTTGELKPLFEILNGDSNPISTRKLTPEACKALQLMNERLSTARVKRLDLSQPWSLCILKTEYTPTACLWQDGVVEWIHLPHISPKVITPYDIFCTQLIIKGRHRSKELFSKDPDYIVVPYTKVQFDLLLQEKEDWPISLLGFLGEVHFHLPKDPLLTFTLQTAIIFPHMTSTTPLEKGIVIFTDGSANGRSVTYIQGREPIIKENTQNTAQQAEIVAVITAFEEVSQPFNLYTDSKYVTGLFPEIETATLSPRTKIYTELKHLQRLIHKRQEKFYIGHIRGHTGLPGPLAQGNAYADSLTRILTAGKRTADGSEFEKRTADGSEFESPKKKAKVE

SEQ ID NO: 3211 - protein, 2019 aa, synthetic construct
MPAAKRVKLDGGDKKYSIGLDIGTNSVGWAVITDEYKVPSKKFKVLGNTDRHSIKKNLIGALLFDSGETAEATRLKRTARRRYTRRKNRICYLQEIFSNEMAKVDDSFFHRLEESFLVEEDKKHERHPIFGNIVDEVAYHEKYPTIYHLRKKLVDSTDKADLRLIYLALAHMIKFRGHFLIEGDLNPDNSDVDKLFIQLVQTYNQLFEENPINASGVDAKAILSARLSKSRRLENLIAQLPGEKKNGLFGNLIALSLGLTPNFKSNFDLAEDAKLQLSKDTYDDDLDNLLAQIGDQYADLFLAAKNLSDAILLSDILRVNTEITKAPLSASMIKRYDEHHQDLTLLKALVRQQLPEKYKEIFFDQSKNGYAGYIDGGASQEEFYKFIKPILEKMDGTEELLVKLNREDLLRKQRTFDNGSIPHQIHLGELHAILRRQEDFYPFLKDNREKIEKILTFRIPYYVGPLARGNSRFAWMTRKSEETITPWNFEEVVDKGASAQSFIERMTNFDKNLPNEKVLPKHSLLYEYFTVYNELTKVKYVTEGMRKPAFLSGEQKKAIVDLLFKTNRKVTVKQLKEDYFKKIECFDSVEISGVEDRFNASLGTYHDLLKIIKDKDFLDNEENEDILEDIVLTLTLFEDREMIEERLKTYAHLFDDKVMKQLKRRRYTGWGRLSRKLINGIRDKQSGKTILDFLKSDGFANRNFMQLIHDDSLTFKEDIQKAQVSGQGDSLHEHIANLAGSPAIKKGILQTVKVVDELVKVMGRHKPENIVIEMARENQTTQKGQKNSRERMKRIEEGIKELGSQILKEHPVENTQLQNEKLYLYYLQNGRDMYVDQELDINRLSDYDVDHIVPQSFLKDDSIDNKVLTRSDKARGKSDNVPSEEVVKKMKNYWRQLLNAKLITQRKFDNLTKAERGGLSELDKAGFIKRQLVETRQITKHVAQILDSRMNTKYDENDKLIREVKVITLKSKLVSDFRKDFQFYKVREINNYHHAHDAYLNAVVGTALIKKYPKLESEFVYGDYKVYDVRKMIAKSEQEIGKATAKYFFYSNIMNFFKTEITLANGEIRKRPLIETNGETGEIVWDKGRDFATVRKVLSMPQVNIVKKTEVQTGGFSKESILPKRNSDKLIARKKDWDPKKYGGFDSPTVAYSVLVVAKVEKGKSKKLKSVKELLGITIMERSSFEKNPIDFLEAKGYKEVKKDLIIKLPKYSLFELENGRKRMLASAGELQKGNELALPSKYVNFLYLASHYEKLKGSPEDNEQKQLFVEQHKHYLDEIIEQISEFSKRVILADANLDKVLSAYNKHRDKPIREQAENIIHLFTLTNLGAPAAFKYFDTTIDRKRYTSTKEVLDATLIHQSITGLYETRIDLSQLGGDGGGSSGGGGGGRDIMKDIKVRLMTDSPDDSQDLMIGAIESNLFADQISWKSDQPVWLNQWPLKQEKLQALQQLVTEQLQLGHLEESNSPWNTPVFVIKKKSGKWRLLQDLRAVNATMHDMGALQPGLPSPVAVPKGWEIIIIDLQDCFFNIKLHPEDCKRFAFSVPSPNFKRPYQRFQWKVLPQGMKNSPTLCQKFVDKAILTVRDKYQDSYIVHYMDDILLAHPSRSIVDEILTSMIQALNKHGLVVSTEKIQKYDNLKYLGTHIQGDSVSYQKLQIRTDKLRTLNDFQKLLGNINWIRPFLKLTTGELKPLFEILNGDSNPISTRKLTPEACKALQLMNERLSTARVKRLDLSQPWSLCILKTEYTPTACLWQDGVVEWIHLPHISPKVITPYDIFCTQLIIKGRHRSKELFSKDPDYIVVPYTKVQFDLLLQEKEDWPISLLGFLGEVHFHLPKDPLLTFTLQTAIIFPHMTSTTPLEKGIVIFTDGSANGRSVTYIQGREPIIKENTQNTAQQAEIVAVITAFEEVSQPFNLYTDSKYVTGLFPEIETATLSPRTKIYTELKHLQRLIHKRQEKFYIGHIRGHTGLPGPLAQGNAYADSLTRILTAGKRTADGSEFEKRTADGSEFESPKKKAKVE

SEQ ID NO: 3212 - protein, 2020 aa, synthetic construct
MPAAKRVKLDGGDKKYSIGLDIGTNSVGWAVITDEYKVPSKKFKVLGNTDRHSIKKNLIGALLFDSGETAEATRLKRTARRRYTRRKNRICYLQEIFSNEMAKVDDSFFHRLEESFLVEEDKKHERHPIFGNIVDEVAYHEKYPTIYHLRKKLVDSTDKADLRLIYLALAHMIKFRGHFLIEGDLNPDNSDVDKLFIQLVQTYNQLFEENPINASGVDAKAILSARLSKSRRLENLIAQLPGEKKNGLFGNLIALSLGLTPNFKSNFDLAEDAKLQLSKDTYDDDLDNLLAQIGDQYADLFLAAKNLSDAILLSDILRVNTEITKAPLSASMIKRYDEHHQDLTLLKALVRQQLPEKYKEIFFDQSKNGYAGYIDGGASQEEFYKFIKPILEKMDGTEELLVKLNREDLLRKQRTFDNGSIPHQIHLGELHAILRRQEDFYPFLKDNREKIEKILTFRIPYYVGPLARGNSRFAWMTRKSEETITPWNFEEVVDKGASAQSFIERMTNFDKNLPNEKVLPKHSLLYEYFTVYNELTKVKYVTEGMRKPAFLSGEQKKAIVDLLFKTNRKVTVKQLKEDYFKKIECFDSVEISGVEDRFNASLGTYHDLLKIIKDKDFLDNEENEDILEDIVLTLTLFEDREMIEERLKTYAHLFDDKVMKQLKRRRYTGWGRLSRKLINGIRDKQSGKTILDFLKSDGFANRNFMQLIHDDSLTFKEDIQKAQVSGQGDSLHEHIANLAGSPAIKKGILQTVKVVDELVKVMGRHKPENIVIEMARENQTTQKGQKNSRERMKRIEEGIKELGSQILKEHPVENTQLQNEKLYLYYLQNGRDMYVDQELDINRLSDYDVDHIVPQSFLKDDSIDNKVLTRSDKARGKSDNVPSEEVVKKMKNYWRQLLNAKLITQRKFDNLTKAERGGLSELDKAGFIKRQLVETRQITKHVAQILDSRMNTKYDENDKLIREVKVITLKSKLVSDFRKDFQFYKVREINNYHHAHDAYLNAVVGTALIKKYPKLESEFVYGDYKVYDVRKMIAKSEQEIGKATAKYFFYSNIMNFFKTEITLANGEIRKRPLIETNGETGEIVWDKGRDFATVRKVLSMPQVNIVKKTEVQTGGFSKESILPKRNSDKLIARKKDWDPKKYGGFDSPTVAYSVLVVAKVEKGKSKKLKSVKELLGITIMERSSFEKNPIDFLEAKGYKEVKKDLIIKLPKYSLFELENGRKRMLASAGELQKGNELALPSKYVNFLYLASHYEKLKGSPEDNEQKQLFVEQHKHYLDEIIEQISEFSKRVILADANLDKVLSAYNKHRDKPIREQAENIIHLFTLTNLGAPAAFKYFDTTIDRKRYTSTKEVLDATLIHQSITGLYETRIDLSQLGGDGGGGGGGGGGGGRDIMKDIKVRLMTDSPDDSQDLMIGAIESNLFADQISWKSDQPVWLNQWPLKQEKLQALQQLVTEQLQLGHLEESNSPWNTPVFVIKKKSGKWRLLQDLRAVNATMHDMGALQPGLPSPVAVPKGWEIIIIDLQDCFFNIKLHPEDCKRFAFSVPSPNFKRPYQRFQWKVLPQGMKNSPTLCQKFVDKAILTVRDKYQDSYIVHYMDDILLAHPSRSIVDEILTSMIQALNKHGLVVSTEKIQKYDNLKYLGTHIQGDSVSYQKLQIRTDKLRTLNDFQKLLGNINWIRPFLKLTTGELKPLFEILNGDSNPISTRKLTPEACKALQLMNERLSTARVKRLDLSQPWSLCILKTEYTPTACLWQDGVVEWIHLPHISPKVITPYDIFCTQLIIKGRHRSKELFSKDPDYIVVPYTKVQFDLLLQEKEDWPISLLGFLGEVHFHLPKDPLLTFTLQTAIIFPHMTSTTPLEKGIVIFTDGSANGRSVTYIQGREPIIKENTQNTAQQAEIVAVITAFEEVSQPFNLYTDSKYVTGLFPEIETATLSPRTKIYTELKHLQRLIHKRQEKFYIGHIRGHTGLPGPLAQGNAYADSLTRILTAGKRTADGSEFEKRTADGSEFESPKKKAKVE

SEQ ID NO: 3213 - protein, 2024 aa, synthetic construct
MPAAKRVKLDGGDKKYSIGLDIGTNSVGWAVITDEYKVPSKKFKVLGNTDRHSIKKNLIGALLFDSGETAEATRLKRTARRRYTRRKNRICYLQEIFSNEMAKVDDSFFHRLEESFLVEEDKKHERHPIFGNIVDEVAYHEKYPTIYHLRKKLVDSTDKADLRLIYLALAHMIKFRGHFLIEGDLNPDNSDVDKLFIQLVQTYNQLFEENPINASGVDAKAILSARLSKSRRLENLIAQLPGEKKNGLFGNLIALSLGLTPNFKSNFDLAEDAKLQLSKDTYDDDLDNLLAQIGDQYADLFLAAKNLSDAILLSDILRVNTEITKAPLSASMIKRYDEHHQDLTLLKALVRQQLPEKYKEIFFDQSKNGYAGYIDGGASQEEFYKFIKPILEKMDGTEELLVKLNREDLLRKQRTFDNGSIPHQIHLGELHAILRRQEDFYPFLKDNREKIEKILTFRIPYYVGPLARGNSRFAWMTRKSEETITPWNFEEVVDKGASAQSFIERMTNFDKNLPNEKVLPKHSLLYEYFTVYNELTKVKYVTEGMRKPAFLSGEQKKAIVDLLFKTNRKVTVKQLKEDYFKKIECFDSVEISGVEDRFNASLGTYHDLLKIIKDKDFLDNEENEDILEDIVLTLTLFEDREMIEERLKTYAHLFDDKVMKQLKRRRYTGWGRLSRKLINGIRDKQSGKTILDFLKSDGFANRNFMQLIHDDSLTFKEDIQKAQVSGQGDSLHEHIANLAGSPAIKKGILQTVKVVDELVKVMGRHKPENIVIEMARENQTTQKGQKNSRERMKRIEEGIKELGSQILKEHPVENTQLQNEKLYLYYLQNGRDMYVDQELDINRLSDYDVDHIVPQSFLKDDSIDNKVLTRSDKARGKSDNVPSEEVVKKMKNYWRQLLNAKLITQRKFDNLTKAERGGLSELDKAGFIKRQLVETRQITKHVAQILDSRMNTKYDENDKLIREVKVITLKSKLVSDFRKDFQFYKVREINNYHHAHDAYLNAVVGTALIKKYPKLESEFVYGDYKVYDVRKMIAKSEQEIGKATAKYFFYSNIMNFFKTEITLANGEIRKRPLIETNGETGEIVWDKGRDFATVRKVLSMPQVNIVKKTEVQTGGFSKESILPKRNSDKLIARKKDWDPKKYGGFDSPTVAYSVLVVAKVEKGKSKKLKSVKELLGITIMERSSFEKNPIDFLEAKGYKEVKKDLIIKLPKYSLFELENGRKRMLASAGELQKGNELALPSKYVNFLYLASHYEKLKGSPEDNEQKQLFVEQHKHYLDEIIEQISEFSKRVILADANLDKVLSAYNKHRDKPIREQAENIIHLFTLTNLGAPAAFKYFDTTIDRKRYTSTKEVLDATLIHQSITGLYETRIDLSQLGGDGGGGGEAAAKPAPGGGRDIMKDIKVRLMTDSPDDSQDLMIGAIESNLFADQISWKSDQPVWLNQWPLKQEKLQALQQLVTEQLQLGHLEESNSPWNTPVFVIKKKSGKWRLLQDLRAVNATMHDMGALQPGLPSPVAVPKGWEIIIIDLQDCFFNIKLHPEDCKRFAFSVPSPNFKRPYQRFQWKVLPQGMKNSPTLCQKFVDKAILTVRDKYQDSYIVHYMDDILLAHPSRSIVDEILTSMIQALNKHGLVVSTEKIQKYDNLKYLGTHIQGDSVSYQKLQIRTDKLRTLNDFQKLLGNINWIRPFLKLTTGELKPLFEILNGDSNPISTRKLTPEACKALQLMNERLSTARVKRLDLSQPWSLCILKTEYTPTACLWQDGVVEWIHLPHISPKVITPYDIFCTQLIIKGRHRSKELFSKDPDYIVVPYTKVQFDLLLQEKEDWPISLLGFLGEVHFHLPKDPLLTFTLQTAIIFPHMTSTTPLEKGIVIFTDGSANGRSVTYIQGREPIIKENTQNTAQQAEIVAVITAFEEVSQPFNLYTDSKYVTGLFPEIETATLSPRTKIYTELKHLQRLIHKRQEKFYIGHIRGHTGLPGPLAQGNAYADSLTRILTAGKRTADGSEFEKRTADGSEFESPKKKAKVE

SEQ ID NO: 3214 - protein, 2024 aa, synthetic construct
MPAAKRVKLDGGDKKYSIGLDIGTNSVGWAVITDEYKVPSKKFKVLGNTDRHSIKKNLIGALLFDSGETAEATRLKRTARRRYTRRKNRICYLQEIFSNEMAKVDDSFFHRLEESFLVEEDKKHERHPIFGNIVDEVAYHEKYPTIYHLRKKLVDSTDKADLRLIYLALAHMIKFRGHFLIEGDLNPDNSDVDKLFIQLVQTYNQLFEENPINASGVDAKAILSARLSKSRRLENLIAQLPGEKKNGLFGNLIALSLGLTPNFKSNFDLAEDAKLQLSKDTYDDDLDNLLAQIGDQYADLFLAAKNLSDAILLSDILRVNTEITKAPLSASMIKRYDEHHQDLTLLKALVRQQLPEKYKEIFFDQSKNGYAGYIDGGASQEEFYKFIKPILEKMDGTEELLVKLNREDLLRKQRTFDNGSIPHQIHLGELHAILRRQEDFYPFLKDNREKIEKILTFRIPYYVGPLARGNSRFAWMTRKSEETITPWNFEEVVDKGASAQSFIERMTNFDKNLPNEKVLPKHSLLYEYFTVYNELTKVKYVTEGMRKPAFLSGEQKKAIVDLLFKTNRKVTVKQLKEDYFKKIECFDSVEISGVEDRFNASLGTYHDLLKIIKDKDFLDNEENEDILEDIVLTLTLFEDREMIEERLKTYAHLFDDKVMKQLKRRRYTGWGRLSRKLINGIRDKQSGKTILDFLKSDGFANRNFMQLIHDDSLTFKEDIQKAQVSGQGDSLHEHIANLAGSPAIKKGILQTVKVVDELVKVMGRHKPENIVIEMARENQTTQKGQKNSRERMKRIEEGIKELGSQILKEHPVENTQLQNEKLYLYYLQNGRDMYVDQELDINRLSDYDVDHIVPQSFLKDDSIDNKVLTRSDKARGKSDNVPSEEVVKKMKNYWRQLLNAKLITQRKFDNLTKAERGGLSELDKAGFIKRQLVETRQITKHVAQILDSRMNTKYDENDKLIREVKVITLKSKLVSDFRKDFQFYKVREINNYHHAHDAYLNAVVGTALIKKYPKLESEFVYGDYKVYDVRKMIAKSEQEIGKATAKYFFYSNIMNFFKTEITLANGEIRKRPLIETNGETGEIVWDKGRDFATVRKVLSMPQVNIVKKTEVQTGGFSKESILPKRNSDKLIARKKDWDPKKYGGFDSPTVAYSVLVVAKVEKGKSKKLKSVKELLGITIMERSSFEKNPIDFLEAKGYKEVKKDLIIKLPKYSLFELENGRKRMLASAGELQKGNELALPSKYVNFLYLASHYEKLKGSPEDNEQKQLFVEQHKHYLDEIIEQISEFSKRVILADANLDKVLSAYNKHRDKPIREQAENIIHLFTLTNLGAPAAFKYFDTTIDRKRYTSTKEVLDATLIHQSITGLYETRIDLSQLGGDGGGGGEAAAKGGSGGGRDIMKDIKVRLMTDSPDDSQDLMIGAIESNLFADQISWKSDQPVWLNQWPLKQEKLQALQQLVTEQLQLGHLEESNSPWNTPVFVIKKKSGKWRLLQDLRAVNATMHDMGALQPGLPSPVAVPKGWEIIIIDLQDCFFNIKLHPEDCKRFAFSVPSPNFKRPYQRFQWKVLPQGMKNSPTLCQKFVDKAILTVRDKYQDSYIVHYMDDILLAHPSRSIVDEILTSMIQALNKHGLVVSTEKIQKYDNLKYLGTHIQGDSVSYQKLQIRTDKLRTLNDFQKLLGNINWIRPFLKLTTGELKPLFEILNGDSNPISTRKLTPEACKALQLMNERLSTARVKRLDLSQPWSLCILKTEYTPTACLWQDGVVEWIHLPHISPKVITPYDIFCTQLIIKGRHRSKELFSKDPDYIVVPYTKVQFDLLLQEKEDWPISLLGFLGEVHFHLPKDPLLTFTLQTAIIFPHMTSTTPLEKGIVIFTDGSANGRSVTYIQGREPIIKENTQNTAQQAEIVAVITAFEEVSQPFNLYTDSKYVTGLFPEIETATLSPRTKIYTELKHLQRLIHKRQEKFYIGHIRGHTGLPGPLAQGNAYADSLTRILTAGKRTADGSEFEKRTADGSEFESPKKKAKVE

SEQ ID NO: 3215 - protein, 2022 aa, synthetic construct
MPAAKRVKLDGGDKKYSIGLDIGTNSVGWAVITDEYKVPSKKFKVLGNTDRHSIKKNLIGALLFDSGETAEATRLKRTARRRYTRRKNRICYLQEIFSNEMAKVDDSFFHRLEESFLVEEDKKHERHPIFGNIVDEVAYHEKYPTIYHLRKKLVDSTDKADLRLIYLALAHMIKFRGHFLIEGDLNPDNSDVDKLFIQLVQTYNQLFEENPINASGVDAKAILSARLSKSRRLENLIAQLPGEKKNGLFGNLIALSLGLTPNFKSNFDLAEDAKLQLSKDTYDDDLDNLLAQIGDQYADLFLAAKNLSDAILLSDILRVNTEITKAPLSASMIKRYDEHHQDLTLLKALVRQQLPEKYKEIFFDQSKNGYAGYIDGGASQEEFYKFIKPILEKMDGTEELLVKLNREDLLRKQRTFDNGSIPHQIHLGELHAILRRQEDFYPFLKDNREKIEKILTFRIPYYVGPLARGNSRFAWMTRKSEETITPWNFEEVVDKGASAQSFIERMTNFDKNLPNEKVLPKHSLLYEYFTVYNELTKVKYVTEGMRKPAFLSGEQKKAIVDLLFKTNRKVTVKQLKEDYFKKIECFDSVEISGVEDRFNASLGTYHDLLKIIKDKDFLDNEENEDILEDIVLTLTLFEDREMIEERLKTYAHLFDDKVMKQLKRRRYTGWGRLSRKLINGIRDKQSGKTILDFLKSDGFANRNFMQLIHDDSLTFKEDIQKAQVSGQGDSLHEHIANLAGSPAIKKGILQTVKVVDELVKVMGRHKPENIVIEMARENQTTQKGQKNSRERMKRIEEGIKELGSQILKEHPVENTQLQNEKLYLYYLQNGRDMYVDQELDINRLSDYDVDHIVPQSFLKDDSIDNKVLTRSDKARGKSDNVPSEEVVKKMKNYWRQLLNAKLITQRKFDNLTKAERGGLSELDKAGFIKRQLVETRQITKHVAQILDSRMNTKYDENDKLIREVKVITLKSKLVSDFRKDFQFYKVREINNYHHAHDAYLNAVVGTALIKKYPKLESEFVYGDYKVYDVRKMIAKSEQEIGKATAKYFFYSNIMNFFKTEITLANGEIRKRPLIETNGETGEIVWDKGRDFATVRKVLSMPQVNIVKKTEVQTGGFSKESILPKRNSDKLIARKKDWDPKKYGGFDSPTVAYSVLVVAKVEKGKSKKLKSVKELLGITIMERSSFEKNPIDFLEAKGYKEVKKDLIIKLPKYSLFELENGRKRMLASAGELQKGNELALPSKYVNFLYLASHYEKLKGSPEDNEQKQLFVEQHKHYLDEIIEQISEFSKRVILADANLDKVLSAYNKHRDKPIREQAENIIHLFTLTNLGAPAAFKYFDTTIDRKRYTSTKEVLDATLIHQSITGLYETRIDLSQLGGDGGPAPGSSGGSGGGRDIMKDIKVRLMTDSPDDSQDLMIGAIESNLFADQISWKSDQPVWLNQWPLKQEKLQALQQLVTEQLQLGHLEESNSPWNTPVFVIKKKSGKWRLLQDLRAVNATMHDMGALQPGLPSPVAVPKGWEIIIIDLQDCFFNIKLHPEDCKRFAFSVPSPNFKRPYQRFQWKVLPQGMKNSPTLCQKFVDKAILTVRDKYQDSYIVHYMDDILLAHPSRSIVDEILTSMIQALNKHGLVVSTEKIQKYDNLKYLGTHIQGDSVSYQKLQIRTDKLRTLNDFQKLLGNINWIRPFLKLTTGELKPLFEILNGDSNPISTRKLTPEACKALQLMNERLSTARVKRLDLSQPWSLCILKTEYTPTACLWQDGVVEWIHLPHISPKVITPYDIFCTQLIIKGRHRSKELFSKDPDYIVVPYTKVQFDLLLQEKEDWPISLLGFLGEVHFHLPKDPLLTFTLQTAIIFPHMTSTTPLEKGIVIFTDGSANGRSVTYIQGREPIIKENTQNTAQQAEIVAVITAFEEVSQPFNLYTDSKYVTGLFPEIETATLSPRTKIYTELKHLQRLIHKRQEKFYIGHIRGHTGLPGPLAQGNAYADSLTRILTAGKRTADGSEFEKRTADGSEFESPKKKAKVE

SEQ ID NO: 3216 - protein, 2043 aa, synthetic construct
MPAAKRVKLDGGDKKYSIGLDIGTNSVGWAVITDEYKVPSKKFKVLGNTDRHSIKKNLIGALLFDSGETAEATRLKRTARRRYTRRKNRICYLQEIFSNEMAKVDDSFFHRLEESFLVEEDKKHERHPIFGNIVDEVAYHEKYPTIYHLRKKLVDSTDKADLRLIYLALAHMIKFRGHFLIEGDLNPDNSDVDKLFIQLVQTYNQLFEENPINASGVDAKAILSARLSKSRRLENLIAQLPGEKKNGLFGNLIALSLGLTPNFKSNFDLAEDAKLQLSKDTYDDDLDNLLAQIGDQYADLFLAAKNLSDAILLSDILRVNTEITKAPLSASMIKRYDEHHQDLTLLKALVRQQLPEKYKEIFFDQSKNGYAGYIDGGASQEEFYKFIKPILEKMDGTEELLVKLNREDLLRKQRTFDNGSIPHQIHLGELHAILRRQEDFYPFLKDNREKIEKILTFRIPYYVGPLARGNSRFAWMTRKSEETITPWNFEEVVDKGASAQSFIERMTNFDKNLPNEKVLPKHSLLYEYFTVYNELTKVKYVTEGMRKPAFLSGEQKKAIVDLLFKTNRKVTVKQLKEDYFKKIECFDSVEISGVEDRFNASLGTYHDLLKIIKDKDFLDNEENEDILEDIVLTLTLFEDREMIEERLKTYAHLFDDKVMKQLKRRRYTGWGRLSRKLINGIRDKQSGKTILDFLKSDGFANRNFMQLIHDDSLTFKEDIQKAQVSGQGDSLHEHIANLAGSPAIKKGILQTVKVVDELVKVMGRHKPENIVIEMARENQTTQKGQKNSRERMKRIEEGIKELGSQILKEHPVENTQLQNEKLYLYYLQNGRDMYVDQELDINRLSDYDVDHIVPQSFLKDDSIDNKVLTRSDKARGKSDNVPSEEVVKKMKNYWRQLLNAKLITQRKFDNLTKAERGGLSELDKAGFIKRQLVETRQITKHVAQILDSRMNTKYDENDKLIREVKVITLKSKLVSDFRKDFQFYKVREINNYHHAHDAYLNAVVGTALIKKYPKLESEFVYGDYKVYDVRKMIAKSEQEIGKATAKYFFYSNIMNFFKTEITLANGEIRKRPLIETNGETGEIVWDKGRDFATVRKVLSMPQVNIVKKTEVQTGGFSKESILPKRNSDKLIARKKDWDPKKYGGFDSPTVAYSVLVVAKVEKGKSKKLKSVKELLGITIMERSSFEKNPIDFLEAKGYKEVKKDLIIKLPKYSLFELENGRKRMLASAGELQKGNELALPSKYVNFLYLASHYEKLKGSPEDNEQKQLFVEQHKHYLDEIIEQISEFSKRVILADANLDKVLSAYNKHRDKPIREQAENIIHLFTLTNLGAPAAFKYFDTTIDRKRYTSTKEVLDATLIHQSITGLYETRIDLSQLGGDGGGGGGSGGGGSGGGGSGGGGSGGGGSGGGGSGGGRDIMKDIKVRLMTDSPDDSQDLMIGAIESNLFADQISWKSDQPVWLNQWPLKQEKLQALQQLVTEQLQLGHLEESNSPWNTPVFVIKKKSGKWRLLQDLRAVNATMHDMGALQPGLPSPVAVPKGWEIIIIDLQDCFFNIKLHPEDCKRFAFSVPSPNFKRPYQRFQWKVLPQGMKNSPTLCQKFVDKAILTVRDKYQDSYIVHYMDDILLAHPSRSIVDEILTSMIQALNKHGLVVSTEKIQKYDNLKYLGTHIQGDSVSYQKLQIRTDKLRTLNDFQKLLGNINWIRPFLKLTTGELKPLFEILNGDSNPISTRKLTPEACKALQLMNERLSTARVKRLDLSQPWSLCILKTEYTPTACLWQDGVVEWIHLPHISPKVITPYDIFCTQLIIKGRHRSKELFSKDPDYIVVPYTKVQFDLLLQEKEDWPISLLGFLGEVHFHLPKDPLLTFTLQTAIIFPHMTSTTPLEKGIVIFTDGSANGRSVTYIQGREPIIKENTQNTAQQAEIVAVITAFEEVSQPFNLYTDSKYVTGLFPEIETATLSPRTKIYTELKHLQRLIHKRQEKFYIGHIRGHTGLPGPLAQGNAYADSLTRILTAGKRTADGSEFEKRTADGSEFESPKKKAKVE

SEQ ID NO: 3217 - protein, 2021 aa, synthetic construct
MPAAKRVKLDGGDKKYSIGLDIGTNSVGWAVITDEYKVPSKKFKVLGNTDRHSIKKNLIGALLFDSGETAEATRLKRTARRRYTRRKNRICYLQEIFSNEMAKVDDSFFHRLEESFLVEEDKKHERHPIFGNIVDEVAYHEKYPTIYHLRKKLVDSTDKADLRLIYLALAHMIKFRGHFLIEGDLNPDNSDVDKLFIQLVQTYNQLFEENPINASGVDAKAILSARLSKSRRLENLIAQLPGEKKNGLFGNLIALSLGLTPNFKSNFDLAEDAKLQLSKDTYDDDLDNLLAQIGDQYADLFLAAKNLSDAILLSDILRVNTEITKAPLSASMIKRYDEHHQDLTLLKALVRQQLPEKYKEIFFDQSKNGYAGYIDGGASQEEFYKFIKPILEKMDGTEELLVKLNREDLLRKQRTFDNGSIPHQIHLGELHAILRRQEDFYPFLKDNREKIEKILTFRIPYYVGPLARGNSRFAWMTRKSEETITPWNFEEVVDKGASAQSFIERMTNFDKNLPNEKVLPKHSLLYEYFTVYNELTKVKYVTEGMRKPAFLSGEQKKAIVDLLFKTNRKVTVKQLKEDYFKKIECFDSVEISGVEDRFNASLGTYHDLLKIIKDKDFLDNEENEDILEDIVLTLTLFEDREMIEERLKTYAHLFDDKVMKQLKRRRYTGWGRLSRKLINGIRDKQSGKTILDFLKSDGFANRNFMQLIHDDSLTFKEDIQKAQVSGQGDSLHEHIANLAGSPAIKKGILQTVKVVDELVKVMGRHKPENIVIEMARENQTTQKGQKNSRERMKRIEEGIKELGSQILKEHPVENTQLQNEKLYLYYLQNGRDMYVDQELDINRLSDYDVDHIVPQSFLKDDSIDNKVLTRSDKARGKSDNVPSEEVVKKMKNYWRQLLNAKLITQRKFDNLTKAERGGLSELDKAGFIKRQLVETRQITKHVAQILDSRMNTKYDENDKLIREVKVITLKSKLVSDFRKDFQFYKVREINNYHHAHDAYLNAVVGTALIKKYPKLESEFVYGDYKVYDVRKMIAKSEQEIGKATAKYFFYSNIMNFFKTEITLANGEIRKRPLIETNGETGEIVWDKGRDFATVRKVLSMPQVNIVKKTEVQTGGFSKESILPKRNSDKLIARKKDWDPKKYGGFDSPTVAYSVLVVAKVEKGKSKKLKSVKELLGITIMERSSFEKNPIDFLEAKGYKEVKKDLIIKLPKYSLFELENGRKRMLASAGELQKGNELALPSKYVNFLYLASHYEKLKGSPEDNEQKQLFVEQHKHYLDEIIEQISEFSKRVILADANLDKVLSAYNKHRDKPIREQAENIIHLFTLTNLGAPAAFKYFDTTIDRKRYTSTKEVLDATLIHQSITGLYETRIDLSQLGGDGGPAPEAAAKGGGRDIMKDIKVRLMTDSPDDSQDLMIGAIESNLFADQISWKSDQPVWLNQWPLKQEKLQALQQLVTEQLQLGHLEESNSPWNTPVFVIKKKSGKWRLLQDLRAVNATMHDMGALQPGLPSPVAVPKGWEIIIIDLQDCFFNIKLHPEDCKRFAFSVPSPNFKRPYQRFQWKVLPQGMKNSPTLCQKFVDKAILTVRDKYQDSYIVHYMDDILLAHPSRSIVDEILTSMIQALNKHGLVVSTEKIQKYDNLKYLGTHIQGDSVSYQKLQIRTDKLRTLNDFQKLLGNINWIRPFLKLTTGELKPLFEILNGDSNPISTRKLTPEACKALQLMNERLSTARVKRLDLSQPWSLCILKTEYTPTACLWQDGVVEWIHLPHISPKVITPYDIFCTQLIIKGRHRSKELFSKDPDYIVVPYTKVQFDLLLQEKEDWPISLLGFLGEVHFHLPKDPLLTFTLQTAIIFPHMTSTTPLEKGIVIFTDGSANGRSVTYIQGREPIIKENTQNTAQQAEIVAVITAFEEVSQPFNLYTDSKYVTGLFPEIETATLSPRTKIYTELKHLQRLIHKRQEKFYIGHIRGHTGLPGPLAQGNAYADSLTRILTAGKRTADGSEFEKRTADGSEFESPKKKAKVE

SEQ ID NO: 3218 - protein, 2018 aa, synthetic construct
MPAAKRVKLDGGDKKYSIGLDIGTNSVGWAVITDEYKVPSKKFKVLGNTDRHSIKKNLIGALLFDSGETAEATRLKRTARRRYTRRKNRICYLQEIFSNEMAKVDDSFFHRLEESFLVEEDKKHERHPIFGNIVDEVAYHEKYPTIYHLRKKLVDSTDKADLRLIYLALAHMIKFRGHFLIEGDLNPDNSDVDKLFIQLVQTYNQLFEENPINASGVDAKAILSARLSKSRRLENLIAQLPGEKKNGLFGNLIALSLGLTPNFKSNFDLAEDAKLQLSKDTYDDDLDNLLAQIGDQYADLFLAAKNLSDAILLSDILRVNTEITKAPLSASMIKRYDEHHQDLTLLKALVRQQLPEKYKEIFFDQSKNGYAGYIDGGASQEEFYKFIKPILEKMDGTEELLVKLNREDLLRKQRTFDNGSIPHQIHLGELHAILRRQEDFYPFLKDNREKIEKILTFRIPYYVGPLARGNSRFAWMTRKSEETITPWNFEEVVDKGASAQSFIERMTNFDKNLPNEKVLPKHSLLYEYFTVYNELTKVKYVTEGMRKPAFLSGEQKKAIVDLLFKTNRKVTVKQLKEDYFKKIECFDSVEISGVEDRFNASLGTYHDLLKIIKDKDFLDNEENEDILEDIVLTLTLFEDREMIEERLKTYAHLFDDKVMKQLKRRRYTGWGRLSRKLINGIRDKQSGKTILDFLKSDGFANRNFMQLIHDDSLTFKEDIQKAQVSGQGDSLHEHIANLAGSPAIKKGILQTVKVVDELVKVMGRHKPENIVIEMARENQTTQKGQKNSRERMKRIEEGIKELGSQILKEHPVENTQLQNEKLYLYYLQNGRDMYVDQELDINRLSDYDVDHIVPQSFLKDDSIDNKVLTRSDKARGKSDNVPSEEVVKKMKNYWRQLLNAKLITQRKFDNLTKAERGGLSELDKAGFIKRQLVETRQITKHVAQILDSRMNTKYDENDKLIREVKVITLKSKLVSDFRKDFQFYKVREINNYHHAHDAYLNAVVGTALIKKYPKLESEFVYGDYKVYDVRKMIAKSEQEIGKATAKYFFYSNIMNFFKTEITLANGEIRKRPLIETNGETGEIVWDKGRDFATVRKVLSMPQVNIVKKTEVQTGGFSKESILPKRNSDKLIARKKDWDPKKYGGFDSPTVAYSVLVVAKVEKGKSKKLKSVKELLGITIMERSSFEKNPIDFLEAKGYKEVKKDLIIKLPKYSLFELENGRKRMLASAGELQKGNELALPSKYVNFLYLASHYEKLKGSPEDNEQKQLFVEQHKHYLDEIIEQISEFSKRVILADANLDKVLSAYNKHRDKPIREQAENIIHLFTLTNLGAPAAFKYFDTTIDRKRYTSTKEVLDATLIHQSITGLYETRIDLSQLGGDGGPAPAPGGGRDIMKDIKVRLMTDSPDDSQDLMIGAIESNLFADQISWKSDQPVWLNQWPLKQEKLQALQQLVTEQLQLGHLEESNSPWNTPVFVIKKKSGKWRLLQDLRAVNATMHDMGALQPGLPSPVAVPKGWEIIIIDLQDCFFNIKLHPEDCKRFAFSVPSPNFKRPYQRFQWKVLPQGMKNSPTLCQKFVDKAILTVRDKYQDSYIVHYMDDILLAHPSRSIVDEILTSMIQALNKHGLVVSTEKIQKYDNLKYLGTHIQGDSVSYQKLQIRTDKLRTLNDFQKLLGNINWIRPFLKLTTGELKPLFEILNGDSNPISTRKLTPEACKALQLMNERLSTARVKRLDLSQPWSLCILKTEYTPTACLWQDGVVEWIHLPHISPKVITPYDIFCTQLIIKGRHRSKELFSKDPDYIVVPYTKVQFDLLLQEKEDWPISLLGFLGEVHFHLPKDPLLTFTLQTAIIFPHMTSTTPLEKGIVIFTDGSANGRSVTYIQGREPIIKENTQNTAQQAEIVAVITAFEEVSQPFNLYTDSKYVTGLFPEIETATLSPRTKIYTELKHLQRLIHKRQEKFYIGHIRGHTGLPGPLAQGNAYADSLTRILTAGKRTADGSEFEKRTADGSEFESPKKKAKVE

SEQ ID NO: 3219 - protein, 2025 aa, synthetic construct
MPAAKRVKLDGGDKKYSIGLDIGTNSVGWAVITDEYKVPSKKFKVLGNTDRHSIKKNLIGALLFDSGETAEATRLKRTARRRYTRRKNRICYLQEIFSNEMAKVDDSFFHRLEESFLVEEDKKHERHPIFGNIVDEVAYHEKYPTIYHLRKKLVDSTDKADLRLIYLALAHMIKFRGHFLIEGDLNPDNSDVDKLFIQLVQTYNQLFEENPINASGVDAKAILSARLSKSRRLENLIAQLPGEKKNGLFGNLIALSLGLTPNFKSNFDLAEDAKLQLSKDTYDDDLDNLLAQIGDQYADLFLAAKNLSDAILLSDILRVNTEITKAPLSASMIKRYDEHHQDLTLLKALVRQQLPEKYKEIFFDQSKNGYAGYIDGGASQEEFYKFIKPILEKMDGTEELLVKLNREDLLRKQRTFDNGSIPHQIHLGELHAILRRQEDFYPFLKDNREKIEKILTFRIPYYVGPLARGNSRFAWMTRKSEETITPWNFEEVVDKGASAQSFIERMTNFDKNLPNEKVLPKHSLLYEYFTVYNELTKVKYVTEGMRKPAFLSGEQKKAIVDLLFKTNRKVTVKQLKEDYFKKIECFDSVEISGVEDRFNASLGTYHDLLKIIKDKDFLDNEENEDILEDIVLTLTLFEDREMIEERLKTYAHLFDDKVMKQLKRRRYTGWGRLSRKLINGIRDKQSGKTILDFLKSDGFANRNFMQLIHDDSLTFKEDIQKAQVSGQGDSLHEHIANLAGSPAIKKGILQTVKVVDELVKVMGRHKPENIVIEMARENQTTQKGQKNSRERMKRIEEGIKELGSQILKEHPVENTQLQNEKLYLYYLQNGRDMYVDQELDINRLSDYDVDHIVPQSFLKDDSIDNKVLTRSDKARGKSDNVPSEEVVKKMKNYWRQLLNAKLITQRKFDNLTKAERGGLSELDKAGFIKRQLVETRQITKHVAQILDSRMNTKYDENDKLIREVKVITLKSKLVSDFRKDFQFYKVREINNYHHAHDAYLNAVVGTALIKKYPKLESEFVYGDYKVYDVRKMIAKSEQEIGKATAKYFFYSNIMNFFKTEITLANGEIRKRPLIETNGETGEIVWDKGRDFATVRKVLSMPQVNIVKKTEVQTGGFSKESILPKRNSDKLIARKKDWDPKKYGGFDSPTVAYSVLVVAKVEKGKSKKLKSVKELLGITIMERSSFEKNPIDFLEAKGYKEVKKDLIIKLPKYSLFELENGRKRMLASAGELQKGNELALPSKYVNFLYLASHYEKLKGSPEDNEQKQLFVEQHKHYLDEIIEQISEFSKRVILADANLDKVLSAYNKHRDKPIREQAENIIHLFTLTNLGAPAAFKYFDTTIDRKRYTSTKEVLDATLIHQSITGLYETRIDLSQLGGDGGGSAGSAAGSGEFGGGRDIMKDIKVRLMTDSPDDSQDLMIGAIESNLFADQISWKSDQPVWLNQWPLKQEKLQALQQLVTEQLQLGHLEESNSPWNTPVFVIKKKSGKWRLLQDLRAVNATMHDMGALQPGLPSPVAVPKGWEIIIIDLQDCFFNIKLHPEDCKRFAFSVPSPNFKRPYQRFQWKVLPQGMKNSPTLCQKFVDKAILTVRDKYQDSYIVHYMDDILLAHPSRSIVDEILTSMIQALNKHGLVVSTEKIQKYDNLKYLGTHIQGDSVSYQKLQIRTDKLRTLNDFQKLLGNINWIRPFLKLTTGELKPLFEILNGDSNPISTRKLTPEACKALQLMNERLSTARVKRLDLSQPWSLCILKTEYTPTACLWQDGVVEWIHLPHISPKVITPYDIFCTQLIIKGRHRSKELFSKDPDYIVVPYTKVQFDLLLQEKEDWPISLLGFLGEVHFHLPKDPLLTFTLQTAIIFPHMTSTTPLEKGIVIFTDGSANGRSVTYIQGREPIIKENTQNTAQQAEIVAVITAFEEVSQPFNLYTDSKYVTGLFPEIETATLSPRTKIYTELKHLQRLIHKRQEKFYIGHIRGHTGLPGPLAQGNAYADSLTRILTAGKRTADGSEFEKRTADGSEFESPKKKAKVE

SEQ ID NO: 3220 - protein, 2022 aa, synthetic construct
MPAAKRVKLDGGDKKYSIGLDIGTNSVGWAVITDEYKVPSKKFKVLGNTDRHSIKKNLIGALLFDSGETAEATRLKRTARRRYTRRKNRICYLQEIFSNEMAKVDDSFFHRLEESFLVEEDKKHERHPIFGNIVDEVAYHEKYPTIYHLRKKLVDSTDKADLRLIYLALAHMIKFRGHFLIEGDLNPDNSDVDKLFIQLVQTYNQLFEENPINASGVDAKAILSARLSKSRRLENLIAQLPGEKKNGLFGNLIALSLGLTPNFKSNFDLAEDAKLQLSKDTYDDDLDNLLAQIGDQYADLFLAAKNLSDAILLSDILRVNTEITKAPLSASMIKRYDEHHQDLTLLKALVRQQLPEKYKEIFFDQSKNGYAGYIDGGASQEEFYKFIKPILEKMDGTEELLVKLNREDLLRKQRTFDNGSIPHQIHLGELHAILRRQEDFYPFLKDNREKIEKILTFRIPYYVGPLARGNSRFAWMTRKSEETITPWNFEEVVDKGASAQSFIERMTNFDKNLPNEKVLPKHSLLYEYFTVYNELTKVKYVTEGMRKPAFLSGEQKKAIVDLLFKTNRKVTVKQLKEDYFKKIECFDSVEISGVEDRFNASLGTYHDLLKIIKDKDFLDNEENEDILEDIVLTLTLFEDREMIEERLKTYAHLFDDKVMKQLKRRRYTGWGRLSRKLINGIRDKQSGKTILDFLKSDGFANRNFMQLIHDDSLTFKEDIQKAQVSGQGDSLHEHIANLAGSPAIKKGILQTVKVVDELVKVMGRHKPENIVIEMARENQTTQKGQKNSRERMKRIEEGIKELGSQILKEHPVENTQLQNEKLYLYYLQNGRDMYVDQELDINRLSDYDVDHIVPQSFLKDDSIDNKVLTRSDKARGKSDNVPSEEVVKKMKNYWRQLLNAKLITQRKFDNLTKAERGGLSELDKAGFIKRQLVETRQITKHVAQILDSRMNTKYDENDKLIREVKVITLKSKLVSDFRKDFQFYKVREINNYHHAHDAYLNAVVGTALIKKYPKLESEFVYGDYKVYDVRKMIAKSEQEIGKATAKYFFYSNIMNFFKTEITLANGEIRKRPLIETNGETGEIVWDKGRDFATVRKVLSMPQVNIVKKTEVQTGGFSKESILPKRNSDKLIARKKDWDPKKYGGFDSPTVAYSVLVVAKVEKGKSKKLKSVKELLGITIMERSSFEKNPIDFLEAKGYKEVKKDLIIKLPKYSLFELENGRKRMLASAGELQKGNELALPSKYVNFLYLASHYEKLKGSPEDNEQKQLFVEQHKHYLDEIIEQISEFSKRVILADANLDKVLSAYNKHRDKPIREQAENIIHLFTLTNLGAPAAFKYFDTTIDRKRYTSTKEVLDATLIHQSITGLYETRIDLSQLGGDGGPAPGGGGGSGGGRDIMKDIKVRLMTDSPDDSQDLMIGAIESNLFADQISWKSDQPVWLNQWPLKQEKLQALQQLVTEQLQLGHLEESNSPWNTPVFVIKKKSGKWRLLQDLRAVNATMHDMGALQPGLPSPVAVPKGWEIIIIDLQDCFFNIKLHPEDCKRFAFSVPSPNFKRPYQRFQWKVLPQGMKNSPTLCQKFVDKAILTVRDKYQDSYIVHYMDDILLAHPSRSIVDEILTSMIQALNKHGLVVSTEKIQKYDNLKYLGTHIQGDSVSYQKLQIRTDKLRTLNDFQKLLGNINWIRPFLKLTTGELKPLFEILNGDSNPISTRKLTPEACKALQLMNERLSTARVKRLDLSQPWSLCILKTEYTPTACLWQDGVVEWIHLPHISPKVITPYDIFCTQLIIKGRHRSKELFSKDPDYIVVPYTKVQFDLLLQEKEDWPISLLGFLGEVHFHLPKDPLLTFTLQTAIIFPHMTSTTPLEKGIVIFTDGSANGRSVTYIQGREPIIKENTQNTAQQAEIVAVITAFEEVSQPFNLYTDSKYVTGLFPEIETATLSPRTKIYTELKHLQRLIHKRQEKFYIGHIRGHTGLPGPLAQGNAYADSLTRILTAGKRTADGSEFEKRTADGSEFESPKKKAKVE

SEQ ID NO: 3221 - protein, 2022 aa, synthetic construct
MPAAKRVKLDGGDKKYSIGLDIGTNSVGWAVITDEYKVPSKKFKVLGNTDRHSIKKNLIGALLFDSGETAEATRLKRTARRRYTRRKNRICYLQEIFSNEMAKVDDSFFHRLEESFLVEEDKKHERHPIFGNIVDEVAYHEKYPTIYHLRKKLVDSTDKADLRLIYLALAHMIKFRGHFLIEGDLNPDNSDVDKLFIQLVQTYNQLFEENPINASGVDAKAILSARLSKSRRLENLIAQLPGEKKNGLFGNLIALSLGLTPNFKSNFDLAEDAKLQLSKDTYDDDLDNLLAQIGDQYADLFLAAKNLSDAILLSDILRVNTEITKAPLSASMIKRYDEHHQDLTLLKALVRQQLPEKYKEIFFDQSKNGYAGYIDGGASQEEFYKFIKPILEKMDGTEELLVKLNREDLLRKQRTFDNGSIPHQIHLGELHAILRRQEDFYPFLKDNREKIEKILTFRIPYYVGPLARGNSRFAWMTRKSEETITPWNFEEVVDKGASAQSFIERMTNFDKNLPNEKVLPKHSLLYEYFTVYNELTKVKYVTEGMRKPAFLSGEQKKAIVDLLFKTNRKVTVKQLKEDYFKKIECFDSVEISGVEDRFNASLGTYHDLLKIIKDKDFLDNEENEDILEDIVLTLTLFEDREMIEERLKTYAHLFDDKVMKQLKRRRYTGWGRLSRKLINGIRDKQSGKTILDFLKSDGFANRNFMQLIHDDSLTFKEDIQKAQVSGQGDSLHEHIANLAGSPAIKKGILQTVKVVDELVKVMGRHKPENIVIEMARENQTTQKGQKNSRERMKRIEEGIKELGSQILKEHPVENTQLQNEKLYLYYLQNGRDMYVDQELDINRLSDYDVDHIVPQSFLKDDSIDNKVLTRSDKARGKSDNVPSEEVVKKMKNYWRQLLNAKLITQRKFDNLTKAERGGLSELDKAGFIKRQLVETRQITKHVAQILDSRMNTKYDENDKLIREVKVITLKSKLVSDFRKDFQFYKVREINNYHHAHDAYLNAVVGTALIKKYPKLESEFVYGDYKVYDVRKMIAKSEQEIGKATAKYFFYSNIMNFFKTEITLANGEIRKRPLIETNGETGEIVWDKGRDFATVRKVLSMPQVNIVKKTEVQTGGFSKESILPKRNSDKLIARKKDWDPKKYGGFDSPTVAYSVLVVAKVEKGKSKKLKSVKELLGITIMERSSFEKNPIDFLEAKGYKEVKKDLIIKLPKYSLFELENGRKRMLASAGELQKGNELALPSKYVNFLYLASHYEKLKGSPEDNEQKQLFVEQHKHYLDEIIEQISEFSKRVILADANLDKVLSAYNKHRDKPIREQAENIIHLFTLTNLGAPAAFKYFDTTIDRKRYTSTKEVLDATLIHQSITGLYETRIDLSQLGGDGGPAPAPAPAPGGGRDIMKDIKVRLMTDSPDDSQDLMIGAIESNLFADQISWKSDQPVWLNQWPLKQEKLQALQQLVTEQLQLGHLEESNSPWNTPVFVIKKKSGKWRLLQDLRAVNATMHDMGALQPGLPSPVAVPKGWEIIIIDLQDCFFNIKLHPEDCKRFAFSVPSPNFKRPYQRFQWKVLPQGMKNSPTLCQKFVDKAILTVRDKYQDSYIVHYMDDILLAHPSRSIVDEILTSMIQALNKHGLVVSTEKIQKYDNLKYLGTHIQGDSVSYQKLQIRTDKLRTLNDFQKLLGNINWIRPFLKLTTGELKPLFEILNGDSNPISTRKLTPEACKALQLMNERLSTARVKRLDLSQPWSLCILKTEYTPTACLWQDGVVEWIHLPHISPKVITPYDIFCTQLIIKGRHRSKELFSKDPDYIVVPYTKVQFDLLLQEKEDWPISLLGFLGEVHFHLPKDPLLTFTLQTAIIFPHMTSTTPLEKGIVIFTDGSANGRSVTYIQGREPIIKENTQNTAQQAEIVAVITAFEEVSQPFNLYTDSKYVTGLFPEIETATLSPRTKIYTELKHLQRLIHKRQEKFYIGHIRGHTGLPGPLAQGNAYADSLTRILTAGKRTADGSEFEKRTADGSEFESPKKKAKVE

SEQ ID NO: 3222 - protein, 2024 aa, synthetic construct
MPAAKRVKLDGGDKKYSIGLDIGTNSVGWAVITDEYKVPSKKFKVLGNTDRHSIKKNLIGALLFDSGETAEATRLKRTARRRYTRRKNRICYLQEIFSNEMAKVDDSFFHRLEESFLVEEDKKHERHPIFGNIVDEVAYHEKYPTIYHLRKKLVDSTDKADLRLIYLALAHMIKFRGHFLIEGDLNPDNSDVDKLFIQLVQTYNQLFEENPINASGVDAKAILSARLSKSRRLENLIAQLPGEKKNGLFGNLIALSLGLTPNFKSNFDLAEDAKLQLSKDTYDDDLDNLLAQIGDQYADLFLAAKNLSDAILLSDILRVNTEITKAPLSASMIKRYDEHHQDLTLLKALVRQQLPEKYKEIFFDQSKNGYAGYIDGGASQEEFYKFIKPILEKMDGTEELLVKLNREDLLRKQRTFDNGSIPHQIHLGELHAILRRQEDFYPFLKDNREKIEKILTFRIPYYVGPLARGNSRFAWMTRKSEETITPWNFEEVVDKGASAQSFIERMTNFDKNLPNEKVLPKHSLLYEYFTVYNELTKVKYVTEGMRKPAFLSGEQKKAIVDLLFKTNRKVTVKQLKEDYFKKIECFDSVEISGVEDRFNASLGTYHDLLKIIKDKDFLDNEENEDILEDIVLTLTLFEDREMIEERLKTYAHLFDDKVMKQLKRRRYTGWGRLSRKLINGIRDKQSGKTILDFLKSDGFANRNFMQLIHDDSLTFKEDIQKAQVSGQGDSLHEHIANLAGSPAIKKGILQTVKVVDELVKVMGRHKPENIVIEMARENQTTQKGQKNSRERMKRIEEGIKELGSQILKEHPVENTQLQNEKLYLYYLQNGRDMYVDQELDINRLSDYDVDHIVPQSFLKDDSIDNKVLTRSDKARGKSDNVPSEEVVKKMKNYWRQLLNAKLITQRKFDNLTKAERGGLSELDKAGFIKRQLVETRQITKHVAQILDSRMNTKYDENDKLIREVKVITLKSKLVSDFRKDFQFYKVREINNYHHAHDAYLNAVVGTALIKKYPKLESEFVYGDYKVYDVRKMIAKSEQEIGKATAKYFFYSNIMNFFKTEITLANGEIRKRPLIETNGETGEIVWDKGRDFATVRKVLSMPQVNIVKKTEVQTGGFSKESILPKRNSDKLIARKKDWDPKKYGGFDSPTVAYSVLVVAKVEKGKSKKLKSVKELLGITIMERSSFEKNPIDFLEAKGYKEVKKDLIIKLPKYSLFELENGRKRMLASAGELQKGNELALPSKYVNFLYLASHYEKLKGSPEDNEQKQLFVEQHKHYLDEIIEQISEFSKRVILADANLDKVLSAYNKHRDKPIREQAENIIHLFTLTNLGAPAAFKYFDTTIDRKRYTSTKEVLDATLIHQSITGLYETRIDLSQLGGDGGPAPEAAAKGGSGGGRDIMKDIKVRLMTDSPDDSQDLMIGAIESNLFADQISWKSDQPVWLNQWPLKQEKLQALQQLVTEQLQLGHLEESNSPWNTPVFVIKKKSGKWRLLQDLRAVNATMHDMGALQPGLPSPVAVPKGWEIIIIDLQDCFFNIKLHPEDCKRFAFSVPSPNFKRPYQRFQWKVLPQGMKNSPTLCQKFVDKAILTVRDKYQDSYIVHYMDDILLAHPSRSIVDEILTSMIQALNKHGLVVSTEKIQKYDNLKYLGTHIQGDSVSYQKLQIRTDKLRTLNDFQKLLGNINWIRPFLKLTTGELKPLFEILNGDSNPISTRKLTPEACKALQLMNERLSTARVKRLDLSQPWSLCILKTEYTPTACLWQDGVVEWIHLPHISPKVITPYDIFCTQLIIKGRHRSKELFSKDPDYIVVPYTKVQFDLLLQEKEDWPISLLGFLGEVHFHLPKDPLLTFTLQTAIIFPHMTSTTPLEKGIVIFTDGSANGRSVTYIQGREPIIKENTQNTAQQAEIVAVITAFEEVSQPFNLYTDSKYVTGLFPEIETATLSPRTKIYTELKHLQRLIHKRQEKFYIGHIRGHTGLPGPLAQGNAYADSLTRILTAGKRTADGSEFEKRTADGSEFESPKKKAKVE

SEQ ID NO: 3223 - protein, 2022 aa, synthetic construct
MPAAKRVKLDGGDKKYSIGLDIGTNSVGWAVITDEYKVPSKKFKVLGNTDRHSIKKNLIGALLFDSGETAEATRLKRTARRRYTRRKNRICYLQEIFSNEMAKVDDSFFHRLEESFLVEEDKKHERHPIFGNIVDEVAYHEKYPTIYHLRKKLVDSTDKADLRLIYLALAHMIKFRGHFLIEGDLNPDNSDVDKLFIQLVQTYNQLFEENPINASGVDAKAILSARLSKSRRLENLIAQLPGEKKNGLFGNLIALSLGLTPNFKSNFDLAEDAKLQLSKDTYDDDLDNLLAQIGDQYADLFLAAKNLSDAILLSDILRVNTEITKAPLSASMIKRYDEHHQDLTLLKALVRQQLPEKYKEIFFDQSKNGYAGYIDGGASQEEFYKFIKPILEKMDGTEELLVKLNREDLLRKQRTFDNGSIPHQIHLGELHAILRRQEDFYPFLKDNREKIEKILTFRIPYYVGPLARGNSRFAWMTRKSEETITPWNFEEVVDKGASAQSFIERMTNFDKNLPNEKVLPKHSLLYEYFTVYNELTKVKYVTEGMRKPAFLSGEQKKAIVDLLFKTNRKVTVKQLKEDYFKKIECFDSVEISGVEDRFNASLGTYHDLLKIIKDKDFLDNEENEDILEDIVLTLTLFEDREMIEERLKTYAHLFDDKVMKQLKRRRYTGWGRLSRKLINGIRDKQSGKTILDFLKSDGFANRNFMQLIHDDSLTFKEDIQKAQVSGQGDSLHEHIANLAGSPAIKKGILQTVKVVDELVKVMGRHKPENIVIEMARENQTTQKGQKNSRERMKRIEEGIKELGSQILKEHPVENTQLQNEKLYLYYLQNGRDMYVDQELDINRLSDYDVDHIVPQSFLKDDSIDNKVLTRSDKARGKSDNVPSEEVVKKMKNYWRQLLNAKLITQRKFDNLTKAERGGLSELDKAGFIKRQLVETRQITKHVAQILDSRMNTKYDENDKLIREVKVITLKSKLVSDFRKDFQFYKVREINNYHHAHDAYLNAVVGTALIKKYPKLESEFVYGDYKVYDVRKMIAKSEQEIGKATAKYFFYSNIMNFFKTEITLANGEIRKRPLIETNGETGEIVWDKGRDFATVRKVLSMPQVNIVKKTEVQTGGFSKESILPKRNSDKLIARKKDWDPKKYGGFDSPTVAYSVLVVAKVEKGKSKKLKSVKELLGITIMERSSFEKNPIDFLEAKGYKEVKKDLIIKLPKYSLFELENGRKRMLASAGELQKGNELALPSKYVNFLYLASHYEKLKGSPEDNEQKQLFVEQHKHYLDEIIEQISEFSKRVILADANLDKVLSAYNKHRDKPIREQAENIIHLFTLTNLGAPAAFKYFDTTIDRKRYTSTKEVLDATLIHQSITGLYETRIDLSQLGGDGGGGGPAPGSSGGGRDIMKDIKVRLMTDSPDDSQDLMIGAIESNLFADQISWKSDQPVWLNQWPLKQEKLQALQQLVTEQLQLGHLEESNSPWNTPVFVIKKKSGKWRLLQDLRAVNATMHDMGALQPGLPSPVAVPKGWEIIIIDLQDCFFNIKLHPEDCKRFAFSVPSPNFKRPYQRFQWKVLPQGMKNSPTLCQKFVDKAILTVRDKYQDSYIVHYMDDILLAHPSRSIVDEILTSMIQALNKHGLVVSTEKIQKYDNLKYLGTHIQGDSVSYQKLQIRTDKLRTLNDFQKLLGNINWIRPFLKLTTGELKPLFEILNGDSNPISTRKLTPEACKALQLMNERLSTARVKRLDLSQPWSLCILKTEYTPTACLWQDGVVEWIHLPHISPKVITPYDIFCTQLIIKGRHRSKELFSKDPDYIVVPYTKVQFDLLLQEKEDWPISLLGFLGEVHFHLPKDPLLTFTLQTAIIFPHMTSTTPLEKGIVIFTDGSANGRSVTYIQGREPIIKENTQNTAQQAEIVAVITAFEEVSQPFNLYTDSKYVTGLFPEIETATLSPRTKIYTELKHLQRLIHKRQEKFYIGHIRGHTGLPGPLAQGNAYADSLTRILTAGKRTADGSEFEKRTADGSEFESPKKKAKVE

SEQ ID NO: 3224 - protein, 2022 aa, synthetic construct
MPAAKRVKLDGGDKKYSIGLDIGTNSVGWAVITDEYKVPSKKFKVLGNTDRHSIKKNLIGALLFDSGETAEATRLKRTARRRYTRRKNRICYLQEIFSNEMAKVDDSFFHRLEESFLVEEDKKHERHPIFGNIVDEVAYHEKYPTIYHLRKKLVDSTDKADLRLIYLALAHMIKFRGHFLIEGDLNPDNSDVDKLFIQLVQTYNQLFEENPINASGVDAKAILSARLSKSRRLENLIAQLPGEKKNGLFGNLIALSLGLTPNFKSNFDLAEDAKLQLSKDTYDDDLDNLLAQIGDQYADLFLAAKNLSDAILLSDILRVNTEITKAPLSASMIKRYDEHHQDLTLLKALVRQQLPEKYKEIFFDQSKNGYAGYIDGGASQEEFYKFIKPILEKMDGTEELLVKLNREDLLRKQRTFDNGSIPHQIHLGELHAILRRQEDFYPFLKDNREKIEKILTFRIPYYVGPLARGNSRFAWMTRKSEETITPWNFEEVVDKGASAQSFIERMTNFDKNLPNEKVLPKHSLLYEYFTVYNELTKVKYVTEGMRKPAFLSGEQKKAIVDLLFKTNRKVTVKQLKEDYFKKIECFDSVEISGVEDRFNASLGTYHDLLKIIKDKDFLDNEENEDILEDIVLTLTLFEDREMIEERLKTYAHLFDDKVMKQLKRRRYTGWGRLSRKLINGIRDKQSGKTILDFLKSDGFANRNFMQLIHDDSLTFKEDIQKAQVSGQGDSLHEHIANLAGSPAIKKGILQTVKVVDELVKVMGRHKPENIVIEMARENQTTQKGQKNSRERMKRIEEGIKELGSQILKEHPVENTQLQNEKLYLYYLQNGRDMYVDQELDINRLSDYDVDHIVPQSFLKDDSIDNKVLTRSDKARGKSDNVPSEEVVKKMKNYWRQLLNAKLITQRKFDNLTKAERGGLSELDKAGFIKRQLVETRQITKHVAQILDSRMNTKYDENDKLIREVKVITLKSKLVSDFRKDFQFYKVREINNYHHAHDAYLNAVVGTALIKKYPKLESEFVYGDYKVYDVRKMIAKSEQEIGKATAKYFFYSNIMNFFKTEITLANGEIRKRPLIETNGETGEIVWDKGRDFATVRKVLSMPQVNIVKKTEVQTGGFSKESILPKRNSDKLIARKKDWDPKKYGGFDSPTVAYSVLVVAKVEKGKSKKLKSVKELLGITIMERSSFEKNPIDFLEAKGYKEVKKDLIIKLPKYSLFELENGRKRMLASAGELQKGNELALPSKYVNFLYLASHYEKLKGSPEDNEQKQLFVEQHKHYLDEIIEQISEFSKRVILADANLDKVLSAYNKHRDKPIREQAENIIHLFTLTNLGAPAAFKYFDTTIDRKRYTSTKEVLDATLIHQSITGLYETRIDLSQLGGDGGGGSPAPGGGGGGRDIMKDIKVRLMTDSPDDSQDLMIGAIESNLFADQISWKSDQPVWLNQWPLKQEKLQALQQLVTEQLQLGHLEESNSPWNTPVFVIKKKSGKWRLLQDLRAVNATMHDMGALQPGLPSPVAVPKGWEIIIIDLQDCFFNIKLHPEDCKRFAFSVPSPNFKRPYQRFQWKVLPQGMKNSPTLCQKFVDKAILTVRDKYQDSYIVHYMDDILLAHPSRSIVDEILTSMIQALNKHGLVVSTEKIQKYDNLKYLGTHIQGDSVSYQKLQIRTDKLRTLNDFQKLLGNINWIRPFLKLTTGELKPLFEILNGDSNPISTRKLTPEACKALQLMNERLSTARVKRLDLSQPWSLCILKTEYTPTACLWQDGVVEWIHLPHISPKVITPYDIFCTQLIIKGRHRSKELFSKDPDYIVVPYTKVQFDLLLQEKEDWPISLLGFLGEVHFHLPKDPLLTFTLQTAIIFPHMTSTTPLEKGIVIFTDGSANGRSVTYIQGREPIIKENTQNTAQQAEIVAVITAFEEVSQPFNLYTDSKYVTGLFPEIETATLSPRTKIYTELKHLQRLIHKRQEKFYIGHIRGHTGLPGPLAQGNAYADSLTRILTAGKRTADGSEFEKRTADGSEFESPKKKAKVE

SEQ ID NO: 3225 - protein, 2019 aa, synthetic construct
MPAAKRVKLDGGDKKYSIGLDIGTNSVGWAVITDEYKVPSKKFKVLGNTDRHSIKKNLIGALLFDSGETAEATRLKRTARRRYTRRKNRICYLQEIFSNEMAKVDDSFFHRLEESFLVEEDKKHERHPIFGNIVDEVAYHEKYPTIYHLRKKLVDSTDKADLRLIYLALAHMIKFRGHFLIEGDLNPDNSDVDKLFIQLVQTYNQLFEENPINASGVDAKAILSARLSKSRRLENLIAQLPGEKKNGLFGNLIALSLGLTPNFKSNFDLAEDAKLQLSKDTYDDDLDNLLAQIGDQYADLFLAAKNLSDAILLSDILRVNTEITKAPLSASMIKRYDEHHQDLTLLKALVRQQLPEKYKEIFFDQSKNGYAGYIDGGASQEEFYKFIKPILEKMDGTEELLVKLNREDLLRKQRTFDNGSIPHQIHLGELHAILRRQEDFYPFLKDNREKIEKILTFRIPYYVGPLARGNSRFAWMTRKSEETITPWNFEEVVDKGASAQSFIERMTNFDKNLPNEKVLPKHSLLYEYFTVYNELTKVKYVTEGMRKPAFLSGEQKKAIVDLLFKTNRKVTVKQLKEDYFKKIECFDSVEISGVEDRFNASLGTYHDLLKIIKDKDFLDNEENEDILEDIVLTLTLFEDREMIEERLKTYAHLFDDKVMKQLKRRRYTGWGRLSRKLINGIRDKQSGKTILDFLKSDGFANRNFMQLIHDDSLTFKEDIQKAQVSGQGDSLHEHIANLAGSPAIKKGILQTVKVVDELVKVMGRHKPENIVIEMARENQTTQKGQKNSRERMKRIEEGIKELGSQILKEHPVENTQLQNEKLYLYYLQNGRDMYVDQELDINRLSDYDVDHIVPQSFLKDDSIDNKVLTRSDKARGKSDNVPSEEVVKKMKNYWRQLLNAKLITQRKFDNLTKAERGGLSELDKAGFIKRQLVETRQITKHVAQILDSRMNTKYDENDKLIREVKVITLKSKLVSDFRKDFQFYKVREINNYHHAHDAYLNAVVGTALIKKYPKLESEFVYGDYKVYDVRKMIAKSEQEIGKATAKYFFYSNIMNFFKTEITLANGEIRKRPLIETNGETGEIVWDKGRDFATVRKVLSMPQVNIVKKTEVQTGGFSKESILPKRNSDKLIARKKDWDPKKYGGFDSPTVAYSVLVVAKVEKGKSKKLKSVKELLGITIMERSSFEKNPIDFLEAKGYKEVKKDLIIKLPKYSLFELENGRKRMLASAGELQKGNELALPSKYVNFLYLASHYEKLKGSPEDNEQKQLFVEQHKHYLDEIIEQISEFSKRVILADANLDKVLSAYNKHRDKPIREQAENIIHLFTLTNLGAPAAFKYFDTTIDRKRYTSTKEVLDATLIHQSITGLYETRIDLSQLGGDGGGGGGGSGGGRDIMKDIKVRLMTDSPDDSQDLMIGAIESNLFADQISWKSDQPVWLNQWPLKQEKLQALQQLVTEQLQLGHLEESNSPWNTPVFVIKKKSGKWRLLQDLRAVNATMHDMGALQPGLPSPVAVPKGWEIIIIDLQDCFFNIKLHPEDCKRFAFSVPSPNFKRPYQRFQWKVLPQGMKNSPTLCQKFVDKAILTVRDKYQDSYIVHYMDDILLAHPSRSIVDEILTSMIQALNKHGLVVSTEKIQKYDNLKYLGTHIQGDSVSYQKLQIRTDKLRTLNDFQKLLGNINWIRPFLKLTTGELKPLFEILNGDSNPISTRKLTPEACKALQLMNERLSTARVKRLDLSQPWSLCILKTEYTPTACLWQDGVVEWIHLPHISPKVITPYDIFCTQLIIKGRHRSKELFSKDPDYIVVPYTKVQFDLLLQEKEDWPISLLGFLGEVHFHLPKDPLLTFTLQTAIIFPHMTSTTPLEKGIVIFTDGSANGRSVTYIQGREPIIKENTQNTAQQAEIVAVITAFEEVSQPFNLYTDSKYVTGLFPEIETATLSPRTKIYTELKHLQRLIHKRQEKFYIGHIRGHTGLPGPLAQGNAYADSLTRILTAGKRTADGSEFEKRTADGSEFESPKKKAKVE

SEQ ID NO: 3226 - protein, 2024 aa, synthetic construct
MPAAKRVKLDGGDKKYSIGLDIGTNSVGWAVITDEYKVPSKKFKVLGNTDRHSIKKNLIGALLFDSGETAEATRLKRTARRRYTRRKNRICYLQEIFSNEMAKVDDSFFHRLEESFLVEEDKKHERHPIFGNIVDEVAYHEKYPTIYHLRKKLVDSTDKADLRLIYLALAHMIKFRGHFLIEGDLNPDNSDVDKLFIQLVQTYNQLFEENPINASGVDAKAILSARLSKSRRLENLIAQLPGEKKNGLFGNLIALSLGLTPNFKSNFDLAEDAKLQLSKDTYDDDLDNLLAQIGDQYADLFLAAKNLSDAILLSDILRVNTEITKAPLSASMIKRYDEHHQDLTLLKALVRQQLPEKYKEIFFDQSKNGYAGYIDGGASQEEFYKFIKPILEKMDGTEELLVKLNREDLLRKQRTFDNGSIPHQIHLGELHAILRRQEDFYPFLKDNREKIEKILTFRIPYYVGPLARGNSRFAWMTRKSEETITPWNFEEVVDKGASAQSFIERMTNFDKNLPNEKVLPKHSLLYEYFTVYNELTKVKYVTEGMRKPAFLSGEQKKAIVDLLFKTNRKVTVKQLKEDYFKKIECFDSVEISGVEDRFNASLGTYHDLLKIIKDKDFLDNEENEDILEDIVLTLTLFEDREMIEERLKTYAHLFDDKVMKQLKRRRYTGWGRLSRKLINGIRDKQSGKTILDFLKSDGFANRNFMQLIHDDSLTFKEDIQKAQVSGQGDSLHEHIANLAGSPAIKKGILQTVKVVDELVKVMGRHKPENIVIEMARENQTTQKGQKNSRERMKRIEEGIKELGSQILKEHPVENTQLQNEKLYLYYLQNGRDMYVDQELDINRLSDYDVDHIVPQSFLKDDSIDNKVLTRSDKARGKSDNVPSEEVVKKMKNYWRQLLNAKLITQRKFDNLTKAERGGLSELDKAGFIKRQLVETRQITKHVAQILDSRMNTKYDENDKLIREVKVITLKSKLVSDFRKDFQFYKVREINNYHHAHDAYLNAVVGTALIKKYPKLESEFVYGDYKVYDVRKMIAKSEQEIGKATAKYFFYSNIMNFFKTEITLANGEIRKRPLIETNGETGEIVWDKGRDFATVRKVLSMPQVNIVKKTEVQTGGFSKESILPKRNSDKLIARKKDWDPKKYGGFDSPTVAYSVLVVAKVEKGKSKKLKSVKELLGITIMERSSFEKNPIDFLEAKGYKEVKKDLIIKLPKYSLFELENGRKRMLASAGELQKGNELALPSKYVNFLYLASHYEKLKGSPEDNEQKQLFVEQHKHYLDEIIEQISEFSKRVILADANLDKVLSAYNKHRDKPIREQAENIIHLFTLTNLGAPAAFKYFDTTIDRKRYTSTKEVLDATLIHQSITGLYETRIDLSQLGGDGGEAAAKGGGGGSGGGRDIMKDIKVRLMTDSPDDSQDLMIGAIESNLFADQISWKSDQPVWLNQWPLKQEKLQALQQLVTEQLQLGHLEESNSPWNTPVFVIKKKSGKWRLLQDLRAVNATMHDMGALQPGLPSPVAVPKGWEIIIIDLQDCFFNIKLHPEDCKRFAFSVPSPNFKRPYQRFQWKVLPQGMKNSPTLCQKFVDKAILTVRDKYQDSYIVHYMDDILLAHPSRSIVDEILTSMIQALNKHGLVVSTEKIQKYDNLKYLGTHIQGDSVSYQKLQIRTDKLRTLNDFQKLLGNINWIRPFLKLTTGELKPLFEILNGDSNPISTRKLTPEACKALQLMNERLSTARVKRLDLSQPWSLCILKTEYTPTACLWQDGVVEWIHLPHISPKVITPYDIFCTQLIIKGRHRSKELFSKDPDYIVVPYTKVQFDLLLQEKEDWPISLLGFLGEVHFHLPKDPLLTFTLQTAIIFPHMTSTTPLEKGIVIFTDGSANGRSVTYIQGREPIIKENTQNTAQQAEIVAVITAFEEVSQPFNLYTDSKYVTGLFPEIETATLSPRTKIYTELKHLQRLIHKRQEKFYIGHIRGHTGLPGPLAQGNAYADSLTRILTAGKRTADGSEFEKRTADGSEFESPKKKAKVE

SEQ ID NO: 3227 - protein, 2019 aa, synthetic construct
MPAAKRVKLDGGDKKYSIGLDIGTNSVGWAVITDEYKVPSKKFKVLGNTDRHSIKKNLIGALLFDSGETAEATRLKRTARRRYTRRKNRICYLQEIFSNEMAKVDDSFFHRLEESFLVEEDKKHERHPIFGNIVDEVAYHEKYPTIYHLRKKLVDSTDKADLRLIYLALAHMIKFRGHFLIEGDLNPDNSDVDKLFIQLVQTYNQLFEENPINASGVDAKAILSARLSKSRRLENLIAQLPGEKKNGLFGNLIALSLGLTPNFKSNFDLAEDAKLQLSKDTYDDDLDNLLAQIGDQYADLFLAAKNLSDAILLSDILRVNTEITKAPLSASMIKRYDEHHQDLTLLKALVRQQLPEKYKEIFFDQSKNGYAGYIDGGASQEEFYKFIKPILEKMDGTEELLVKLNREDLLRKQRTFDNGSIPHQIHLGELHAILRRQEDFYPFLKDNREKIEKILTFRIPYYVGPLARGNSRFAWMTRKSEETITPWNFEEVVDKGASAQSFIERMTNFDKNLPNEKVLPKHSLLYEYFTVYNELTKVKYVTEGMRKPAFLSGEQKKAIVDLLFKTNRKVTVKQLKEDYFKKIECFDSVEISGVEDRFNASLGTYHDLLKIIKDKDFLDNEENEDILEDIVLTLTLFEDREMIEERLKTYAHLFDDKVMKQLKRRRYTGWGRLSRKLINGIRDKQSGKTILDFLKSDGFANRNFMQLIHDDSLTFKEDIQKAQVSGQGDSLHEHIANLAGSPAIKKGILQTVKVVDELVKVMGRHKPENIVIEMARENQTTQKGQKNSRERMKRIEEGIKELGSQILKEHPVENTQLQNEKLYLYYLQNGRDMYVDQELDINRLSDYDVDHIVPQSFLKDDSIDNKVLTRSDKARGKSDNVPSEEVVKKMKNYWRQLLNAKLITQRKFDNLTKAERGGLSELDKAGFIKRQLVETRQITKHVAQILDSRMNTKYDENDKLIREVKVITLKSKLVSDFRKDFQFYKVREINNYHHAHDAYLNAVVGTALIKKYPKLESEFVYGDYKVYDVRKMIAKSEQEIGKATAKYFFYSNIMNFFKTEITLANGEIRKRPLIETNGETGEIVWDKGRDFATVRKVLSMPQVNIVKKTEVQTGGFSKESILPKRNSDKLIARKKDWDPKKYGGFDSPTVAYSVLVVAKVEKGKSKKLKSVKELLGITIMERSSFEKNPIDFLEAKGYKEVKKDLIIKLPKYSLFELENGRKRMLASAGELQKGNELALPSKYVNFLYLASHYEKLKGSPEDNEQKQLFVEQHKHYLDEIIEQISEFSKRVILADANLDKVLSAYNKHRDKPIREQAENIIHLFTLTNLGAPAAFKYFDTTIDRKRYTSTKEVLDATLIHQSITGLYETRIDLSQLGGDGGGGSPAPGGGRDIMKDIKVRLMTDSPDDSQDLMIGAIESNLFADQISWKSDQPVWLNQWPLKQEKLQALQQLVTEQLQLGHLEESNSPWNTPVFVIKKKSGKWRLLQDLRAVNATMHDMGALQPGLPSPVAVPKGWEIIIIDLQDCFFNIKLHPEDCKRFAFSVPSPNFKRPYQRFQWKVLPQGMKNSPTLCQKFVDKAILTVRDKYQDSYIVHYMDDILLAHPSRSIVDEILTSMIQALNKHGLVVSTEKIQKYDNLKYLGTHIQGDSVSYQKLQIRTDKLRTLNDFQKLLGNINWIRPFLKLTTGELKPLFEILNGDSNPISTRKLTPEACKALQLMNERLSTARVKRLDLSQPWSLCILKTEYTPTACLWQDGVVEWIHLPHISPKVITPYDIFCTQLIIKGRHRSKELFSKDPDYIVVPYTKVQFDLLLQEKEDWPISLLGFLGEVHFHLPKDPLLTFTLQTAIIFPHMTSTTPLEKGIVIFTDGSANGRSVTYIQGREPIIKENTQNTAQQAEIVAVITAFEEVSQPFNLYTDSKYVTGLFPEIETATLSPRTKIYTELKHLQRLIHKRQEKFYIGHIRGHTGLPGPLAQGNAYADSLTRILTAGKRTADGSEFEKRTADGSEFESPKKKAKVE

SEQ ID NO: 3228 - protein, 2024 aa, synthetic construct
MPAAKRVKLDGGDKKYSIGLDIGTNSVGWAVITDEYKVPSKKFKVLGNTDRHSIKKNLIGALLFDSGETAEATRLKRTARRRYTRRKNRICYLQEIFSNEMAKVDDSFFHRLEESFLVEEDKKHERHPIFGNIVDEVAYHEKYPTIYHLRKKLVDSTDKADLRLIYLALAHMIKFRGHFLIEGDLNPDNSDVDKLFIQLVQTYNQLFEENPINASGVDAKAILSARLSKSRRLENLIAQLPGEKKNGLFGNLIALSLGLTPNFKSNFDLAEDAKLQLSKDTYDDDLDNLLAQIGDQYADLFLAAKNLSDAILLSDILRVNTEITKAPLSASMIKRYDEHHQDLTLLKALVRQQLPEKYKEIFFDQSKNGYAGYIDGGASQEEFYKFIKPILEKMDGTEELLVKLNREDLLRKQRTFDNGSIPHQIHLGELHAILRRQEDFYPFLKDNREKIEKILTFRIPYYVGPLARGNSRFAWMTRKSEETITPWNFEEVVDKGASAQSFIERMTNFDKNLPNEKVLPKHSLLYEYFTVYNELTKVKYVTEGMRKPAFLSGEQKKAIVDLLFKTNRKVTVKQLKEDYFKKIECFDSVEISGVEDRFNASLGTYHDLLKIIKDKDFLDNEENEDILEDIVLTLTLFEDREMIEERLKTYAHLFDDKVMKQLKRRRYTGWGRLSRKLINGIRDKQSGKTILDFLKSDGFANRNFMQLIHDDSLTFKEDIQKAQVSGQGDSLHEHIANLAGSPAIKKGILQTVKVVDELVKVMGRHKPENIVIEMARENQTTQKGQKNSRERMKRIEEGIKELGSQILKEHPVENTQLQNEKLYLYYLQNGRDMYVDQELDINRLSDYDVDHIVPQSFLKDDSIDNKVLTRSDKARGKSDNVPSEEVVKKMKNYWRQLLNAKLITQRKFDNLTKAERGGLSELDKAGFIKRQLVETRQITKHVAQILDSRMNTKYDENDKLIREVKVITLKSKLVSDFRKDFQFYKVREINNYHHAHDAYLNAVVGTALIKKYPKLESEFVYGDYKVYDVRKMIAKSEQEIGKATAKYFFYSNIMNFFKTEITLANGEIRKRPLIETNGETGEIVWDKGRDFATVRKVLSMPQVNIVKKTEVQTGGFSKESILPKRNSDKLIARKKDWDPKKYGGFDSPTVAYSVLVVAKVEKGKSKKLKSVKELLGITIMERSSFEKNPIDFLEAKGYKEVKKDLIIKLPKYSLFELENGRKRMLASAGELQKGNELALPSKYVNFLYLASHYEKLKGSPEDNEQKQLFVEQHKHYLDEIIEQISEFSKRVILADANLDKVLSAYNKHRDKPIREQAENIIHLFTLTNLGAPAAFKYFDTTIDRKRYTSTKEVLDATLIHQSITGLYETRIDLSQLGGDGGEAAAKGGSGGGGGGRDIMKDIKVRLMTDSPDDSQDLMIGAIESNLFADQISWKSDQPVWLNQWPLKQEKLQALQQLVTEQLQLGHLEESNSPWNTPVFVIKKKSGKWRLLQDLRAVNATMHDMGALQPGLPSPVAVPKGWEIIIIDLQDCFFNIKLHPEDCKRFAFSVPSPNFKRPYQRFQWKVLPQGMKNSPTLCQKFVDKAILTVRDKYQDSYIVHYMDDILLAHPSRSIVDEILTSMIQALNKHGLVVSTEKIQKYDNLKYLGTHIQGDSVSYQKLQIRTDKLRTLNDFQKLLGNINWIRPFLKLTTGELKPLFEILNGDSNPISTRKLTPEACKALQLMNERLSTARVKRLDLSQPWSLCILKTEYTPTACLWQDGVVEWIHLPHISPKVITPYDIFCTQLIIKGRHRSKELFSKDPDYIVVPYTKVQFDLLLQEKEDWPISLLGFLGEVHFHLPKDPLLTFTLQTAIIFPHMTSTTPLEKGIVIFTDGSANGRSVTYIQGREPIIKENTQNTAQQAEIVAVITAFEEVSQPFNLYTDSKYVTGLFPEIETATLSPRTKIYTELKHLQRLIHKRQEKFYIGHIRGHTGLPGPLAQGNAYADSLTRILTAGKRTADGSEFEKRTADGSEFESPKKKAKVE

SEQ ID NO: 3229 - protein, 2022 aa, synthetic construct
MPAAKRVKLDGGDKKYSIGLDIGTNSVGWAVITDEYKVPSKKFKVLGNTDRHSIKKNLIGALLFDSGETAEATRLKRTARRRYTRRKNRICYLQEIFSNEMAKVDDSFFHRLEESFLVEEDKKHERHPIFGNIVDEVAYHEKYPTIYHLRKKLVDSTDKADLRLIYLALAHMIKFRGHFLIEGDLNPDNSDVDKLFIQLVQTYNQLFEENPINASGVDAKAILSARLSKSRRLENLIAQLPGEKKNGLFGNLIALSLGLTPNFKSNFDLAEDAKLQLSKDTYDDDLDNLLAQIGDQYADLFLAAKNLSDAILLSDILRVNTEITKAPLSASMIKRYDEHHQDLTLLKALVRQQLPEKYKEIFFDQSKNGYAGYIDGGASQEEFYKFIKPILEKMDGTEELLVKLNREDLLRKQRTFDNGSIPHQIHLGELHAILRRQEDFYPFLKDNREKIEKILTFRIPYYVGPLARGNSRFAWMTRKSEETITPWNFEEVVDKGASAQSFIERMTNFDKNLPNEKVLPKHSLLYEYFTVYNELTKVKYVTEGMRKPAFLSGEQKKAIVDLLFKTNRKVTVKQLKEDYFKKIECFDSVEISGVEDRFNASLGTYHDLLKIIKDKDFLDNEENEDILEDIVLTLTLFEDREMIEERLKTYAHLFDDKVMKQLKRRRYTGWGRLSRKLINGIRDKQSGKTILDFLKSDGFANRNFMQLIHDDSLTFKEDIQKAQVSGQGDSLHEHIANLAGSPAIKKGILQTVKVVDELVKVMGRHKPENIVIEMARENQTTQKGQKNSRERMKRIEEGIKELGSQILKEHPVENTQLQNEKLYLYYLQNGRDMYVDQELDINRLSDYDVDHIVPQSFLKDDSIDNKVLTRSDKARGKSDNVPSEEVVKKMKNYWRQLLNAKLITQRKFDNLTKAERGGLSELDKAGFIKRQLVETRQITKHVAQILDSRMNTKYDENDKLIREVKVITLKSKLVSDFRKDFQFYKVREINNYHHAHDAYLNAVVGTALIKKYPKLESEFVYGDYKVYDVRKMIAKSEQEIGKATAKYFFYSNIMNFFKTEITLANGEIRKRPLIETNGETGEIVWDKGRDFATVRKVLSMPQVNIVKKTEVQTGGFSKESILPKRNSDKLIARKKDWDPKKYGGFDSPTVAYSVLVVAKVEKGKSKKLKSVKELLGITIMERSSFEKNPIDFLEAKGYKEVKKDLIIKLPKYSLFELENGRKRMLASAGELQKGNELALPSKYVNFLYLASHYEKLKGSPEDNEQKQLFVEQHKHYLDEIIEQISEFSKRVILADANLDKVLSAYNKHRDKPIREQAENIIHLFTLTNLGAPAAFKYFDTTIDRKRYTSTKEVLDATLIHQSITGLYETRIDLSQLGGDGGGGSPAPGSSGGGRDIMKDIKVRLMTDSPDDSQDLMIGAIESNLFADQISWKSDQPVWLNQWPLKQEKLQALQQLVTEQLQLGHLEESNSPWNTPVFVIKKKSGKWRLLQDLRAVNATMHDMGALQPGLPSPVAVPKGWEIIIIDLQDCFFNIKLHPEDCKRFAFSVPSPNFKRPYQRFQWKVLPQGMKNSPTLCQKFVDKAILTVRDKYQDSYIVHYMDDILLAHPSRSIVDEILTSMIQALNKHGLVVSTEKIQKYDNLKYLGTHIQGDSVSYQKLQIRTDKLRTLNDFQKLLGNINWIRPFLKLTTGELKPLFEILNGDSNPISTRKLTPEACKALQLMNERLSTARVKRLDLSQPWSLCILKTEYTPTACLWQDGVVEWIHLPHISPKVITPYDIFCTQLIIKGRHRSKELFSKDPDYIVVPYTKVQFDLLLQEKEDWPISLLGFLGEVHFHLPKDPLLTFTLQTAIIFPHMTSTTPLEKGIVIFTDGSANGRSVTYIQGREPIIKENTQNTAQQAEIVAVITAFEEVSQPFNLYTDSKYVTGLFPEIETATLSPRTKIYTELKHLQRLIHKRQEKFYIGHIRGHTGLPGPLAQGNAYADSLTRILTAGKRTADGSEFEKRTADGSEFESPKKKAKVE

SEQ ID NO: 3230 - protein, 2024 aa, synthetic construct
MPAAKRVKLDGGDKKYSIGLDIGTNSVGWAVITDEYKVPSKKFKVLGNTDRHSIKKNLIGALLFDSGETAEATRLKRTARRRYTRRKNRICYLQEIFSNEMAKVDDSFFHRLEESFLVEEDKKHERHPIFGNIVDEVAYHEKYPTIYHLRKKLVDSTDKADLRLIYLALAHMIKFRGHFLIEGDLNPDNSDVDKLFIQLVQTYNQLFEENPINASGVDAKAILSARLSKSRRLENLIAQLPGEKKNGLFGNLIALSLGLTPNFKSNFDLAEDAKLQLSKDTYDDDLDNLLAQIGDQYADLFLAAKNLSDAILLSDILRVNTEITKAPLSASMIKRYDEHHQDLTLLKALVRQQLPEKYKEIFFDQSKNGYAGYIDGGASQEEFYKFIKPILEKMDGTEELLVKLNREDLLRKQRTFDNGSIPHQIHLGELHAILRRQEDFYPFLKDNREKIEKILTFRIPYYVGPLARGNSRFAWMTRKSEETITPWNFEEVVDKGASAQSFIERMTNFDKNLPNEKVLPKHSLLYEYFTVYNELTKVKYVTEGMRKPAFLSGEQKKAIVDLLFKTNRKVTVKQLKEDYFKKIECFDSVEISGVEDRFNASLGTYHDLLKIIKDKDFLDNEENEDILEDIVLTLTLFEDREMIEERLKTYAHLFDDKVMKQLKRRRYTGWGRLSRKLINGIRDKQSGKTILDFLKSDGFANRNFMQLIHDDSLTFKEDIQKAQVSGQGDSLHEHIANLAGSPAIKKGILQTVKVVDELVKVMGRHKPENIVIEMARENQTTQKGQKNSRERMKRIEEGIKELGSQILKEHPVENTQLQNEKLYLYYLQNGRDMYVDQELDINRLSDYDVDHIVPQSFLKDDSIDNKVLTRSDKARGKSDNVPSEEVVKKMKNYWRQLLNAKLITQRKFDNLTKAERGGLSELDKAGFIKRQLVETRQITKHVAQILDSRMNTKYDENDKLIREVKVITLKSKLVSDFRKDFQFYKVREINNYHHAHDAYLNAVVGTALIKKYPKLESEFVYGDYKVYDVRKMIAKSEQEIGKATAKYFFYSNIMNFFKTEITLANGEIRKRPLIETNGETGEIVWDKGRDFATVRKVLSMPQVNIVKKTEVQTGGFSKESILPKRNSDKLIARKKDWDPKKYGGFDSPTVAYSVLVVAKVEKGKSKKLKSVKELLGITIMERSSFEKNPIDFLEAKGYKEVKKDLIIKLPKYSLFELENGRKRMLASAGELQKGNELALPSKYVNFLYLASHYEKLKGSPEDNEQKQLFVEQHKHYLDEIIEQISEFSKRVILADANLDKVLSAYNKHRDKPIREQAENIIHLFTLTNLGAPAAFKYFDTTIDRKRYTSTKEVLDATLIHQSITGLYETRIDLSQLGGDGGEAAAKGGSGSSGGGRDIMKDIKVRLMTDSPDDSQDLMIGAIESNLFADQISWKSDQPVWLNQWPLKQEKLQALQQLVTEQLQLGHLEESNSPWNTPVFVIKKKSGKWRLLQDLRAVNATMHDMGALQPGLPSPVAVPKGWEIIIIDLQDCFFNIKLHPEDCKRFAFSVPSPNFKRPYQRFQWKVLPQGMKNSPTLCQKFVDKAILTVRDKYQDSYIVHYMDDILLAHPSRSIVDEILTSMIQALNKHGLVVSTEKIQKYDNLKYLGTHIQGDSVSYQKLQIRTDKLRTLNDFQKLLGNINWIRPFLKLTTGELKPLFEILNGDSNPISTRKLTPEACKALQLMNERLSTARVKRLDLSQPWSLCILKTEYTPTACLWQDGVVEWIHLPHISPKVITPYDIFCTQLIIKGRHRSKELFSKDPDYIVVPYTKVQFDLLLQEKEDWPISLLGFLGEVHFHLPKDPLLTFTLQTAIIFPHMTSTTPLEKGIVIFTDGSANGRSVTYIQGREPIIKENTQNTAQQAEIVAVITAFEEVSQPFNLYTDSKYVTGLFPEIETATLSPRTKIYTELKHLQRLIHKRQEKFYIGHIRGHTGLPGPLAQGNAYADSLTRILTAGKRTADGSEFEKRTADGSEFESPKKKAKVE

SEQ ID NO: 3231 - protein, 2022 aa, synthetic construct
MPAAKRVKLDGGDKKYSIGLDIGTNSVGWAVITDEYKVPSKKFKVLGNTDRHSIKKNLIGALLFDSGETAEATRLKRTARRRYTRRKNRICYLQEIFSNEMAKVDDSFFHRLEESFLVEEDKKHERHPIFGNIVDEVAYHEKYPTIYHLRKKLVDSTDKADLRLIYLALAHMIKFRGHFLIEGDLNPDNSDVDKLFIQLVQTYNQLFEENPINASGVDAKAILSARLSKSRRLENLIAQLPGEKKNGLFGNLIALSLGLTPNFKSNFDLAEDAKLQLSKDTYDDDLDNLLAQIGDQYADLFLAAKNLSDAILLSDILRVNTEITKAPLSASMIKRYDEHHQDLTLLKALVRQQLPEKYKEIFFDQSKNGYAGYIDGGASQEEFYKFIKPILEKMDGTEELLVKLNREDLLRKQRTFDNGSIPHQIHLGELHAILRRQEDFYPFLKDNREKIEKILTFRIPYYVGPLARGNSRFAWMTRKSEETITPWNFEEVVDKGASAQSFIERMTNFDKNLPNEKVLPKHSLLYEYFTVYNELTKVKYVTEGMRKPAFLSGEQKKAIVDLLFKTNRKVTVKQLKEDYFKKIECFDSVEISGVEDRFNASLGTYHDLLKIIKDKDFLDNEENEDILEDIVLTLTLFEDREMIEERLKTYAHLFDDKVMKQLKRRRYTGWGRLSRKLINGIRDKQSGKTILDFLKSDGFANRNFMQLIHDDSLTFKEDIQKAQVSGQGDSLHEHIANLAGSPAIKKGILQTVKVVDELVKVMGRHKPENIVIEMARENQTTQKGQKNSRERMKRIEEGIKELGSQILKEHPVENTQLQNEKLYLYYLQNGRDMYVDQELDINRLSDYDVDHIVPQSFLKDDSIDNKVLTRSDKARGKSDNVPSEEVVKKMKNYWRQLLNAKLITQRKFDNLTKAERGGLSELDKAGFIKRQLVETRQITKHVAQILDSRMNTKYDENDKLIREVKVITLKSKLVSDFRKDFQFYKVREINNYHHAHDAYLNAVVGTALIKKYPKLESEFVYGDYKVYDVRKMIAKSEQEIGKATAKYFFYSNIMNFFKTEITLANGEIRKRPLIETNGETGEIVWDKGRDFATVRKVLSMPQVNIVKKTEVQTGGFSKESILPKRNSDKLIARKKDWDPKKYGGFDSPTVAYSVLVVAKVEKGKSKKLKSVKELLGITIMERSSFEKNPIDFLEAKGYKEVKKDLIIKLPKYSLFELENGRKRMLASAGELQKGNELALPSKYVNFLYLASHYEKLKGSPEDNEQKQLFVEQHKHYLDEIIEQISEFSKRVILADANLDKVLSAYNKHRDKPIREQAENIIHLFTLTNLGAPAAFKYFDTTIDRKRYTSTKEVLDATLIHQSITGLYETRIDLSQLGGDGGGGGGSSPAPGGGRDIMKDIKVRLMTDSPDDSQDLMIGAIESNLFADQISWKSDQPVWLNQWPLKQEKLQALQQLVTEQLQLGHLEESNSPWNTPVFVIKKKSGKWRLLQDLRAVNATMHDMGALQPGLPSPVAVPKGWEIIIIDLQDCFFNIKLHPEDCKRFAFSVPSPNFKRPYQRFQWKVLPQGMKNSPTLCQKFVDKAILTVRDKYQDSYIVHYMDDILLAHPSRSIVDEILTSMIQALNKHGLVVSTEKIQKYDNLKYLGTHIQGDSVSYQKLQIRTDKLRTLNDFQKLLGNINWIRPFLKLTTGELKPLFEILNGDSNPISTRKLTPEACKALQLMNERLSTARVKRLDLSQPWSLCILKTEYTPTACLWQDGVVEWIHLPHISPKVITPYDIFCTQLIIKGRHRSKELFSKDPDYIVVPYTKVQFDLLLQEKEDWPISLLGFLGEVHFHLPKDPLLTFTLQTAIIFPHMTSTTPLEKGIVIFTDGSANGRSVTYIQGREPIIKENTQNTAQQAEIVAVITAFEEVSQPFNLYTDSKYVTGLFPEIETATLSPRTKIYTELKHLQRLIHKRQEKFYIGHIRGHTGLPGPLAQGNAYADSLTRILTAGKRTADGSEFEKRTADGSEFESPKKKAKVE

SEQ ID NO: 3232 - protein, 2024 aa, synthetic construct
MPAAKRVKLDGGDKKYSIGLDIGTNSVGWAVITDEYKVPSKKFKVLGNTDRHSIKKNLIGALLFDSGETAEATRLKRTARRRYTRRKNRICYLQEIFSNEMAKVDDSFFHRLEESFLVEEDKKHERHPIFGNIVDEVAYHEKYPTIYHLRKKLVDSTDKADLRLIYLALAHMIKFRGHFLIEGDLNPDNSDVDKLFIQLVQTYNQLFEENPINASGVDAKAILSARLSKSRRLENLIAQLPGEKKNGLFGNLIALSLGLTPNFKSNFDLAEDAKLQLSKDTYDDDLDNLLAQIGDQYADLFLAAKNLSDAILLSDILRVNTEITKAPLSASMIKRYDEHHQDLTLLKALVRQQLPEKYKEIFFDQSKNGYAGYIDGGASQEEFYKFIKPILEKMDGTEELLVKLNREDLLRKQRTFDNGSIPHQIHLGELHAILRRQEDFYPFLKDNREKIEKILTFRIPYYVGPLARGNSRFAWMTRKSEETITPWNFEEVVDKGASAQSFIERMTNFDKNLPNEKVLPKHSLLYEYFTVYNELTKVKYVTEGMRKPAFLSGEQKKAIVDLLFKTNRKVTVKQLKEDYFKKIECFDSVEISGVEDRFNASLGTYHDLLKIIKDKDFLDNEENEDILEDIVLTLTLFEDREMIEERLKTYAHLFDDKVMKQLKRRRYTGWGRLSRKLINGIRDKQSGKTILDFLKSDGFANRNFMQLIHDDSLTFKEDIQKAQVSGQGDSLHEHIANLAGSPAIKKGILQTVKVVDELVKVMGRHKPENIVIEMARENQTTQKGQKNSRERMKRIEEGIKELGSQILKEHPVENTQLQNEKLYLYYLQNGRDMYVDQELDINRLSDYDVDHIVPQSFLKDDSIDNKVLTRSDKARGKSDNVPSEEVVKKMKNYWRQLLNAKLITQRKFDNLTKAERGGLSELDKAGFIKRQLVETRQITKHVAQILDSRMNTKYDENDKLIREVKVITLKSKLVSDFRKDFQFYKVREINNYHHAHDAYLNAVVGTALIKKYPKLESEFVYGDYKVYDVRKMIAKSEQEIGKATAKYFFYSNIMNFFKTEITLANGEIRKRPLIETNGETGEIVWDKGRDFATVRKVLSMPQVNIVKKTEVQTGGFSKESILPKRNSDKLIARKKDWDPKKYGGFDSPTVAYSVLVVAKVEKGKSKKLKSVKELLGITIMERSSFEKNPIDFLEAKGYKEVKKDLIIKLPKYSLFELENGRKRMLASAGELQKGNELALPSKYVNFLYLASHYEKLKGSPEDNEQKQLFVEQHKHYLDEIIEQISEFSKRVILADANLDKVLSAYNKHRDKPIREQAENIIHLFTLTNLGAPAAFKYFDTTIDRKRYTSTKEVLDATLIHQSITGLYETRIDLSQLGGDGGGSSPAPEAAAKGGGRDIMKDIKVRLMTDSPDDSQDLMIGAIESNLFADQISWKSDQPVWLNQWPLKQEKLQALQQLVTEQLQLGHLEESNSPWNTPVFVIKKKSGKWRLLQDLRAVNATMHDMGALQPGLPSPVAVPKGWEIIIIDLQDCFFNIKLHPEDCKRFAFSVPSPNFKRPYQRFQWKVLPQGMKNSPTLCQKFVDKAILTVRDKYQDSYIVHYMDDILLAHPSRSIVDEILTSMIQALNKHGLVVSTEKIQKYDNLKYLGTHIQGDSVSYQKLQIRTDKLRTLNDFQKLLGNINWIRPFLKLTTGELKPLFEILNGDSNPISTRKLTPEACKALQLMNERLSTARVKRLDLSQPWSLCILKTEYTPTACLWQDGVVEWIHLPHISPKVITPYDIFCTQLIIKGRHRSKELFSKDPDYIVVPYTKVQFDLLLQEKEDWPISLLGFLGEVHFHLPKDPLLTFTLQTAIIFPHMTSTTPLEKGIVIFTDGSANGRSVTYIQGREPIIKENTQNTAQQAEIVAVITAFEEVSQPFNLYTDSKYVTGLFPEIETATLSPRTKIYTELKHLQRLIHKRQEKFYIGHIRGHTGLPGPLAQGNAYADSLTRILTAGKRTADGSEFEKRTADGSEFESPKKKAKVE

SEQ ID NO: 3233 - protein, 2022 aa, synthetic construct
MPAAKRVKLDGGDKKYSIGLDIGTNSVGWAVITDEYKVPSKKFKVLGNTDRHSIKKNLIGALLFDSGETAEATRLKRTARRRYTRRKNRICYLQEIFSNEMAKVDDSFFHRLEESFLVEEDKKHERHPIFGNIVDEVAYHEKYPTIYHLRKKLVDSTDKADLRLIYLALAHMIKFRGHFLIEGDLNPDNSDVDKLFIQLVQTYNQLFEENPINASGVDAKAILSARLSKSRRLENLIAQLPGEKKNGLFGNLIALSLGLTPNFKSNFDLAEDAKLQLSKDTYDDDLDNLLAQIGDQYADLFLAAKNLSDAILLSDILRVNTEITKAPLSASMIKRYDEHHQDLTLLKALVRQQLPEKYKEIFFDQSKNGYAGYIDGGASQEEFYKFIKPILEKMDGTEELLVKLNREDLLRKQRTFDNGSIPHQIHLGELHAILRRQEDFYPFLKDNREKIEKILTFRIPYYVGPLARGNSRFAWMTRKSEETITPWNFEEVVDKGASAQSFIERMTNFDKNLPNEKVLPKHSLLYEYFTVYNELTKVKYVTEGMRKPAFLSGEQKKAIVDLLFKTNRKVTVKQLKEDYFKKIECFDSVEISGVEDRFNASLGTYHDLLKIIKDKDFLDNEENEDILEDIVLTLTLFEDREMIEERLKTYAHLFDDKVMKQLKRRRYTGWGRLSRKLINGIRDKQSGKTILDFLKSDGFANRNFMQLIHDDSLTFKEDIQKAQVSGQGDSLHEHIANLAGSPAIKKGILQTVKVVDELVKVMGRHKPENIVIEMARENQTTQKGQKNSRERMKRIEEGIKELGSQILKEHPVENTQLQNEKLYLYYLQNGRDMYVDQELDINRLSDYDVDHIVPQSFLKDDSIDNKVLTRSDKARGKSDNVPSEEVVKKMKNYWRQLLNAKLITQRKFDNLTKAERGGLSELDKAGFIKRQLVETRQITKHVAQILDSRMNTKYDENDKLIREVKVITLKSKLVSDFRKDFQFYKVREINNYHHAHDAYLNAVVGTALIKKYPKLESEFVYGDYKVYDVRKMIAKSEQEIGKATAKYFFYSNIMNFFKTEITLANGEIRKRPLIETNGETGEIVWDKGRDFATVRKVLSMPQVNIVKKTEVQTGGFSKESILPKRNSDKLIARKKDWDPKKYGGFDSPTVAYSVLVVAKVEKGKSKKLKSVKELLGITIMERSSFEKNPIDFLEAKGYKEVKKDLIIKLPKYSLFELENGRKRMLASAGELQKGNELALPSKYVNFLYLASHYEKLKGSPEDNEQKQLFVEQHKHYLDEIIEQISEFSKRVILADANLDKVLSAYNKHRDKPIREQAENIIHLFTLTNLGAPAAFKYFDTTIDRKRYTSTKEVLDATLIHQSITGLYETRIDLSQLGGDGGPAPGGGGSSGGGRDIMKDIKVRLMTDSPDDSQDLMIGAIESNLFADQISWKSDQPVWLNQWPLKQEKLQALQQLVTEQLQLGHLEESNSPWNTPVFVIKKKSGKWRLLQDLRAVNATMHDMGALQPGLPSPVAVPKGWEIIIIDLQDCFFNIKLHPEDCKRFAFSVPSPNFKRPYQRFQWKVLPQGMKNSPTLCQKFVDKAILTVRDKYQDSYIVHYMDDILLAHPSRSIVDEILTSMIQALNKHGLVVSTEKIQKYDNLKYLGTHIQGDSVSYQKLQIRTDKLRTLNDFQKLLGNINWIRPFLKLTTGELKPLFEILNGDSNPISTRKLTPEACKALQLMNERLSTARVKRLDLSQPWSLCILKTEYTPTACLWQDGVVEWIHLPHISPKVITPYDIFCTQLIIKGRHRSKELFSKDPDYIVVPYTKVQFDLLLQEKEDWPISLLGFLGEVHFHLPKDPLLTFTLQTAIIFPHMTSTTPLEKGIVIFTDGSANGRSVTYIQGREPIIKENTQNTAQQAEIVAVITAFEEVSQPFNLYTDSKYVTGLFPEIETATLSPRTKIYTELKHLQRLIHKRQEKFYIGHIRGHTGLPGPLAQGNAYADSLTRILTAGKRTADGSEFEKRTADGSEFESPKKKAKVE

SEQ ID NO: 3234 - protein, 2022 aa, synthetic construct
MPAAKRVKLDGGDKKYSIGLDIGTNSVGWAVITDEYKVPSKKFKVLGNTDRHSIKKNLIGALLFDSGETAEATRLKRTARRRYTRRKNRICYLQEIFSNEMAKVDDSFFHRLEESFLVEEDKKHERHPIFGNIVDEVAYHEKYPTIYHLRKKLVDSTDKADLRLIYLALAHMIKFRGHFLIEGDLNPDNSDVDKLFIQLVQTYNQLFEENPINASGVDAKAILSARLSKSRRLENLIAQLPGEKKNGLFGNLIALSLGLTPNFKSNFDLAEDAKLQLSKDTYDDDLDNLLAQIGDQYADLFLAAKNLSDAILLSDILRVNTEITKAPLSASMIKRYDEHHQDLTLLKALVRQQLPEKYKEIFFDQSKNGYAGYIDGGASQEEFYKFIKPILEKMDGTEELLVKLNREDLLRKQRTFDNGSIPHQIHLGELHAILRRQEDFYPFLKDNREKIEKILTFRIPYYVGPLARGNSRFAWMTRKSEETITPWNFEEVVDKGASAQSFIERMTNFDKNLPNEKVLPKHSLLYEYFTVYNELTKVKYVTEGMRKPAFLSGEQKKAIVDLLFKTNRKVTVKQLKEDYFKKIECFDSVEISGVEDRFNASLGTYHDLLKIIKDKDFLDNEENEDILEDIVLTLTLFEDREMIEERLKTYAHLFDDKVMKQLKRRRYTGWGRLSRKLINGIRDKQSGKTILDFLKSDGFANRNFMQLIHDDSLTFKEDIQKAQVSGQGDSLHEHIANLAGSPAIKKGILQTVKVVDELVKVMGRHKPENIVIEMARENQTTQKGQKNSRERMKRIEEGIKELGSQILKEHPVENTQLQNEKLYLYYLQNGRDMYVDQELDINRLSDYDVDHIVPQSFLKDDSIDNKVLTRSDKARGKSDNVPSEEVVKKMKNYWRQLLNAKLITQRKFDNLTKAERGGLSELDKAGFIKRQLVETRQITKHVAQILDSRMNTKYDENDKLIREVKVITLKSKLVSDFRKDFQFYKVREINNYHHAHDAYLNAVVGTALIKKYPKLESEFVYGDYKVYDVRKMIAKSEQEIGKATAKYFFYSNIMNFFKTEITLANGEIRKRPLIETNGETGEIVWDKGRDFATVRKVLSMPQVNIVKKTEVQTGGFSKESILPKRNSDKLIARKKDWDPKKYGGFDSPTVAYSVLVVAKVEKGKSKKLKSVKELLGITIMERSSFEKNPIDFLEAKGYKEVKKDLIIKLPKYSLFELENGRKRMLASAGELQKGNELALPSKYVNFLYLASHYEKLKGSPEDNEQKQLFVEQHKHYLDEIIEQISEFSKRVILADANLDKVLSAYNKHRDKPIREQAENIIHLFTLTNLGAPAAFKYFDTTIDRKRYTSTKEVLDATLIHQSITGLYETRIDLSQLGGDGGPAPGGSGGGGGGRDIMKDIKVRLMTDSPDDSQDLMIGAIESNLFADQISWKSDQPVWLNQWPLKQEKLQALQQLVTEQLQLGHLEESNSPWNTPVFVIKKKSGKWRLLQDLRAVNATMHDMGALQPGLPSPVAVPKGWEIIIIDLQDCFFNIKLHPEDCKRFAFSVPSPNFKRPYQRFQWKVLPQGMKNSPTLCQKFVDKAILTVRDKYQDSYIVHYMDDILLAHPSRSIVDEILTSMIQALNKHGLVVSTEKIQKYDNLKYLGTHIQGDSVSYQKLQIRTDKLRTLNDFQKLLGNINWIRPFLKLTTGELKPLFEILNGDSNPISTRKLTPEACKALQLMNERLSTARVKRLDLSQPWSLCILKTEYTPTACLWQDGVVEWIHLPHISPKVITPYDIFCTQLIIKGRHRSKELFSKDPDYIVVPYTKVQFDLLLQEKEDWPISLLGFLGEVHFHLPKDPLLTFTLQTAIIFPHMTSTTPLEKGIVIFTDGSANGRSVTYIQGREPIIKENTQNTAQQAEIVAVITAFEEVSQPFNLYTDSKYVTGLFPEIETATLSPRTKIYTELKHLQRLIHKRQEKFYIGHIRGHTGLPGPLAQGNAYADSLTRILTAGKRTADGSEFEKRTADGSEFESPKKKAKVE

SEQ ID NO: 3235 - protein, 2024 aa, synthetic construct
MPAAKRVKLDGGDKKYSIGLDIGTNSVGWAVITDEYKVPSKKFKVLGNTDRHSIKKNLIGALLFDSGETAEATRLKRTARRRYTRRKNRICYLQEIFSNEMAKVDDSFFHRLEESFLVEEDKKHERHPIFGNIVDEVAYHEKYPTIYHLRKKLVDSTDKADLRLIYLALAHMIKFRGHFLIEGDLNPDNSDVDKLFIQLVQTYNQLFEENPINASGVDAKAILSARLSKSRRLENLIAQLPGEKKNGLFGNLIALSLGLTPNFKSNFDLAEDAKLQLSKDTYDDDLDNLLAQIGDQYADLFLAAKNLSDAILLSDILRVNTEITKAPLSASMIKRYDEHHQDLTLLKALVRQQLPEKYKEIFFDQSKNGYAGYIDGGASQEEFYKFIKPILEKMDGTEELLVKLNREDLLRKQRTFDNGSIPHQIHLGELHAILRRQEDFYPFLKDNREKIEKILTFRIPYYVGPLARGNSRFAWMTRKSEETITPWNFEEVVDKGASAQSFIERMTNFDKNLPNEKVLPKHSLLYEYFTVYNELTKVKYVTEGMRKPAFLSGEQKKAIVDLLFKTNRKVTVKQLKEDYFKKIECFDSVEISGVEDRFNASLGTYHDLLKIIKDKDFLDNEENEDILEDIVLTLTLFEDREMIEERLKTYAHLFDDKVMKQLKRRRYTGWGRLSRKLINGIRDKQSGKTILDFLKSDGFANRNFMQLIHDDSLTFKEDIQKAQVSGQGDSLHEHIANLAGSPAIKKGILQTVKVVDELVKVMGRHKPENIVIEMARENQTTQKGQKNSRERMKRIEEGIKELGSQILKEHPVENTQLQNEKLYLYYLQNGRDMYVDQELDINRLSDYDVDHIVPQSFLKDDSIDNKVLTRSDKARGKSDNVPSEEVVKKMKNYWRQLLNAKLITQRKFDNLTKAERGGLSELDKAGFIKRQLVETRQITKHVAQILDSRMNTKYDENDKLIREVKVITLKSKLVSDFRKDFQFYKVREINNYHHAHDAYLNAVVGTALIKKYPKLESEFVYGDYKVYDVRKMIAKSEQEIGKATAKYFFYSNIMNFFKTEITLANGEIRKRPLIETNGETGEIVWDKGRDFATVRKVLSMPQVNIVKKTEVQTGGFSKESILPKRNSDKLIARKKDWDPKKYGGFDSPTVAYSVLVVAKVEKGKSKKLKSVKELLGITIMERSSFEKNPIDFLEAKGYKEVKKDLIIKLPKYSLFELENGRKRMLASAGELQKGNELALPSKYVNFLYLASHYEKLKGSPEDNEQKQLFVEQHKHYLDEIIEQISEFSKRVILADANLDKVLSAYNKHRDKPIREQAENIIHLFTLTNLGAPAAFKYFDTTIDRKRYTSTKEVLDATLIHQSITGLYETRIDLSQLGGDGGGGSEAAAKGGGGGGRDIMKDIKVRLMTDSPDDSQDLMIGAIESNLFADQISWKSDQPVWLNQWPLKQEKLQALQQLVTEQLQLGHLEESNSPWNTPVFVIKKKSGKWRLLQDLRAVNATMHDMGALQPGLPSPVAVPKGWEIIIIDLQDCFFNIKLHPEDCKRFAFSVPSPNFKRPYQRFQWKVLPQGMKNSPTLCQKFVDKAILTVRDKYQDSYIVHYMDDILLAHPSRSIVDEILTSMIQALNKHGLVVSTEKIQKYDNLKYLGTHIQGDSVSYQKLQIRTDKLRTLNDFQKLLGNINWIRPFLKLTTGELKPLFEILNGDSNPISTRKLTPEACKALQLMNERLSTARVKRLDLSQPWSLCILKTEYTPTACLWQDGVVEWIHLPHISPKVITPYDIFCTQLIIKGRHRSKELFSKDPDYIVVPYTKVQFDLLLQEKEDWPISLLGFLGEVHFHLPKDPLLTFTLQTAIIFPHMTSTTPLEKGIVIFTDGSANGRSVTYIQGREPIIKENTQNTAQQAEIVAVITAFEEVSQPFNLYTDSKYVTGLFPEIETATLSPRTKIYTELKHLQRLIHKRQEKFYIGHIRGHTGLPGPLAQGNAYADSLTRILTAGKRTADGSEFEKRTADGSEFESPKKKAKVE

SEQ ID NO: 3236 - protein, 2024 aa, synthetic construct
MPAAKRVKLDGGDKKYSIGLDIGTNSVGWAVITDEYKVPSKKFKVLGNTDRHSIKKNLIGALLFDSGETAEATRLKRTARRRYTRRKNRICYLQEIFSNEMAKVDDSFFHRLEESFLVEEDKKHERHPIFGNIVDEVAYHEKYPTIYHLRKKLVDSTDKADLRLIYLALAHMIKFRGHFLIEGDLNPDNSDVDKLFIQLVQTYNQLFEENPINASGVDAKAILSARLSKSRRLENLIAQLPGEKKNGLFGNLIALSLGLTPNFKSNFDLAEDAKLQLSKDTYDDDLDNLLAQIGDQYADLFLAAKNLSDAILLSDILRVNTEITKAPLSASMIKRYDEHHQDLTLLKALVRQQLPEKYKEIFFDQSKNGYAGYIDGGASQEEFYKFIKPILEKMDGTEELLVKLNREDLLRKQRTFDNGSIPHQIHLGELHAILRRQEDFYPFLKDNREKIEKILTFRIPYYVGPLARGNSRFAWMTRKSEETITPWNFEEVVDKGASAQSFIERMTNFDKNLPNEKVLPKHSLLYEYFTVYNELTKVKYVTEGMRKPAFLSGEQKKAIVDLLFKTNRKVTVKQLKEDYFKKIECFDSVEISGVEDRFNASLGTYHDLLKIIKDKDFLDNEENEDILEDIVLTLTLFEDREMIEERLKTYAHLFDDKVMKQLKRRRYTGWGRLSRKLINGIRDKQSGKTILDFLKSDGFANRNFMQLIHDDSLTFKEDIQKAQVSGQGDSLHEHIANLAGSPAIKKGILQTVKVVDELVKVMGRHKPENIVIEMARENQTTQKGQKNSRERMKRIEEGIKELGSQILKEHPVENTQLQNEKLYLYYLQNGRDMYVDQELDINRLSDYDVDHIVPQSFLKDDSIDNKVLTRSDKARGKSDNVPSEEVVKKMKNYWRQLLNAKLITQRKFDNLTKAERGGLSELDKAGFIKRQLVETRQITKHVAQILDSRMNTKYDENDKLIREVKVITLKSKLVSDFRKDFQFYKVREINNYHHAHDAYLNAVVGTALIKKYPKLESEFVYGDYKVYDVRKMIAKSEQEIGKATAKYFFYSNIMNFFKTEITLANGEIRKRPLIETNGETGEIVWDKGRDFATVRKVLSMPQVNIVKKTEVQTGGFSKESILPKRNSDKLIARKKDWDPKKYGGFDSPTVAYSVLVVAKVEKGKSKKLKSVKELLGITIMERSSFEKNPIDFLEAKGYKEVKKDLIIKLPKYSLFELENGRKRMLASAGELQKGNELALPSKYVNFLYLASHYEKLKGSPEDNEQKQLFVEQHKHYLDEIIEQISEFSKRVILADANLDKVLSAYNKHRDKPIREQAENIIHLFTLTNLGAPAAFKYFDTTIDRKRYTSTKEVLDATLIHQSITGLYETRIDLSQLGGDGGPAPEAAAKGSSGGGRDIMKDIKVRLMTDSPDDSQDLMIGAIESNLFADQISWKSDQPVWLNQWPLKQEKLQALQQLVTEQLQLGHLEESNSPWNTPVFVIKKKSGKWRLLQDLRAVNATMHDMGALQPGLPSPVAVPKGWEIIIIDLQDCFFNIKLHPEDCKRFAFSVPSPNFKRPYQRFQWKVLPQGMKNSPTLCQKFVDKAILTVRDKYQDSYIVHYMDDILLAHPSRSIVDEILTSMIQALNKHGLVVSTEKIQKYDNLKYLGTHIQGDSVSYQKLQIRTDKLRTLNDFQKLLGNINWIRPFLKLTTGELKPLFEILNGDSNPISTRKLTPEACKALQLMNERLSTARVKRLDLSQPWSLCILKTEYTPTACLWQDGVVEWIHLPHISPKVITPYDIFCTQLIIKGRHRSKELFSKDPDYIVVPYTKVQFDLLLQEKEDWPISLLGFLGEVHFHLPKDPLLTFTLQTAIIFPHMTSTTPLEKGIVIFTDGSANGRSVTYIQGREPIIKENTQNTAQQAEIVAVITAFEEVSQPFNLYTDSKYVTGLFPEIETATLSPRTKIYTELKHLQRLIHKRQEKFYIGHIRGHTGLPGPLAQGNAYADSLTRILTAGKRTADGSEFEKRTADGSEFESPKKKAKVE

SEQ ID NO: 3237 - protein, 2024 aa, synthetic construct
MPAAKRVKLDGGDKKYSIGLDIGTNSVGWAVITDEYKVPSKKFKVLGNTDRHSIKKNLIGALLFDSGETAEATRLKRTARRRYTRRKNRICYLQEIFSNEMAKVDDSFFHRLEESFLVEEDKKHERHPIFGNIVDEVAYHEKYPTIYHLRKKLVDSTDKADLRLIYLALAHMIKFRGHFLIEGDLNPDNSDVDKLFIQLVQTYNQLFEENPINASGVDAKAILSARLSKSRRLENLIAQLPGEKKNGLFGNLIALSLGLTPNFKSNFDLAEDAKLQLSKDTYDDDLDNLLAQIGDQYADLFLAAKNLSDAILLSDILRVNTEITKAPLSASMIKRYDEHHQDLTLLKALVRQQLPEKYKEIFFDQSKNGYAGYIDGGASQEEFYKFIKPILEKMDGTEELLVKLNREDLLRKQRTFDNGSIPHQIHLGELHAILRRQEDFYPFLKDNREKIEKILTFRIPYYVGPLARGNSRFAWMTRKSEETITPWNFEEVVDKGASAQSFIERMTNFDKNLPNEKVLPKHSLLYEYFTVYNELTKVKYVTEGMRKPAFLSGEQKKAIVDLLFKTNRKVTVKQLKEDYFKKIECFDSVEISGVEDRFNASLGTYHDLLKIIKDKDFLDNEENEDILEDIVLTLTLFEDREMIEERLKTYAHLFDDKVMKQLKRRRYTGWGRLSRKLINGIRDKQSGKTILDFLKSDGFANRNFMQLIHDDSLTFKEDIQKAQVSGQGDSLHEHIANLAGSPAIKKGILQTVKVVDELVKVMGRHKPENIVIEMARENQTTQKGQKNSRERMKRIEEGIKELGSQILKEHPVENTQLQNEKLYLYYLQNGRDMYVDQELDINRLSDYDVDHIVPQSFLKDDSIDNKVLTRSDKARGKSDNVPSEEVVKKMKNYWRQLLNAKLITQRKFDNLTKAERGGLSELDKAGFIKRQLVETRQITKHVAQILDSRMNTKYDENDKLIREVKVITLKSKLVSDFRKDFQFYKVREINNYHHAHDAYLNAVVGTALIKKYPKLESEFVYGDYKVYDVRKMIAKSEQEIGKATAKYFFYSNIMNFFKTEITLANGEIRKRPLIETNGETGEIVWDKGRDFATVRKVLSMPQVNIVKKTEVQTGGFSKESILPKRNSDKLIARKKDWDPKKYGGFDSPTVAYSVLVVAKVEKGKSKKLKSVKELLGITIMERSSFEKNPIDFLEAKGYKEVKKDLIIKLPKYSLFELENGRKRMLASAGELQKGNELALPSKYVNFLYLASHYEKLKGSPEDNEQKQLFVEQHKHYLDEIIEQISEFSKRVILADANLDKVLSAYNKHRDKPIREQAENIIHLFTLTNLGAPAAFKYFDTTIDRKRYTSTKEVLDATLIHQSITGLYETRIDLSQLGGDGGGGSEAAAKPAPGGGRDIMKDIKVRLMTDSPDDSQDLMIGAIESNLFADQISWKSDQPVWLNQWPLKQEKLQALQQLVTEQLQLGHLEESNSPWNTPVFVIKKKSGKWRLLQDLRAVNATMHDMGALQPGLPSPVAVPKGWEIIIIDLQDCFFNIKLHPEDCKRFAFSVPSPNFKRPYQRFQWKVLPQGMKNSPTLCQKFVDKAILTVRDKYQDSYIVHYMDDILLAHPSRSIVDEILTSMIQALNKHGLVVSTEKIQKYDNLKYLGTHIQGDSVSYQKLQIRTDKLRTLNDFQKLLGNINWIRPFLKLTTGELKPLFEILNGDSNPISTRKLTPEACKALQLMNERLSTARVKRLDLSQPWSLCILKTEYTPTACLWQDGVVEWIHLPHISPKVITPYDIFCTQLIIKGRHRSKELFSKDPDYIVVPYTKVQFDLLLQEKEDWPISLLGFLGEVHFHLPKDPLLTFTLQTAIIFPHMTSTTPLEKGIVIFTDGSANGRSVTYIQGREPIIKENTQNTAQQAEIVAVITAFEEVSQPFNLYTDSKYVTGLFPEIETATLSPRTKIYTELKHLQRLIHKRQEKFYIGHIRGHTGLPGPLAQGNAYADSLTRILTAGKRTADGSEFEKRTADGSEFESPKKKAKVE

SEQ ID NO: 3238 - protein, 2046 aa, synthetic construct
MPAAKRVKLDGGDKKYSIGLDIGTNSVGWAVITDEYKVPSKKFKVLGNTDRHSIKKNLIGALLFDSGETAEATRLKRTARRRYTRRKNRICYLQEIFSNEMAKVDDSFFHRLEESFLVEEDKKHERHPIFGNIVDEVAYHEKYPTIYHLRKKLVDSTDKADLRLIYLALAHMIKFRGHFLIEGDLNPDNSDVDKLFIQLVQTYNQLFEENPINASGVDAKAILSARLSKSRRLENLIAQLPGEKKNGLFGNLIALSLGLTPNFKSNFDLAEDAKLQLSKDTYDDDLDNLLAQIGDQYADLFLAAKNLSDAILLSDILRVNTEITKAPLSASMIKRYDEHHQDLTLLKALVRQQLPEKYKEIFFDQSKNGYAGYIDGGASQEEFYKFIKPILEKMDGTEELLVKLNREDLLRKQRTFDNGSIPHQIHLGELHAILRRQEDFYPFLKDNREKIEKILTFRIPYYVGPLARGNSRFAWMTRKSEETITPWNFEEVVDKGASAQSFIERMTNFDKNLPNEKVLPKHSLLYEYFTVYNELTKVKYVTEGMRKPAFLSGEQKKAIVDLLFKTNRKVTVKQLKEDYFKKIECFDSVEISGVEDRFNASLGTYHDLLKIIKDKDFLDNEENEDILEDIVLTLTLFEDREMIEERLKTYAHLFDDKVMKQLKRRRYTGWGRLSRKLINGIRDKQSGKTILDFLKSDGFANRNFMQLIHDDSLTFKEDIQKAQVSGQGDSLHEHIANLAGSPAIKKGILQTVKVVDELVKVMGRHKPENIVIEMARENQTTQKGQKNSRERMKRIEEGIKELGSQILKEHPVENTQLQNEKLYLYYLQNGRDMYVDQELDINRLSDYDVDHIVPQSFLKDDSIDNKVLTRSDKARGKSDNVPSEEVVKKMKNYWRQLLNAKLITQRKFDNLTKAERGGLSELDKAGFIKRQLVETRQITKHVAQILDSRMNTKYDENDKLIREVKVITLKSKLVSDFRKDFQFYKVREINNYHHAHDAYLNAVVGTALIKKYPKLESEFVYGDYKVYDVRKMIAKSEQEIGKATAKYFFYSNIMNFFKTEITLANGEIRKRPLIETNGETGEIVWDKGRDFATVRKVLSMPQVNIVKKTEVQTGGFSKESILPKRNSDKLIARKKDWDPKKYGGFDSPTVAYSVLVVAKVEKGKSKKLKSVKELLGITIMERSSFEKNPIDFLEAKGYKEVKKDLIIKLPKYSLFELENGRKRMLASAGELQKGNELALPSKYVNFLYLASHYEKLKGSPEDNEQKQLFVEQHKHYLDEIIEQISEFSKRVILADANLDKVLSAYNKHRDKPIREQAENIIHLFTLTNLGAPAAFKYFDTTIDRKRYTSTKEVLDATLIHQSITGLYETRIDLSQLGGDGGSGGSSGGSSGSETPGTSESATPESSGGSSGGSSGGGRDIMKDIKVRLMTDSPDDSQDLMIGAIESNLFADQISWKSDQPVWLNQWPLKQEKLQALQQLVTEQLQLGHLEESNSPWNTPVFVIKKKSGKWRLLQDLRAVNATMHDMGALQPGLPSPVAVPKGWEIIIIDLQDCFFNIKLHPEDCKRFAFSVPSPNFKRPYQRFQWKVLPQGMKNSPTLCQKFVDKAILTVRDKYQDSYIVHYMDDILLAHPSRSIVDEILTSMIQALNKHGLVVSTEKIQKYDNLKYLGTHIQGDSVSYQKLQIRTDKLRTLNDFQKLLGNINWIRPFLKLTTGELKPLFEILNGDSNPISTRKLTPEACKALQLMNERLSTARVKRLDLSQPWSLCILKTEYTPTACLWQDGVVEWIHLPHISPKVITPYDIFCTQLIIKGRHRSKELFSKDPDYIVVPYTKVQFDLLLQEKEDWPISLLGFLGEVHFHLPKDPLLTFTLQTAIIFPHMTSTTPLEKGIVIFTDGSANGRSVTYIQGREPIIKENTQNTAQQAEIVAVITAFEEVSQPFNLYTDSKYVTGLFPEIETATLSPRTKIYTELKHLQRLIHKRQEKFYIGHIRGHTGLPGPLAQGNAYADSLTRILTAGKRTADGSEFEKRTADGSEFESPKKKAKVE

SEQ ID NO: 3239 - protein, 2025 aa, synthetic construct
MPAAKRVKLDGGDKKYSIGLDIGTNSVGWAVITDEYKVPSKKFKVLGNTDRHSIKKNLIGALLFDSGETAEATRLKRTARRRYTRRKNRICYLQEIFSNEMAKVDDSFFHRLEESFLVEEDKKHERHPIFGNIVDEVAYHEKYPTIYHLRKKLVDSTDKADLRLIYLALAHMIKFRGHFLIEGDLNPDNSDVDKLFIQLVQTYNQLFEENPINASGVDAKAILSARLSKSRRLENLIAQLPGEKKNGLFGNLIALSLGLTPNFKSNFDLAEDAKLQLSKDTYDDDLDNLLAQIGDQYADLFLAAKNLSDAILLSDILRVNTEITKAPLSASMIKRYDEHHQDLTLLKALVRQQLPEKYKEIFFDQSKNGYAGYIDGGASQEEFYKFIKPILEKMDGTEELLVKLNREDLLRKQRTFDNGSIPHQIHLGELHAILRRQEDFYPFLKDNREKIEKILTFRIPYYVGPLARGNSRFAWMTRKSEETITPWNFEEVVDKGASAQSFIERMTNFDKNLPNEKVLPKHSLLYEYFTVYNELTKVKYVTEGMRKPAFLSGEQKKAIVDLLFKTNRKVTVKQLKEDYFKKIECFDSVEISGVEDRFNASLGTYHDLLKIIKDKDFLDNEENEDILEDIVLTLTLFEDREMIEERLKTYAHLFDDKVMKQLKRRRYTGWGRLSRKLINGIRDKQSGKTILDFLKSDGFANRNFMQLIHDDSLTFKEDIQKAQVSGQGDSLHEHIANLAGSPAIKKGILQTVKVVDELVKVMGRHKPENIVIEMARENQTTQKGQKNSRERMKRIEEGIKELGSQILKEHPVENTQLQNEKLYLYYLQNGRDMYVDQELDINRLSDYDVDHIVPQSFLKDDSIDNKVLTRSDKARGKSDNVPSEEVVKKMKNYWRQLLNAKLITQRKFDNLTKAERGGLSELDKAGFIKRQLVETRQITKHVAQILDSRMNTKYDENDKLIREVKVITLKSKLVSDFRKDFQFYKVREINNYHHAHDAYLNAVVGTALIKKYPKLESEFVYGDYKVYDVRKMIAKSEQEIGKATAKYFFYSNIMNFFKTEITLANGEIRKRPLIETNGETGEIVWDKGRDFATVRKVLSMPQVNIVKKTEVQTGGFSKESILPKRNSDKLIARKKDWDPKKYGGFDSPTVAYSVLVVAKVEKGKSKKLKSVKELLGITIMERSSFEKNPIDFLEAKGYKEVKKDLIIKLPKYSLFELENGRKRMLASAGELQKGNELALPSKYVNFLYLASHYEKLKGSPEDNEQKQLFVEQHKHYLDEIIEQISEFSKRVILADANLDKVLSAYNKHRDKPIREQAENIIHLFTLTNLGAPAAFKYFDTTIDRKRYTSTKEVLDATLIHQSITGLYETRIDLSQLGGDGGGSSGSSGSSGSSGGGRDIMKDIKVRLMTDSPDDSQDLMIGAIESNLFADQISWKSDQPVWLNQWPLKQEKLQALQQLVTEQLQLGHLEESNSPWNTPVFVIKKKSGKWRLLQDLRAVNATMHDMGALQPGLPSPVAVPKGWEIIIIDLQDCFFNIKLHPEDCKRFAFSVPSPNFKRPYQRFQWKVLPQGMKNSPTLCQKFVDKAILTVRDKYQDSYIVHYMDDILLAHPSRSIVDEILTSMIQALNKHGLVVSTEKIQKYDNLKYLGTHIQGDSVSYQKLQIRTDKLRTLNDFQKLLGNINWIRPFLKLTTGELKPLFEILNGDSNPISTRKLTPEACKALQLMNERLSTARVKRLDLSQPWSLCILKTEYTPTACLWQDGVVEWIHLPHISPKVITPYDIFCTQLIIKGRHRSKELFSKDPDYIVVPYTKVQFDLLLQEKEDWPISLLGFLGEVHFHLPKDPLLTFTLQTAIIFPHMTSTTPLEKGIVIFTDGSANGRSVTYIQGREPIIKENTQNTAQQAEIVAVITAFEEVSQPFNLYTDSKYVTGLFPEIETATLSPRTKIYTELKHLQRLIHKRQEKFYIGHIRGHTGLPGPLAQGNAYADSLTRILTAGKRTADGSEFEKRTADGSEFESPKKKAKVE

SEQ ID NO: 3240 - protein, 2022 aa, synthetic construct
MPAAKRVKLDGGDKKYSIGLDIGTNSVGWAVITDEYKVPSKKFKVLGNTDRHSIKKNLIGALLFDSGETAEATRLKRTARRRYTRRKNRICYLQEIFSNEMAKVDDSFFHRLEESFLVEEDKKHERHPIFGNIVDEVAYHEKYPTIYHLRKKLVDSTDKADLRLIYLALAHMIKFRGHFLIEGDLNPDNSDVDKLFIQLVQTYNQLFEENPINASGVDAKAILSARLSKSRRLENLIAQLPGEKKNGLFGNLIALSLGLTPNFKSNFDLAEDAKLQLSKDTYDDDLDNLLAQIGDQYADLFLAAKNLSDAILLSDILRVNTEITKAPLSASMIKRYDEHHQDLTLLKALVRQQLPEKYKEIFFDQSKNGYAGYIDGGASQEEFYKFIKPILEKMDGTEELLVKLNREDLLRKQRTFDNGSIPHQIHLGELHAILRRQEDFYPFLKDNREKIEKILTFRIPYYVGPLARGNSRFAWMTRKSEETITPWNFEEVVDKGASAQSFIERMTNFDKNLPNEKVLPKHSLLYEYFTVYNELTKVKYVTEGMRKPAFLSGEQKKAIVDLLFKTNRKVTVKQLKEDYFKKIECFDSVEISGVEDRFNASLGTYHDLLKIIKDKDFLDNEENEDILEDIVLTLTLFEDREMIEERLKTYAHLFDDKVMKQLKRRRYTGWGRLSRKLINGIRDKQSGKTILDFLKSDGFANRNFMQLIHDDSLTFKEDIQKAQVSGQGDSLHEHIANLAGSPAIKKGILQTVKVVDELVKVMGRHKPENIVIEMARENQTTQKGQKNSRERMKRIEEGIKELGSQILKEHPVENTQLQNEKLYLYYLQNGRDMYVDQELDINRLSDYDVDHIVPQSFLKDDSIDNKVLTRSDKARGKSDNVPSEEVVKKMKNYWRQLLNAKLITQRKFDNLTKAERGGLSELDKAGFIKRQLVETRQITKHVAQILDSRMNTKYDENDKLIREVKVITLKSKLVSDFRKDFQFYKVREINNYHHAHDAYLNAVVGTALIKKYPKLESEFVYGDYKVYDVRKMIAKSEQEIGKATAKYFFYSNIMNFFKTEITLANGEIRKRPLIETNGETGEIVWDKGRDFATVRKVLSMPQVNIVKKTEVQTGGFSKESILPKRNSDKLIARKKDWDPKKYGGFDSPTVAYSVLVVAKVEKGKSKKLKSVKELLGITIMERSSFEKNPIDFLEAKGYKEVKKDLIIKLPKYSLFELENGRKRMLASAGELQKGNELALPSKYVNFLYLASHYEKLKGSPEDNEQKQLFVEQHKHYLDEIIEQISEFSKRVILADANLDKVLSAYNKHRDKPIREQAENIIHLFTLTNLGAPAAFKYFDTTIDRKRYTSTKEVLDATLIHQSITGLYETRIDLSQLGGDGGGGGGGSGSSGGGRDIMKDIKVRLMTDSPDDSQDLMIGAIESNLFADQISWKSDQPVWLNQWPLKQEKLQALQQLVTEQLQLGHLEESNSPWNTPVFVIKKKSGKWRLLQDLRAVNATMHDMGALQPGLPSPVAVPKGWEIIIIDLQDCFFNIKLHPEDCKRFAFSVPSPNFKRPYQRFQWKVLPQGMKNSPTLCQKFVDKAILTVRDKYQDSYIVHYMDDILLAHPSRSIVDEILTSMIQALNKHGLVVSTEKIQKYDNLKYLGTHIQGDSVSYQKLQIRTDKLRTLNDFQKLLGNINWIRPFLKLTTGELKPLFEILNGDSNPISTRKLTPEACKALQLMNERLSTARVKRLDLSQPWSLCILKTEYTPTACLWQDGVVEWIHLPHISPKVITPYDIFCTQLIIKGRHRSKELFSKDPDYIVVPYTKVQFDLLLQEKEDWPISLLGFLGEVHFHLPKDPLLTFTLQTAIIFPHMTSTTPLEKGIVIFTDGSANGRSVTYIQGREPIIKENTQNTAQQAEIVAVITAFEEVSQPFNLYTDSKYVTGLFPEIETATLSPRTKIYTELKHLQRLIHKRQEKFYIGHIRGHTGLPGPLAQGNAYADSLTRILTAGKRTADGSEFEKRTADGSEFESPKKKAKVE

SEQ ID NO: 3241 - protein, 2022 aa, synthetic construct
MPAAKRVKLDGGDKKYSIGLDIGTNSVGWAVITDEYKVPSKKFKVLGNTDRHSIKKNLIGALLFDSGETAEATRLKRTARRRYTRRKNRICYLQEIFSNEMAKVDDSFFHRLEESFLVEEDKKHERHPIFGNIVDEVAYHEKYPTIYHLRKKLVDSTDKADLRLIYLALAHMIKFRGHFLIEGDLNPDNSDVDKLFIQLVQTYNQLFEENPINASGVDAKAILSARLSKSRRLENLIAQLPGEKKNGLFGNLIALSLGLTPNFKSNFDLAEDAKLQLSKDTYDDDLDNLLAQIGDQYADLFLAAKNLSDAILLSDILRVNTEITKAPLSASMIKRYDEHHQDLTLLKALVRQQLPEKYKEIFFDQSKNGYAGYIDGGASQEEFYKFIKPILEKMDGTEELLVKLNREDLLRKQRTFDNGSIPHQIHLGELHAILRRQEDFYPFLKDNREKIEKILTFRIPYYVGPLARGNSRFAWMTRKSEETITPWNFEEVVDKGASAQSFIERMTNFDKNLPNEKVLPKHSLLYEYFTVYNELTKVKYVTEGMRKPAFLSGEQKKAIVDLLFKTNRKVTVKQLKEDYFKKIECFDSVEISGVEDRFNASLGTYHDLLKIIKDKDFLDNEENEDILEDIVLTLTLFEDREMIEERLKTYAHLFDDKVMKQLKRRRYTGWGRLSRKLINGIRDKQSGKTILDFLKSDGFANRNFMQLIHDDSLTFKEDIQKAQVSGQGDSLHEHIANLAGSPAIKKGILQTVKVVDELVKVMGRHKPENIVIEMARENQTTQKGQKNSRERMKRIEEGIKELGSQILKEHPVENTQLQNEKLYLYYLQNGRDMYVDQELDINRLSDYDVDHIVPQSFLKDDSIDNKVLTRSDKARGKSDNVPSEEVVKKMKNYWRQLLNAKLITQRKFDNLTKAERGGLSELDKAGFIKRQLVETRQITKHVAQILDSRMNTKYDENDKLIREVKVITLKSKLVSDFRKDFQFYKVREINNYHHAHDAYLNAVVGTALIKKYPKLESEFVYGDYKVYDVRKMIAKSEQEIGKATAKYFFYSNIMNFFKTEITLANGEIRKRPLIETNGETGEIVWDKGRDFATVRKVLSMPQVNIVKKTEVQTGGFSKESILPKRNSDKLIARKKDWDPKKYGGFDSPTVAYSVLVVAKVEKGKSKKLKSVKELLGITIMERSSFEKNPIDFLEAKGYKEVKKDLIIKLPKYSLFELENGRKRMLASAGELQKGNELALPSKYVNFLYLASHYEKLKGSPEDNEQKQLFVEQHKHYLDEIIEQISEFSKRVILADANLDKVLSAYNKHRDKPIREQAENIIHLFTLTNLGAPAAFKYFDTTIDRKRYTSTKEVLDATLIHQSITGLYETRIDLSQLGGDGGGGGGSSGGSGGGRDIMKDIKVRLMTDSPDDSQDLMIGAIESNLFADQISWKSDQPVWLNQWPLKQEKLQALQQLVTEQLQLGHLEESNSPWNTPVFVIKKKSGKWRLLQDLRAVNATMHDMGALQPGLPSPVAVPKGWEIIIIDLQDCFFNIKLHPEDCKRFAFSVPSPNFKRPYQRFQWKVLPQGMKNSPTLCQKFVDKAILTVRDKYQDSYIVHYMDDILLAHPSRSIVDEILTSMIQALNKHGLVVSTEKIQKYDNLKYLGTHIQGDSVSYQKLQIRTDKLRTLNDFQKLLGNINWIRPFLKLTTGELKPLFEILNGDSNPISTRKLTPEACKALQLMNERLSTARVKRLDLSQPWSLCILKTEYTPTACLWQDGVVEWIHLPHISPKVITPYDIFCTQLIIKGRHRSKELFSKDPDYIVVPYTKVQFDLLLQEKEDWPISLLGFLGEVHFHLPKDPLLTFTLQTAIIFPHMTSTTPLEKGIVIFTDGSANGRSVTYIQGREPIIKENTQNTAQQAEIVAVITAFEEVSQPFNLYTDSKYVTGLFPEIETATLSPRTKIYTELKHLQRLIHKRQEKFYIGHIRGHTGLPGPLAQGNAYADSLTRILTAGKRTADGSEFEKRTADGSEFESPKKKAKVE

SEQ ID NO: 3242 - protein, 2019 aa, synthetic construct
MPAAKRVKLDGGDKKYSIGLDIGTNSVGWAVITDEYKVPSKKFKVLGNTDRHSIKKNLIGALLFDSGETAEATRLKRTARRRYTRRKNRICYLQEIFSNEMAKVDDSFFHRLEESFLVEEDKKHERHPIFGNIVDEVAYHEKYPTIYHLRKKLVDSTDKADLRLIYLALAHMIKFRGHFLIEGDLNPDNSDVDKLFIQLVQTYNQLFEENPINASGVDAKAILSARLSKSRRLENLIAQLPGEKKNGLFGNLIALSLGLTPNFKSNFDLAEDAKLQLSKDTYDDDLDNLLAQIGDQYADLFLAAKNLSDAILLSDILRVNTEITKAPLSASMIKRYDEHHQDLTLLKALVRQQLPEKYKEIFFDQSKNGYAGYIDGGASQEEFYKFIKPILEKMDGTEELLVKLNREDLLRKQRTFDNGSIPHQIHLGELHAILRRQEDFYPFLKDNREKIEKILTFRIPYYVGPLARGNSRFAWMTRKSEETITPWNFEEVVDKGASAQSFIERMTNFDKNLPNEKVLPKHSLLYEYFTVYNELTKVKYVTEGMRKPAFLSGEQKKAIVDLLFKTNRKVTVKQLKEDYFKKIECFDSVEISGVEDRFNASLGTYHDLLKIIKDKDFLDNEENEDILEDIVLTLTLFEDREMIEERLKTYAHLFDDKVMKQLKRRRYTGWGRLSRKLINGIRDKQSGKTILDFLKSDGFANRNFMQLIHDDSLTFKEDIQKAQVSGQGDSLHEHIANLAGSPAIKKGILQTVKVVDELVKVMGRHKPENIVIEMARENQTTQKGQKNSRERMKRIEEGIKELGSQILKEHPVENTQLQNEKLYLYYLQNGRDMYVDQELDINRLSDYDVDHIVPQSFLKDDSIDNKVLTRSDKARGKSDNVPSEEVVKKMKNYWRQLLNAKLITQRKFDNLTKAERGGLSELDKAGFIKRQLVETRQITKHVAQILDSRMNTKYDENDKLIREVKVITLKSKLVSDFRKDFQFYKVREINNYHHAHDAYLNAVVGTALIKKYPKLESEFVYGDYKVYDVRKMIAKSEQEIGKATAKYFFYSNIMNFFKTEITLANGEIRKRPLIETNGETGEIVWDKGRDFATVRKVLSMPQVNIVKKTEVQTGGFSKESILPKRNSDKLIARKKDWDPKKYGGFDSPTVAYSVLVVAKVEKGKSKKLKSVKELLGITIMERSSFEKNPIDFLEAKGYKEVKKDLIIKLPKYSLFELENGRKRMLASAGELQKGNELALPSKYVNFLYLASHYEKLKGSPEDNEQKQLFVEQHKHYLDEIIEQISEFSKRVILADANLDKVLSAYNKHRDKPIREQAENIIHLFTLTNLGAPAAFKYFDTTIDRKRYTSTKEVLDATLIHQSITGLYETRIDLSQLGGDGGGGSGSSGGGRDIMKDIKVRLMTDSPDDSQDLMIGAIESNLFADQISWKSDQPVWLNQWPLKQEKLQALQQLVTEQLQLGHLEESNSPWNTPVFVIKKKSGKWRLLQDLRAVNATMHDMGALQPGLPSPVAVPKGWEIIIIDLQDCFFNIKLHPEDCKRFAFSVPSPNFKRPYQRFQWKVLPQGMKNSPTLCQKFVDKAILTVRDKYQDSYIVHYMDDILLAHPSRSIVDEILTSMIQALNKHGLVVSTEKIQKYDNLKYLGTHIQGDSVSYQKLQIRTDKLRTLNDFQKLLGNINWIRPFLKLTTGELKPLFEILNPDSNPISTRKLTPEACKALQLMNERLSTARVKRLDLSQPWSLCILKTEYTPTACLWQDGVVEWIHLPHISPKVITPYDIFCTQLIIKGRHRSKELFSKDPDYIVVPYTKVQFDLLLQEKEDWPISLLGFLGEVHFHLPKDPLLTFTLQTAIIFPHMTSTTPLEKGIVIFTDGSANGRSVTYIQGREPIIKENTQNTAQQAEIVAVITAFEEVSQPFNLYTDSKYVTGLFPEIETATLSPRTKIYTELKHLQRLIHKRQEKFYIGHIRGHTGLPGPLAQGNAYADSLTRILTAGKRTADGSEFEKRTADGSEFESPKKKAKVE

SEQ ID NO: 3243 - protein, 2022 aa, synthetic construct
MPAAKRVKLDGGDKKYSIGLDIGTNSVGWAVITDEYKVPSKKFKVLGNTDRHSIKKNLIGALLFDSGETAEATRLKRTARRRYTRRKNRICYLQEIFSNEMAKVDDSFFHRLEESFLVEEDKKHERHPIFGNIVDEVAYHEKYPTIYHLRKKLVDSTDKADLRLIYLALAHMIKFRGHFLIEGDLNPDNSDVDKLFIQLVQTYNQLFEENPINASGVDAKAILSARLSKSRRLENLIAQLPGEKKNGLFGNLIALSLGLTPNFKSNFDLAEDAKLQLSKDTYDDDLDNLLAQIGDQYADLFLAAKNLSDAILLSDILRVNTEITKAPLSASMIKRYDEHHQDLTLLKALVRQQLPEKYKEIFFDQSKNGYAGYIDGGASQEEFYKFIKPILEKMDGTEELLVKLNREDLLRKQRTFDNGSIPHQIHLGELHAILRRQEDFYPFLKDNREKIEKILTFRIPYYVGPLARGNSRFAWMTRKSEETITPWNFEEVVDKGASAQSFIERMTNFDKNLPNEKVLPKHSLLYEYFTVYNELTKVKYVTEGMRKPAFLSGEQKKAIVDLLFKTNRKVTVKQLKEDYFKKIECFDSVEISGVEDRFNASLGTYHDLLKIIKDKDFLDNEENEDILEDIVLTLTLFEDREMIEERLKTYAHLFDDKVMKQLKRRRYTGWGRLSRKLINGIRDKQSGKTILDFLKSDGFANRNFMQLIHDDSLTFKEDIQKAQVSGQGDSLHEHIANLAGSPAIKKGILQTVKVVDELVKVMGRHKPENIVIEMARENQTTQKGQKNSRERMKRIEEGIKELGSQILKEHPVENTQLQNEKLYLYYLQNGRDMYVDQELDINRLSDYDVDHIVPQSFLKDDSIDNKVLTRSDKARGKSDNVPSEEVVKKMKNYWRQLLNAKLITQRKFDNLTKAERGGLSELDKAGFIKRQLVETRQITKHVAQILDSRMNTKYDENDKLIREVKVITLKSKLVSDFRKDFQFYKVREINNYHHAHDAYLNAVVGTALIKKYPKLESEFVYGDYKVYDVRKMIAKSEQEIGKATAKYFFYSNIMNFFKTEITLANGEIRKRPLIETNGETGEIVWDKGRDFATVRKVLSMPQVNIVKKTEVQTGGFSKESILPKRNSDKLIARKKDWDPKKYGGFDSPTVAYSVLVVAKVEKGKSKKLKSVKELLGITIMERSSFEKNPIDFLEAKGYKEVKKDLIIKLPKYSLFELENGRKRMLASAGELQKGNELALPSKYVNFLYLASHYEKLKGSPEDNEQKQLFVEQHKHYLDEIIEQISEFSKRVILADANLDKVLSAYNKHRDKPIREQAENIIHLFTLTNLGAPAAFKYFDTTIDRKRYTSTKEVLDATLIHQSITGLYETRIDLSQLGGDGGGGGGGSGSSGGGRDIMKDIKVRLMTDSPDDSQDLMIGAIESNLFADQISWKSDQPVWLNQWPLKQEKLQALQQLVTEQLQLGHLEESNSPWNTPVFVIKKKSGKWRLLQDLRAVNATMHDMGALQPGLPSPVAVPKGWEIIIIDLQDCFFNIKLHPEDCKRFAFSVPSPNFKRPYQRFQWKVLPQGMKNSPTLCQKFVDKAILTVRDKYQDSYIVHYMDDILLAHPSRSIVDEILTSMIQALNKHGLVVSTEKIQKYDNLKYLGTHIQGDSVSYQKLQIRTDKLRTLNDFQKLLGNINWIRPFLKLTTGELKPLFEILNPDSNPISTRKLTPEACKALQLMNERLSTARVKRLDLSQPWSLCILKTEYTPTACLWQDGVVEWIHLPHISPKVITPYDIFCTQLIIKGRHRSKELFSKDPDYIVVPYTKVQFDLLLQEKEDWPISLLGFLGEVHFHLPKDPLLTFTLQTAIIFPHMTSTTPLEKGIVIFTDGSANGRSVTYIQGREPIIKENTQNTAQQAEIVAVITAFEEVSQPFNLYTDSKYVTGLFPEIETATLSPRTKIYTELKHLQRLIHKRQEKFYIGHIRGHTGLPGPLAQGNAYADSLTRILTAGKRTADGSEFEKRTADGSEFESPKKKAKVE

SEQ ID NO: 3244 - protein, 2024 aa, synthetic construct
MPAAKRVKLDGGDKKYSIGLDIGTNSVGWAVITDEYKVPSKKFKVLGNTDRHSIKKNLIGALLFDSGETAEATRLKRTARRRYTRRKNRICYLQEIFSNEMAKVDDSFFHRLEESFLVEEDKKHERHPIFGNIVDEVAYHEKYPTIYHLRKKLVDSTDKADLRLIYLALAHMIKFRGHFLIEGDLNPDNSDVDKLFIQLVQTYNQLFEENPINASGVDAKAILSARLSKSRRLENLIAQLPGEKKNGLFGNLIALSLGLTPNFKSNFDLAEDAKLQLSKDTYDDDLDNLLAQIGDQYADLFLAAKNLSDAILLSDILRVNTEITKAPLSASMIKRYDEHHQDLTLLKALVRQQLPEKYKEIFFDQSKNGYAGYIDGGASQEEFYKFIKPILEKMDGTEELLVKLNREDLLRKQRTFDNGSIPHQIHLGELHAILRRQEDFYPFLKDNREKIEKILTFRIPYYVGPLARGNSRFAWMTRKSEETITPWNFEEVVDKGASAQSFIERMTNFDKNLPNEKVLPKHSLLYEYFTVYNELTKVKYVTEGMRKPAFLSGEQKKAIVDLLFKTNRKVTVKQLKEDYFKKIECFDSVEISGVEDRFNASLGTYHDLLKIIKDKDFLDNEENEDILEDIVLTLTLFEDREMIEERLKTYAHLFDDKVMKQLKRRRYTGWGRLSRKLINGIRDKQSGKTILDFLKSDGFANRNFMQLIHDDSLTFKEDIQKAQVSGQGDSLHEHIANLAGSPAIKKGILQTVKVVDELVKVMGRHKPENIVIEMARENQTTQKGQKNSRERMKRIEEGIKELGSQILKEHPVENTQLQNEKLYLYYLQNGRDMYVDQELDINRLSDYDVDHIVPQSFLKDDSIDNKVLTRSDKARGKSDNVPSEEVVKKMKNYWRQLLNAKLITQRKFDNLTKAERGGLSELDKAGFIKRQLVETRQITKHVAQILDSRMNTKYDENDKLIREVKVITLKSKLVSDFRKDFQFYKVREINNYHHAHDAYLNAVVGTALIKKYPKLESEFVYGDYKVYDVRKMIAKSEQEIGKATAKYFFYSNIMNFFKTEITLANGEIRKRPLIETNGETGEIVWDKGRDFATVRKVLSMPQVNIVKKTEVQTGGFSKESILPKRNSDKLIARKKDWDPKKYGGFDSPTVAYSVLVVAKVEKGKSKKLKSVKELLGITIMERSSFEKNPIDFLEAKGYKEVKKDLIIKLPKYSLFELENGRKRMLASAGELQKGNELALPSKYVNFLYLASHYEKLKGSPEDNEQKQLFVEQHKHYLDEIIEQISEFSKRVILADANLDKVLSAYNKHRDKPIREQAENIIHLFTLTNLGAPAAFKYFDTTIDRKRYTSTKEVLDATLIHQSITGLYETRIDLSQLGGDGGGSSEAAAKGGSGGGRDIMKDIKVRLMTDSPDDSQDLMIGAIESNLFADQISWKSDQPVWLNQWPLKQEKLQALQQLVTEQLQLGHLEESNSPWNTPVFVIKKKSGKWRLLQDLRAVNATMHDMGALQPGLPSPVAPPKGWEIIIIDLQDCFFNIKLHPEDCKRFAFSVPSPNFKRPYQRFQWKVLPQGMKNSPTLCQKFVDKAILTVRDKYQDSYIVHYMDDILLAHPSRSIVDEILTSMIQALNKHGLVVSTEKIQKYDNLKYLGTHIQGDSVSYQKLQIRTDKLRTLNDFQKLLGNINWIRPFLKLTTGELKPLFEILNPDSNPISTRKLTPEACKALQLMNERLSTARVKRLDLSQPWSLCILKTEYTPTACLWQDGVVEWIHLPHISPKVITPYDIFCTQLIIKGRHRSKELFSKDPDYIVVPYTKVQFDLLLQEKEDWPISLLGFLGEVHFHLPKDPLLTFTLQTAIIFPHMTSTTPLEKGIVIFTDGSANGRSVTYIQGREPIIKENTQNTAQQAEIVAVITAFEEVSQPFNLYTDSKYVTGLFPEIETATLSPRTKIYTELKHLQRLIHKRQEKFYIGHIRGHTGLPGPLAQGNAYADSLTRILTAGKRTADGSEFEKRTADGSEFESPKKKAKVE

SEQ ID NO: 3245 - protein, 2125 aa, synthetic construct
MPAAKRVKLDGGDKKYSIGLDIGTNSVGWAVITDEYKVPSKKFKVLGNTDRHSIKKNLIGALLFDSGETAEATRLKRTARRRYTRRKNRICYLQEIFSNEMAKVDDSFFHRLEESFLVEEDKKHERHPIFGNIVDEVAYHEKYPTIYHLRKKLVDSTDKADLRLIYLALAHMIKFRGHFLIEGDLNPDNSDVDKLFIQLVQTYNQLFEENPINASGVDAKAILSARLSKSRRLENLIAQLPGEKKNGLFGNLIALSLGLTPNFKSNFDLAEDAKLQLSKDTYDDDLDNLLAQIGDQYADLFLAAKNLSDAILLSDILRVNTEITKAPLSASMIKRYDEHHQDLTLLKALVRQQLPEKYKEIFFDQSKNGYAGYIDGGASQEEFYKFIKPILEKMDGTEELLVKLNREDLLRKQRTFDNGSIPHQIHLGELHAILRRQEDFYPFLKDNREKIEKILTFRIPYYVGPLARGNSRFAWMTRKSEETITPWNFEEVVDKGASAQSFIERMTNFDKNLPNEKVLPKHSLLYEYFTVYNELTKVKYVTEGMRKPAFLSGEQKKAIVDLLFKTNRKVTVKQLKEDYFKKIECFDSVEISGVEDRFNASLGTYHDLLKIIKDKDFLDNEENEDILEDIVLTLTLFEDREMIEERLKTYAHLFDDKVMKQLKRRRYTGWGRLSRKLINGIRDKQSGKTILDFLKSDGFANRNFMQLIHDDSLTFKEDIQKAQVSGQGDSLHEHIANLAGSPAIKKGILQTVKVVDELVKVMGRHKPENIVIEMARENQTTQKGQKNSRERMKRIEEGIKELGSQILKEHPVENTQLQNEKLYLYYLQNGRDMYVDQELDINRLSDYDVDHIVPQSFLKDDSIDNKVLTRSDKARGKSDNVPSEEVVKKMKNYWRQLLNAKLITQRKFDNLTKAERGGLSELDKAGFIKRQLVETRQITKHVAQILDSRMNTKYDENDKLIREVKVITLKSKLVSDFRKDFQFYKVREINNYHHAHDAYLNAVVGTALIKKYPKLESEFVYGDYKVYDVRKMIAKSEQEIGKATAKYFFYSNIMNFFKTEITLANGEIRKRPLIETNGETGEIVWDKGRDFATVRKVLSMPQVNIVKKTEVQTGGFSKESILPKRNSDKLIARKKDWDPKKYGGFDSPTVAYSVLVVAKVEKGKSKKLKSVKELLGITIMERSSFEKNPIDFLEAKGYKEVKKDLIIKLPKYSLFELENGRKRMLASAGELQKGNELALPSKYVNFLYLASHYEKLKGSPEDNEQKQLFVEQHKHYLDEIIEQISEFSKRVILADANLDKVLSAYNKHRDKPIREQAENIIHLFTLTNLGAPAAFKYFDTTIDRKRYTSTKEVLDATLIHQSITGLYETRIDLSQLGGDGGEAAAKEAAAKEAAAKEAAAKGGWVQEISDSRPMLHIYLNGRRFLGLLNTGADKTCIAGRDWPANWPIHQTESSLQGLGMACGVARSSQPLRWQHEDKSGIIHPFVIPTLPFTLWGRDIMKDIKVRLMTDSPDDSQDLMIGAIESNLFADQISWKSDQPVWLNQWPLKQEKLQALQQLVTEQLQLGHLEESNSPWNTPVFVIKKKSGKWRLLQDLRAVNATMHDMGALQPGLPSPVAVPKGWEIIIIDLQDCFFNIKLHPEDCKRFAFSVPSPNFKRPYQRFQWKVLPQGMKNSPTLCQKFVDKAILTVRDKYQDSYIVHYMDDILLAHPSRSIVDEILTSMIQALNKHGLVVSTEKIQKYDNLKYLGTHIQGDSVSYQKLQIRTDKLRTLNDFQKLLGNINWIRPFLKLTTGELKPLFEILNPDSNPISTRKLTPEACKALQLMNERLSTARVKRLDLSQPWSLCILKTEYTPTACLWQDGVVEWIHLPHISPKVITPYDIFCTQLIIKGRHRSKELFSKDPDYIVVPYTKVQFDLLLQEKEDWPISLLGFLGEVHFHLPKDPLLTFTLQTAIIFPHMTSTTPLEKGIVIFTDGSANGRSVTYIQGREPIIKENTQNTAQQAEIVAVITAFEEVSQPFNLYTDSKYVTGLFPEIETATLSPRTKIYTELKHLQRLIHKRQEKFYIGHIRGHTGLPGPLAQGNAYADSLTRILTAGKRTADGSEFEKRTADGSEFESPKKKAKVE

SEQ ID NO: 3246 - protein, 2116 aa, synthetic construct
MPAAKRVKLDGGDKKYSIGLDIGTNSVGWAVITDEYKVPSKKFKVLGNTDRHSIKKNLIGALLFDSGETAEATRLKRTARRRYTRRKNRICYLQEIFSNEMAKVDDSFFHRLEESFLVEEDKKHERHPIFGNIVDEVAYHEKYPTIYHLRKKLVDSTDKADLRLIYLALAHMIKFRGHFLIEGDLNPDNSDVDKLFIQLVQTYNQLFEENPINASGVDAKAILSARLSKSRRLENLIAQLPGEKKNGLFGNLIALSLGLTPNFKSNFDLAEDAKLQLSKDTYDDDLDNLLAQIGDQYADLFLAAKNLSDAILLSDILRVNTEITKAPLSASMIKRYDEHHQDLTLLKALVRQQLPEKYKEIFFDQSKNGYAGYIDGGASQEEFYKFIKPILEKMDGTEELLVKLNREDLLRKQRTFDNGSIPHQIHLGELHAILRRQEDFYPFLKDNREKIEKILTFRIPYYVGPLARGNSRFAWMTRKSEETITPWNFEEVVDKGASAQSFIERMTNFDKNLPNEKVLPKHSLLYEYFTVYNELTKVKYVTEGMRKPAFLSGEQKKAIVDLLFKTNRKVTVKQLKEDYFKKIECFDSVEISGVEDRFNASLGTYHDLLKIIKDKDFLDNEENEDILEDIVLTLTLFEDREMIEERLKTYAHLFDDKVMKQLKRRRYTGWGRLSRKLINGIRDKQSGKTILDFLKSDGFANRNFMQLIHDDSLTFKEDIQKAQVSGQGDSLHEHIANLAGSPAIKKGILQTVKVVDELVKVMGRHKPENIVIEMARENQTTQKGQKNSRERMKRIEEGIKELGSQILKEHPVENTQLQNEKLYLYYLQNGRDMYVDQELDINRLSDYDVDHIVPQSFLKDDSIDNKVLTRSDKARGKSDNVPSEEVVKKMKNYWRQLLNAKLITQRKFDNLTKAERGGLSELDKAGFIKRQLVETRQITKHVAQILDSRMNTKYDENDKLIREVKVITLKSKLVSDFRKDFQFYKVREINNYHHAHDAYLNAVVGTALIKKYPKLESEFVYGDYKVYDVRKMIAKSEQEIGKATAKYFFYSNIMNFFKTEITLANGEIRKRPLIETNGETGEIVWDKGRDFATVRKVLSMPQVNIVKKTEVQTGGFSKESILPKRNSDKLIARKKDWDPKKYGGFDSPTVAYSVLVVAKVEKGKSKKLKSVKELLGITIMERSSFEKNPIDFLEAKGYKEVKKDLIIKLPKYSLFELENGRKRMLASAGELQKGNELALPSKYVNFLYLASHYEKLKGSPEDNEQKQLFVEQHKHYLDEIIEQISEFSKRVILADANLDKVLSAYNKHRDKPIREQAENIIHLFTLTNLGAPAAFKYFDTTIDRKRYTSTKEVLDATLIHQSITGLYETRIDLSQLGGDGGGSSGGSEAAAKGGWVQEISDSRPMLHIYLNGRRFLGLLNTGADKTCIAGRDWPANWPIHQTESSLQGLGMACGVARSSQPLRWQHEDKSGIIHPFVIPTLPFTLWGRDIMKDIKVRLMTDSPDDSQDLMIGAIESNLFADQISWKSDQPVWLNQWPLKQEKLQALQQLVTEQLQLGHLEESNSPWNTPVFVIKKKSGKWRLLQDLRAVNATMHDMGALQPGLPSPVAVPKGWEIIIIDLQDCFFNIKLHPEDCKRFAFSVPSPNFKRPYQRFQWKVLPQGMKNSPTLCQKFVDKAILTVRDKYQDSYIVHYMDDILLAHPSRSIVDEILTSMIQALNKHGLVVSTEKIQKYDNLKYLGTHIQGDSVSYQKLQIRTDKLRTLNDFQKLLGNINWIRPFLKLTTGELKPLFEILNPDSNPISTRKLTPEACKALQLMNERLSTARVKRLDLSQPWSLCILKTEYTPTACLWQDGVVEWIHLPHISPKVITPYDIFCTQLIIKGRHRSKELFSKDPDYIVVPYTKVQFDLLLQEKEDWPISLLGFLGEVHFHLPKDPLLTFTLQTAIIFPHMTSTTPLEKGIVIFTDGSANGRSVTYIQGREPIIKENTQNTAQQAEIVAVITAFEEVSQPFNLYTDSKYVTGLFPEIETATLSPRTKIYTELKHLQRLIHKRQEKFYIGHIRGHTGLPGPLAQGNAYADSLTRILTAGKRTADGSEFEKRTADGSEFESPKKKAKVE

SEQ ID NO: 3247 - protein, 2114 aa, synthetic construct
MPAAKRVKLDGGDKKYSIGLDIGTNSVGWAVITDEYKVPSKKFKVLGNTDRHSIKKNLIGALLFDSGETAEATRLKRTARRRYTRRKNRICYLQEIFSNEMAKVDDSFFHRLEESFLVEEDKKHERHPIFGNIVDEVAYHEKYPTIYHLRKKLVDSTDKADLRLIYLALAHMIKFRGHFLIEGDLNPDNSDVDKLFIQLVQTYNQLFEENPINASGVDAKAILSARLSKSRRLENLIAQLPGEKKNGLFGNLIALSLGLTPNFKSNFDLAEDAKLQLSKDTYDDDLDNLLAQIGDQYADLFLAAKNLSDAILLSDILRVNTEITKAPLSASMIKRYDEHHQDLTLLKALVRQQLPEKYKEIFFDQSKNGYAGYIDGGASQEEFYKFIKPILEKMDGTEELLVKLNREDLLRKQRTFDNGSIPHQIHLGELHAILRRQEDFYPFLKDNREKIEKILTFRIPYYVGPLARGNSRFAWMTRKSEETITPWNFEEVVDKGASAQSFIERMTNFDKNLPNEKVLPKHSLLYEYFTVYNELTKVKYVTEGMRKPAFLSGEQKKAIVDLLFKTNRKVTVKQLKEDYFKKIECFDSVEISGVEDRFNASLGTYHDLLKIIKDKDFLDNEENEDILEDIVLTLTLFEDREMIEERLKTYAHLFDDKVMKQLKRRRYTGWGRLSRKLINGIRDKQSGKTILDFLKSDGFANRNFMQLIHDDSLTFKEDIQKAQVSGQGDSLHEHIANLAGSPAIKKGILQTVKVVDELVKVMGRHKPENIVIEMARENQTTQKGQKNSRERMKRIEEGIKELGSQILKEHPVENTQLQNEKLYLYYLQNGRDMYVDQELDINRLSDYDVDHIVPQSFLKDDSIDNKVLTRSDKARGKSDNVPSEEVVKKMKNYWRQLLNAKLITQRKFDNLTKAERGGLSELDKAGFIKRQLVETRQITKHVAQILDSRMNTKYDENDKLIREVKVITLKSKLVSDFRKDFQFYKVREINNYHHAHDAYLNAVVGTALIKKYPKLESEFVYGDYKVYDVRKMIAKSEQEIGKATAKYFFYSNIMNFFKTEITLANGEIRKRPLIETNGETGEIVWDKGRDFATVRKVLSMPQVNIVKKTEVQTGGFSKESILPKRNSDKLIARKKDWDPKKYGGFDSPTVAYSVLVVAKVEKGKSKKLKSVKELLGITIMERSSFEKNPIDFLEAKGYKEVKKDLIIKLPKYSLFELENGRKRMLASAGELQKGNELALPSKYVNFLYLASHYEKLKGSPEDNEQKQLFVEQHKHYLDEIIEQISEFSKRVILADANLDKVLSAYNKHRDKPIREQAENIIHLFTLTNLGAPAAFKYFDTTIDRKRYTSTKEVLDATLIHQSITGLYETRIDLSQLGGDGGGGGGGSGSSGGWVQEISDSRPMLHIYLNGRRFLGLLNTGADKTCIAGRDWPANWPIHQTESSLQGLGMACGVARSSQPLRWQHEDKSGIIHPFVIPTLPFTLWGRDIMKDIKVRLMTDSPDDSQDLMIGAIESNLFADQISWKSDQPVWLNQWPLKQEKLQALQQLVTEQLQLGHLEESNSPWNTPVFVIKKKSGKWRLLQDLRAVNATMHDMGALQPGLPSPVAVPKGWEIIIIDLQDCFFNIKLHPEDCKRFAFSVPSPNFKRPYQRFQWKVLPQGMKNSPTLCQKFVDKAILTVRDKYQDSYIVHYMDDILLAHPSRSIVDEILTSMIQALNKHGLVVSTEKIQKYDNLKYLGTHIQGDSVSYQKLQIRTDKLRTLNDFQKLLGNINWIRPFLKLTTGELKPLFEILNPDSNPISTRKLTPEACKALQLMNERLSTARVKRLDLSQPWSLCILKTEYTPTACLWQDGVVEWIHLPHISPKVITPYDIFCTQLIIKGRHRSKELFSKDPDYIVVPYTKVQFDLLLQEKEDWPISLLGFLGEVHFHLPKDPLLTFTLQTAIIFPHMTSTTPLEKGIVIFTDGSANGRSVTYIQGREPIIKENTQNTAQQAEIVAVITAFEEVSQPFNLYTDSKYVTGLFPEIETATLSPRTKIYTELKHLQRLIHKRQEKFYIGHIRGHTGLPGPLAQGNAYADSLTRILTAGKRTADGSEFEKRTADGSEFESPKKKAKVE

SEQ ID NO: 3248 - protein, 2116 aa, synthetic construct
MPAAKRVKLDGGDKKYSIGLDIGTNSVGWAVITDEYKVPSKKFKVLGNTDRHSIKKNLIGALLFDSGETAEATRLKRTARRRYTRRKNRICYLQEIFSNEMAKVDDSFFHRLEESFLVEEDKKHERHPIFGNIVDEVAYHEKYPTIYHLRKKLVDSTDKADLRLIYLALAHMIKFRGHFLIEGDLNPDNSDVDKLFIQLVQTYNQLFEENPINASGVDAKAILSARLSKSRRLENLIAQLPGEKKNGLFGNLIALSLGLTPNFKSNFDLAEDAKLQLSKDTYDDDLDNLLAQIGDQYADLFLAAKNLSDAILLSDILRVNTEITKAPLSASMIKRYDEHHQDLTLLKALVRQQLPEKYKEIFFDQSKNGYAGYIDGGASQEEFYKFIKPILEKMDGTEELLVKLNREDLLRKQRTFDNGSIPHQIHLGELHAILRRQEDFYPFLKDNREKIEKILTFRIPYYVGPLARGNSRFAWMTRKSEETITPWNFEEVVDKGASAQSFIERMTNFDKNLPNEKVLPKHSLLYEYFTVYNELTKVKYVTEGMRKPAFLSGEQKKAIVDLLFKTNRKVTVKQLKEDYFKKIECFDSVEISGVEDRFNASLGTYHDLLKIIKDKDFLDNEENEDILEDIVLTLTLFEDREMIEERLKTYAHLFDDKVMKQLKRRRYTGWGRLSRKLINGIRDKQSGKTILDFLKSDGFANRNFMQLIHDDSLTFKEDIQKAQVSGQGDSLHEHIANLAGSPAIKKGILQTVKVVDELVKVMGRHKPENIVIEMARENQTTQKGQKNSRERMKRIEEGIKELGSQILKEHPVENTQLQNEKLYLYYLQNGRDMYVDQELDINRLSDYDVDHIVPQSFLKDDSIDNKVLTRSDKARGKSDNVPSEEVVKKMKNYWRQLLNAKLITQRKFDNLTKAERGGLSELDKAGFIKRQLVETRQITKHVAQILDSRMNTKYDENDKLIREVKVITLKSKLVSDFRKDFQFYKVREINNYHHAHDAYLNAVVGTALIKKYPKLESEFVYGDYKVYDVRKMIAKSEQEIGKATAKYFFYSNIMNFFKTEITLANGEIRKRPLIETNGETGEIVWDKGRDFATVRKVLSMPQVNIVKKTEVQTGGFSKESILPKRNSDKLIARKKDWDPKKYGGFDSPTVAYSVLVVAKVEKGKSKKLKSVKELLGITIMERSSFEKNPIDFLEAKGYKEVKKDLIIKLPKYSLFELENGRKRMLASAGELQKGNELALPSKYVNFLYLASHYEKLKGSPEDNEQKQLFVEQHKHYLDEIIEQISEFSKRVILADANLDKVLSAYNKHRDKPIREQAENIIHLFTLTNLGAPAAFKYFDTTIDRKRYTSTKEVLDATLIHQSITGLYETRIDLSQLGGDGGGGGEAAAKGSSGGWVQEISDSRPMLHIYLNGRRFLGLLNTGADKTCIAGRDWPANWPIHQTESSLQGLGMACGVARSSQPLRWQHEDKSGIIHPFVIPTLPFTLWGRDIMKDIKVRLMTDSPDDSQDLMIGAIESNLFADQISWKSDQPVWLNQWPLKQEKLQALQQLVTEQLQLGHLEESNSPWNTPVFVIKKKSGKWRLLQDLRAVNATMHDMGALQPGLPSPVAPPKGWEIIIIDLQDCFFNIKLHPEDCKRFAFSVPSPNFKRPYQRFQWKVLPQGMKNSPTLCQKFVDKAILTVRDKYQDSYIVHYMDDILLAHPSRSIVDEILTSMIQALNKHGLVVSTEKIQKYDNLKYLGTHIQGDSVSYQKLQIRTDKLRTLNDFQKLLGNINWIRPFLKLTTGELKPLFEILNPDSNPISTRKLTPEACKALQLMNERLSTARVKRLDLSQPWSLCILKTEYTPTACLWQDGVVEWIHLPHISPKVITPYDIFCTQLIIKGRHRSKELFSKDPDYIVVPYTKVQFDLLLQEKEDWPISLLGFLGEVHFHLPKDPLLTFTLQTAIIFPHMTSTTPLEKGIVIFTDGSANGRSVTYIQGREPIIKENTQNTAQQAEIVAVITAFEEVSQPFNLYTDSKYVTGLFPEIETATLSPRTKIYTELKHLQRLIHKRQEKFYIGHIRGHTGLPGPLAQGNAYADSLTRILTAGKRTADGSEFEKRTADGSEFESPKKKAKVE

SEQ ID NO: 3249 - protein, 2116 aa, synthetic construct
MPAAKRVKLDGGDKKYSIGLDIGTNSVGWAVITDEYKVPSKKFKVLGNTDRHSIKKNLIGALLFDSGETAEATRLKRTARRRYTRRKNRICYLQEIFSNEMAKVDDSFFHRLEESFLVEEDKKHERHPIFGNIVDEVAYHEKYPTIYHLRKKLVDSTDKADLRLIYLALAHMIKFRGHFLIEGDLNPDNSDVDKLFIQLVQTYNQLFEENPINASGVDAKAILSARLSKSRRLENLIAQLPGEKKNGLFGNLIALSLGLTPNFKSNFDLAEDAKLQLSKDTYDDDLDNLLAQIGDQYADLFLAAKNLSDAILLSDILRVNTEITKAPLSASMIKRYDEHHQDLTLLKALVRQQLPEKYKEIFFDQSKNGYAGYIDGGASQEEFYKFIKPILEKMDGTEELLVKLNREDLLRKQRTFDNGSIPHQIHLGELHAILRRQEDFYPFLKDNREKIEKILTFRIPYYVGPLARGNSRFAWMTRKSEETITPWNFEEVVDKGASAQSFIERMTNFDKNLPNEKVLPKHSLLYEYFTVYNELTKVKYVTEGMRKPAFLSGEQKKAIVDLLFKTNRKVTVKQLKEDYFKKIECFDSVEISGVEDRFNASLGTYHDLLKIIKDKDFLDNEENEDILEDIVLTLTLFEDREMIEERLKTYAHLFDDKVMKQLKRRRYTGWGRLSRKLINGIRDKQSGKTILDFLKSDGFANRNFMQLIHDDSLTFKEDIQKAQVSGQGDSLHEHIANLAGSPAIKKGILQTVKVVDELVKVMGRHKPENIVIEMARENQTTQKGQKNSRERMKRIEEGIKELGSQILKEHPVENTQLQNEKLYLYYLQNGRDMYVDQELDINRLSDYDVDHIVPQSFLKDDSIDNKVLTRSDKARGKSDNVPSEEVVKKMKNYWRQLLNAKLITQRKFDNLTKAERGGLSELDKAGFIKRQLVETRQITKHVAQILDSRMNTKYDENDKLIREVKVITLKSKLVSDFRKDFQFYKVREINNYHHAHDAYLNAVVGTALIKKYPKLESEFVYGDYKVYDVRKMIAKSEQEIGKATAKYFFYSNIMNFFKTEITLANGEIRKRPLIETNGETGEIVWDKGRDFATVRKVLSMPQVNIVKKTEVQTGGFSKESILPKRNSDKLIARKKDWDPKKYGGFDSPTVAYSVLVVAKVEKGKSKKLKSVKELLGITIMERSSFEKNPIDFLEAKGYKEVKKDLIIKLPKYSLFELENGRKRMLASAGELQKGNELALPSKYVNFLYLASHYEKLKGSPEDNEQKQLFVEQHKHYLDEIIEQISEFSKRVILADANLDKVLSAYNKHRDKPIREQAENIIHLFTLTNLGAPAAFKYFDTTIDRKRYTSTKEVLDATLIHQSITGLYETRIDLSQLGGDGGEAAAKGGGGSSGGWVQEISDSRPMLHIYLNGRRFLGLLNTGADKTCIAGRDWPANWPIHQTESSLQGLGMACGVARSSQPLRWQHEDKSGIIHPFVIPTLPFTLWGRDIMKDIKVRLMTDSPDDSQDLMIGAIESNLFADQISWKSDQPVWLNQWPLKQEKLQALQQLVTEQLQLGHLEESNSPWNTPVFVIKKKSGKWRLLQDLRAVNATMHDMGALQPGLPSPVAPPKGWEIIIIDLQDCFFNIKLHPEDCKRFAFSVPSPNFKRPYQRFQWKVLPQGMKNSPTLCQKFVDKAILTVRDKYQDSYIVHYMDDILLAHPSRSIVDEILTSMIQALNKHGLVVSTEKIQKYDNLKYLGTHIQGDSVSYQKLQIRTDKLRTLNDFQKLLGNINWIRPFLKLTTGELKPLFEILNPDSNPISTRKLTPEACKALQLMNERLSTARVKRLDLSQPWSLCILKTEYTPTACLWQDGVVEWIHLPHISPKVITPYDIFCTQLIIKGRHRSKELFSKDPDYIVVPYTKVQFDLLLQEKEDWPISLLGFLGEVHFHLPKDPLLTFTLQTAIIFPHMTSTTPLEKGIVIFTDGSANGRSVTYIQGREPIIKENTQNTAQQAEIVAVITAFEEVSQPFNLYTDSKYVTGLFPEIETATLSPRTKIYTELKHLQRLIHKRQEKFYIGHIRGHTGLPGPLAQGNAYADSLTRILTAGKRTADGSEFEKRTADGSEFESPKKKAKVE

SEQ ID NO: 3250 - protein, 2116 aa, synthetic construct
MPAAKRVKLDGGDKKYSIGLDIGTNSVGWAVITDEYKVPSKKFKVLGNTDRHSIKKNLIGALLFDSGETAEATRLKRTARRRYTRRKNRICYLQEIFSNEMAKVDDSFFHRLEESFLVEEDKKHERHPIFGNIVDEVAYHEKYPTIYHLRKKLVDSTDKADLRLIYLALAHMIKFRGHFLIEGDLNPDNSDVDKLFIQLVQTYNQLFEENPINASGVDAKAILSARLSKSRRLENLIAQLPGEKKNGLFGNLIALSLGLTPNFKSNFDLAEDAKLQLSKDTYDDDLDNLLAQIGDQYADLFLAAKNLSDAILLSDILRVNTEITKAPLSASMIKRYDEHHQDLTLLKALVRQQLPEKYKEIFFDQSKNGYAGYIDGGASQEEFYKFIKPILEKMDGTEELLVKLNREDLLRKQRTFDNGSIPHQIHLGELHAILRRQEDFYPFLKDNREKIEKILTFRIPYYVGPLARGNSRFAWMTRKSEETITPWNFEEVVDKGASAQSFIERMTNFDKNLPNEKVLPKHSLLYEYFTVYNELTKVKYVTEGMRKPAFLSGEQKKAIVDLLFKTNRKVTVKQLKEDYFKKIECFDSVEISGVEDRFNASLGTYHDLLKIIKDKDFLDNEENEDILEDIVLTLTLFEDREMIEERLKTYAHLFDDKVMKQLKRRRYTGWGRLSRKLINGIRDKQSGKTILDFLKSDGFANRNFMQLIHDDSLTFKEDIQKAQVSGQGDSLHEHIANLAGSPAIKKGILQTVKVVDELVKVMGRHKPENIVIEMARENQTTQKGQKNSRERMKRIEEGIKELGSQILKEHPVENTQLQNEKLYLYYLQNGRDMYVDQELDINRLSDYDVDHIVPQSFLKDDSIDNKVLTRSDKARGKSDNVPSEEVVKKMKNYWRQLLNAKLITQRKFDNLTKAERGGLSELDKAGFIKRQLVETRQITKHVAQILDSRMNTKYDENDKLIREVKVITLKSKLVSDFRKDFQFYKVREINNYHHAHDAYLNAVVGTALIKKYPKLESEFVYGDYKVYDVRKMIAKSEQEIGKATAKYFFYSNIMNFFKTEITLANGEIRKRPLIETNGETGEIVWDKGRDFATVRKVLSMPQVNIVKKTEVQTGGFSKESILPKRNSDKLIARKKDWDPKKYGGFDSPTVAYSVLVVAKVEKGKSKKLKSVKELLGITIMERSSFEKNPIDFLEAKGYKEVKKDLIIKLPKYSLFELENGRKRMLASAGELQKGNELALPSKYVNFLYLASHYEKLKGSPEDNEQKQLFVEQHKHYLDEIIEQISEFSKRVILADANLDKVLSAYNKHRDKPIREQAENIIHLFTLTNLGAPAAFKYFDTTIDRKRYTSTKEVLDATLIHQSITGLYETRIDLSQLGGDGGEAAAKGSSGGSGGVQEISDSRPMLHIYLNGRRFLGLLDTGADKTCIAGRDWPANWPIHQTESSLQGLGMACGVARSSQPLRWQHEDKSGIIHPFVIPTLPFTLWGRDIMKDIKVRLMTDSPDDSQDLMIGAIESNLFADQISWKSDQPVWLNQWPLKQEKLQALQQLVTEQLQLGHLEESNSPWNTPVFVIKKKSGKWRLLQDLRAVNATMHDMGALQPGLPSPPAVPKGWEIIIIDLQDCFFNIKLHPEDCKRFAFSVPSPNFKRPYQRFQWKVLPQGMKNSPTLCQKFVDKAILTVRDKYQDSYIVHYMDDILLAHPSRSIVDEILTSMIQALNKHGLVVSTEKIQKYDNLKYLGTHIQGDSVSYQKLQIRTDKLRTLNDFQKLLGNINWIRPFLKLTTGELKPLFEILNPDSNPISTRKLTPEACKALQLMNERLSTARVKRLDLSQPWSLCILKTEYTPTACLWQDGVVEWIHLPHISPKVITPYDIFCTQLIIKGRHRSKELFSKDPDYIVVPYTKVQFDLLLQEKEDWPISLLGFLGEVHFHLPKDPLLTFTLQTAIIFPHMTSTTPLEKGIVIFTDGSANGRSVTYIQGREPIIKENTQNTAQQAEIVAVITAFEEVSQPFNLYTDSKYVTGLFPEIETATLSPRTKIYTELKHLQRLIHKRQEKFYIGHIRGHTGLPGPLAQGNAYADSLTRILTAAGKRTADGSEFEKRTADGSEFESPKKKAKVE

SEQ ID NO: 3251 - protein, 2116 aa, synthetic construct
MPAAKRVKLDGGDKKYSIGLDIGTNSVGWAVITDEYKVPSKKFKVLGNTDRHSIKKNLIGALLFDSGETAEATRLKRTARRRYTRRKNRICYLQEIFSNEMAKVDDSFFHRLEESFLVEEDKKHERHPIFGNIVDEVAYHEKYPTIYHLRKKLVDSTDKADLRLIYLALAHMIKFRGHFLIEGDLNPDNSDVDKLFIQLVQTYNQLFEENPINASGVDAKAILSARLSKSRRLENLIAQLPGEKKNGLFGNLIALSLGLTPNFKSNFDLAEDAKLQLSKDTYDDDLDNLLAQIGDQYADLFLAAKNLSDAILLSDILRVNTEITKAPLSASMIKRYDEHHQDLTLLKALVRQQLPEKYKEIFFDQSKNGYAGYIDGGASQEEFYKFIKPILEKMDGTEELLVKLNREDLLRKQRTFDNGSIPHQIHLGELHAILRRQEDFYPFLKDNREKIEKILTFRIPYYVGPLARGNSRFAWMTRKSEETITPWNFEEVVDKGASAQSFIERMTNFDKNLPNEKVLPKHSLLYEYFTVYNELTKVKYVTEGMRKPAFLSGEQKKAIVDLLFKTNRKVTVKQLKEDYFKKIECFDSVEISGVEDRFNASLGTYHDLLKIIKDKDFLDNEENEDILEDIVLTLTLFEDREMIEERLKTYAHLFDDKVMKQLKRRRYTGWGRLSRKLINGIRDKQSGKTILDFLKSDGFANRNFMQLIHDDSLTFKEDIQKAQVSGQGDSLHEHIANLAGSPAIKKGILQTVKVVDELVKVMGRHKPENIVIEMARENQTTQKGQKNSRERMKRIEEGIKELGSQILKEHPVENTQLQNEKLYLYYLQNGRDMYVDQELDINRLSDYDVDHIVPQSFLKDDSIDNKVLTRSDKARGKSDNVPSEEVVKKMKNYWRQLLNAKLITQRKFDNLTKAERGGLSELDKAGFIKRQLVETRQITKHVAQILDSRMNTKYDENDKLIREVKVITLKSKLVSDFRKDFQFYKVREINNYHHAHDAYLNAVVGTALIKKYPKLESEFVYGDYKVYDVRKMIAKSEQEIGKATAKYFFYSNIMNFFKTEITLANGEIRKRPLIETNGETGEIVWDKGRDFATVRKVLSMPQVNIVKKTEVQTGGFSKESILPKRNSDKLIARKKDWDPKKYGGFDSPTVAYSVLVVAKVEKGKSKKLKSVKELLGITIMERSSFEKNPIDFLEAKGYKEVKKDLIIKLPKYSLFELENGRKRMLASAGELQKGNELALPSKYVNFLYLASHYEKLKGSPEDNEQKQLFVEQHKHYLDEIIEQISEFSKRVILADANLDKVLSAYNKHRDKPIREQAENIIHLFTLTNLGAPAAFKYFDTTIDRKRYTSTKEVLDATLIHQSITGLYETRIDLSQLGGDGGPAPEAAAKGGSGGVQEISDSRPMLHIYLNGRRFLGLLDTGADKTCIAGRDWPANWPIHQTESSLQGLGMACGVARSSQPLRWQHEDKSGIIHPFVIPTLPFTLWGRDIMKDIKVRLMTDSPDDSQDLMIGAIESNLFADQISWKSDQPVWLNQWPLKQEKLQALQQLVTEQLQLGHLEESNSPWNTPVFVIKKKSGKWRLLQDLRAVNATMHDMGALQPGLPSPPAVPKGWEIIIIDLQDCFFNIKLHPEDCKRFAFSVPSPNFKRPYQRFQWKVLPQGMKNSPTLCQKFVDKAILTVRDKYQDSYIVHYMDDILLAHPSRSIVDEILTSMIQALNKHGLVVSTEKIQKYDNLKYLGTHIQGDSVSYQKLQIRTDKLRTLNDFQKLLGNINWIRPFLKLTTGELKPLFEILNPDSNPISTRKLTPEACKALQLMNERLSTARVKRLDLSQPWSLCILKTEYTPTACLWQDGVVEWIHLPHISPKVITPYDIFCTQLIIKGRHRSKELFSKDPDYIVVPYTKVQFDLLLQEKEDWPISLLGFLGEVHFHLPKDPLLTFTLQTAIIFPHMTSTTPLEKGIVIFTDGSANGRSVTYIQGREPIIKENTQNTAQQAEIVAVITAFEEVSQPFNLYTDSKYVTGLFPEIETATLSPRTKIYTELKHLQRLIHKRQEKFYIGHIRGHTGLPGPLAQGNAYADSLTRILTAAGKRTADGSEFEKRTADGSEFESPKKKAKVE

SEQ ID NO: 3252 - protein, 2116 aa, synthetic construct
MPAAKRVKLDGGDKKYSIGLDIGTNSVGWAVITDEYKVPSKKFKVLGNTDRHSIKKNLIGALLFDSGETAEATRLKRTARRRYTRRKNRICYLQEIFSNEMAKVDDSFFHRLEESFLVEEDKKHERHPIFGNIVDEVAYHEKYPTIYHLRKKLVDSTDKADLRLIYLALAHMIKFRGHFLIEGDLNPDNSDVDKLFIQLVQTYNQLFEENPINASGVDAKAILSARLSKSRRLENLIAQLPGEKKNGLFGNLIALSLGLTPNFKSNFDLAEDAKLQLSKDTYDDDLDNLLAQIGDQYADLFLAAKNLSDAILLSDILRVNTEITKAPLSASMIKRYDEHHQDLTLLKALVRQQLPEKYKEIFFDQSKNGYAGYIDGGASQEEFYKFIKPILEKMDGTEELLVKLNREDLLRKQRTFDNGSIPHQIHLGELHAILRRQEDFYPFLKDNREKIEKILTFRIPYYVGPLARGNSRFAWMTRKSEETITPWNFEEVVDKGASAQSFIERMTNFDKNLPNEKVLPKHSLLYEYFTVYNELTKVKYVTEGMRKPAFLSGEQKKAIVDLLFKTNRKVTVKQLKEDYFKKIECFDSVEISGVEDRFNASLGTYHDLLKIIKDKDFLDNEENEDILEDIVLTLTLFEDREMIEERLKTYAHLFDDKVMKQLKRRRYTGWGRLSRKLINGIRDKQSGKTILDFLKSDGFANRNFMQLIHDDSLTFKEDIQKAQVSGQGDSLHEHIANLAGSPAIKKGILQTVKVVDELVKVMGRHKPENIVIEMARENQTTQKGQKNSRERMKRIEEGIKELGSQILKEHPVENTQLQNEKLYLYYLQNGRDMYVDQELDINRLSDYDVDHIVPQSFLKDDSIDNKVLTRSDKARGKSDNVPSEEVVKKMKNYWRQLLNAKLITQRKFDNLTKAERGGLSELDKAGFIKRQLVETRQITKHVAQILDSRMNTKYDENDKLIREVKVITLKSKLVSDFRKDFQFYKVREINNYHHAHDAYLNAVVGTALIKKYPKLESEFVYGDYKVYDVRKMIAKSEQEIGKATAKYFFYSNIMNFFKTEITLANGEIRKRPLIETNGETGEIVWDKGRDFATVRKVLSMPQVNIVKKTEVQTGGFSKESILPKRNSDKLIARKKDWDPKKYGGFDSPTVAYSVLVVAKVEKGKSKKLKSVKELLGITIMERSSFEKNPIDFLEAKGYKEVKKDLIIKLPKYSLFELENGRKRMLASAGELQKGNELALPSKYVNFLYLASHYEKLKGSPEDNEQKQLFVEQHKHYLDEIIEQISEFSKRVILADANLDKVLSAYNKHRDKPIREQAENIIHLFTLTNLGAPAAFKYFDTTIDRKRYTSTKEVLDATLIHQSITGLYETRIDLSQLGGDGGGGGGSSEAAAKGGVQEISDSRPMLHIYLNGRRFLGLLDTGADKTCIAGRDWPANWPIHQTESSLQGLGMACGVARSSQPLRWQHEDKSGIIHPFVIPTLPFTLWGRDIMKDIKVRLMTDSPDDSQDLMIGAIESNLFADQISWKSDQPVWLNQWPLKQEKLQALQQLVTEQLQLGHLEESNSPWNTPVFVIKKKSGKWRLLQDLRAVNATMHDMGALQPGLPSPVAVPKGWEIIIIDLQDCFFNIKLHPEDCKRFAFSVPSPNFKRPYQRFQWKVLPQGMKNSPTLCQKFVDKAILTVRDKYQDSYIVHYMDDILLAHPSRSIVDEILTSMIQALNKHGLVVSTEKIQKYDNLKYLGTHIQGDSVSYQKLQIRTDKLRTLNDFQKLLGNINWIRPFLKLTTGELKPLFEILNPDSNPISTRKLTPEACKALQLMNERLSTARVKRLDLSQPWSLCILKTEYTPTACLWQDGVVEWIHLPHISPKVITPYDIFCTQLIIKGRHRSKELFSKDPDYIVVPYTKVQFDLLLQEKEDWPISLLGFLGEVHFHLPKDPLLTFTLQTAIIFPHMTSTTPLEKGIVIFTDGSANGRSVTYIQGREPIIKENTQNTAQQAEIVAVITAFEEVSQPFNLYTDSKYVTGLFPEIETATLSPRTKIYTELKHLQRLIHKRQEKFYIGHIRGHTGLPGPLAQGNAYADSLTRILTAAGKRTADGSEFEKRTADGSEFESPKKKAKVE

SEQ ID NO: 3253 - protein, 2114 aa, synthetic construct
MPAAKRVKLDGGDKKYSIGLDIGTNSVGWAVITDEYKVPSKKFKVLGNTDRHSIKKNLIGALLFDSGETAEATRLKRTARRRYTRRKNRICYLQEIFSNEMAKVDDSFFHRLEESFLVEEDKKHERHPIFGNIVDEVAYHEKYPTIYHLRKKLVDSTDKADLRLIYLALAHMIKFRGHFLIEGDLNPDNSDVDKLFIQLVQTYNQLFEENPINASGVDAKAILSARLSKSRRLENLIAQLPGEKKNGLFGNLIALSLGLTPNFKSNFDLAEDAKLQLSKDTYDDDLDNLLAQIGDQYADLFLAAKNLSDAILLSDILRVNTEITKAPLSASMIKRYDEHHQDLTLLKALVRQQLPEKYKEIFFDQSKNGYAGYIDGGASQEEFYKFIKPILEKMDGTEELLVKLNREDLLRKQRTFDNGSIPHQIHLGELHAILRRQEDFYPFLKDNREKIEKILTFRIPYYVGPLARGNSRFAWMTRKSEETITPWNFEEVVDKGASAQSFIERMTNFDKNLPNEKVLPKHSLLYEYFTVYNELTKVKYVTEGMRKPAFLSGEQKKAIVDLLFKTNRKVTVKQLKEDYFKKIECFDSVEISGVEDRFNASLGTYHDLLKIIKDKDFLDNEENEDILEDIVLTLTLFEDREMIEERLKTYAHLFDDKVMKQLKRRRYTGWGRLSRKLINGIRDKQSGKTILDFLKSDGFANRNFMQLIHDDSLTFKEDIQKAQVSGQGDSLHEHIANLAGSPAIKKGILQTVKVVDELVKVMGRHKPENIVIEMARENQTTQKGQKNSRERMKRIEEGIKELGSQILKEHPVENTQLQNEKLYLYYLQNGRDMYVDQELDINRLSDYDVDHIVPQSFLKDDSIDNKVLTRSDKARGKSDNVPSEEVVKKMKNYWRQLLNAKLITQRKFDNLTKAERGGLSELDKAGFIKRQLVETRQITKHVAQILDSRMNTKYDENDKLIREVKVITLKSKLVSDFRKDFQFYKVREINNYHHAHDAYLNAVVGTALIKKYPKLESEFVYGDYKVYDVRKMIAKSEQEIGKATAKYFFYSNIMNFFKTEITLANGEIRKRPLIETNGETGEIVWDKGRDFATVRKVLSMPQVNIVKKTEVQTGGFSKESILPKRNSDKLIARKKDWDPKKYGGFDSPTVAYSVLVVAKVEKGKSKKLKSVKELLGITIMERSSFEKNPIDFLEAKGYKEVKKDLIIKLPKYSLFELENGRKRMLASAGELQKGNELALPSKYVNFLYLASHYEKLKGSPEDNEQKQLFVEQHKHYLDEIIEQISEFSKRVILADANLDKVLSAYNKHRDKPIREQAENIIHLFTLTNLGAPAAFKYFDTTIDRKRYTSTKEVLDATLIHQSITGLYETRIDLSQLGGDGGGGGGGSGSSGGVQEISDSRPMLHIYLNGRRFLGLLDTGADKTCIAGRDWPANWPIHQTESSLQGLGMACGVARSSQPLRWQHEDKSGIIHPFVIPTLPFTLWGRDIMKDIKVRLMTDSPDDSQDLMIGAIESNLFADQISWKSDQPVWLNQWPLKQEKLQALQQLVTEQLQLGHLEESNSPWNTPVFVIKKKSGKWRLLQDLRAVNATMHDMGALQPGLPSPVAVPKGWEIIIIDLQDCFFNIKLHPEDCKRFAFSVPSPNFKRPYQRFQWKVLPQGMKNSPTLCQKFVDKAILTVRDKYQDSYIVHYMDDILLAHPSRSIVDEILTSMIQALNKHGLVVSTEKIQKYDNLKYLGTHIQGDSVSYQKLQIRTDKLRTLNDFQKLLGNINWIRPFLKLTTGELKPLFEILNPDSNPISTRKLTPEACKALQLMNERLSTARVKRLDLSQPWSLCILKTEYTPTACLWQDGVVEWIHLPHISPKVITPYDIFCTQLIIKGRHRSKELFSKDPDYIVVPYTKVQFDLLLQEKEDWPISLLGFLGEVHFHLPKDPLLTFTLQTAIIFPHMTSTTPLEKGIVIFTDGSANGRSVTYIQGREPIIKENTQNTAQQAEIVAVITAFEEVSQPFNLYTDSKYVTGLFPEIETATLSPRTKIYTELKHLQRLIHKRQEKFYIGHIRGHTGLPGPLAQGNAYADSLTRILTAAGKRTADGSEFEKRTADGSEFESPKKKAKVE

SEQ ID NO: 3254 - protein, 2125 aa, synthetic construct
MPAAKRVKLDGGDKKYSIGLDIGTNSVGWAVITDEYKVPSKKFKVLGNTDRHSIKKNLIGALLFDSGETAEATRLKRTARRRYTRRKNRICYLQEIFSNEMAKVDDSFFHRLEESFLVEEDKKHERHPIFGNIVDEVAYHEKYPTIYHLRKKLVDSTDKADLRLIYLALAHMIKFRGHFLIEGDLNPDNSDVDKLFIQLVQTYNQLFEENPINASGVDAKAILSARLSKSRRLENLIAQLPGEKKNGLFGNLIALSLGLTPNFKSNFDLAEDAKLQLSKDTYDDDLDNLLAQIGDQYADLFLAAKNLSDAILLSDILRVNTEITKAPLSASMIKRYDEHHQDLTLLKALVRQQLPEKYKEIFFDQSKNGYAGYIDGGASQEEFYKFIKPILEKMDGTEELLVKLNREDLLRKQRTFDNGSIPHQIHLGELHAILRRQEDFYPFLKDNREKIEKILTFRIPYYVGPLARGNSRFAWMTRKSEETITPWNFEEVVDKGASAQSFIERMTNFDKNLPNEKVLPKHSLLYEYFTVYNELTKVKYVTEGMRKPAFLSGEQKKAIVDLLFKTNRKVTVKQLKEDYFKKIECFDSVEISGVEDRFNASLGTYHDLLKIIKDKDFLDNEENEDILEDIVLTLTLFEDREMIEERLKTYAHLFDDKVMKQLKRRRYTGWGRLSRKLINGIRDKQSGKTILDFLKSDGFANRNFMQLIHDDSLTFKEDIQKAQVSGQGDSLHEHIANLAGSPAIKKGILQTVKVVDELVKVMGRHKPENIVIEMARENQTTQKGQKNSRERMKRIEEGIKELGSQILKEHPVENTQLQNEKLYLYYLQNGRDMYVDQELDINRLSDYDVDHIVPQSFLKDDSIDNKVLTRSDKARGKSDNVPSEEVVKKMKNYWRQLLNAKLITQRKFDNLTKAERGGLSELDKAGFIKRQLVETRQITKHVAQILDSRMNTKYDENDKLIREVKVITLKSKLVSDFRKDFQFYKVREINNYHHAHDAYLNAVVGTALIKKYPKLESEFVYGDYKVYDVRKMIAKSEQEIGKATAKYFFYSNIMNFFKTEITLANGEIRKRPLIETNGETGEIVWDKGRDFATVRKVLSMPQVNIVKKTEVQTGGFSKESILPKRNSDKLIARKKDWDPKKYGGFDSPTVAYSVLVVAKVEKGKSKKLKSVKELLGITIMERSSFEKNPIDFLEAKGYKEVKKDLIIKLPKYSLFELENGRKRMLASAGELQKGNELALPSKYVNFLYLASHYEKLKGSPEDNEQKQLFVEQHKHYLDEIIEQISEFSKRVILADANLDKVLSAYNKHRDKPIREQAENIIHLFTLTNLGAPAAFKYFDTTIDRKRYTSTKEVLDATLIHQSITGLYETRIDLSQLGGDGGGGGGSGGGGSGGGGSGGGGSGGVQEISDSRPMLHIYLNGRRFLGLLDTGADKTCIAGRDWPANWPIHQTESSLQGLGMACGVARSSQPLRWQHEDKSGIIHPFVIPTLPFTLWGRDIMKDIKVRLMTDSPDDSQDLMIGAIESNLFADQISWKSDQPVWLNQWPLKQEKLQALQQLVTEQLQLGHLEESNSPWNTPVFVIKKKSGKWRLLQDLRAVNATMHDMGALQPGLPSPVAVPKGWEIIIIDLQDCFFNIKLHPEDCKRFAFSVPSPNFKRPYQRFQWKVLPQGMKNSPTLCQKFVDKAILTVRDKYQDSYIVHYMDDILLAHPSRSIVDEILTSMIQALNKHGLVVSTEKIQKYDNLKYLGTHIQGDSVSYQKLQIRTDKLRTLNDFQKLLGNINWIRPFLKLTTGELKPLFEILNPDSNPISTRKLTPEACKALQLMNERLSTARVKRLDLSQPWSLCILKTEYTPTACLWQDGVVEWIHLPHISPKVITPYDIFCTQLIIKGRHRSKELFSKDPDYIVVPYTKVQFDLLLQEKEDWPISLLGFLGEVHFHLPKDPLLTFTLQTAIIFPHMTSTTPLEKGIVIFTDGSANGRSVTYIQGREPIIKENTQNTAQQAEIVAVITAFEEVSQPFNLYTDSKYVTGLFPEIETATLSPRTKIYTELKHLQRLIHKRQEKFYIGHIRGHTGLPGPLAQGNAYADSLTRILTAAGKRTADGSEFEKRTADGSEFESPKKKAKVE

SEQ ID NO: 3255 - protein, 2116 aa, synthetic construct
MPAAKRVKLDGGDKKYSIGLDIGTNSVGWAVITDEYKVPSKKFKVLGNTDRHSIKKNLIGALLFDSGETAEATRLKRTARRRYTRRKNRICYLQEIFSNEMAKVDDSFFHRLEESFLVEEDKKHERHPIFGNIVDEVAYHEKYPTIYHLRKKLVDSTDKADLRLIYLALAHMIKFRGHFLIEGDLNPDNSDVDKLFIQLVQTYNQLFEENPINASGVDAKAILSARLSKSRRLENLIAQLPGEKKNGLFGNLIALSLGLTPNFKSNFDLAEDAKLQLSKDTYDDDLDNLLAQIGDQYADLFLAAKNLSDAILLSDILRVNTEITKAPLSASMIKRYDEHHQDLTLLKALVRQQLPEKYKEIFFDQSKNGYAGYIDGGASQEEFYKFIKPILEKMDGTEELLVKLNREDLLRKQRTFDNGSIPHQIHLGELHAILRRQEDFYPFLKDNREKIEKILTFRIPYYVGPLARGNSRFAWMTRKSEETITPWNFEEVVDKGASAQSFIERMTNFDKNLPNEKVLPKHSLLYEYFTVYNELTKVKYVTEGMRKPAFLSGEQKKAIVDLLFKTNRKVTVKQLKEDYFKKIECFDSVEISGVEDRFNASLGTYHDLLKIIKDKDFLDNEENEDILEDIVLTLTLFEDREMIEERLKTYAHLFDDKVMKQLKRRRYTGWGRLSRKLINGIRDKQSGKTILDFLKSDGFANRNFMQLIHDDSLTFKEDIQKAQVSGQGDSLHEHIANLAGSPAIKKGILQTVKVVDELVKVMGRHKPENIVIEMARENQTTQKGQKNSRERMKRIEEGIKELGSQILKEHPVENTQLQNEKLYLYYLQNGRDMYVDQELDINRLSDYDVDHIVPQSFLKDDSIDNKVLTRSDKARGKSDNVPSEEVVKKMKNYWRQLLNAKLITQRKFDNLTKAERGGLSELDKAGFIKRQLVETRQITKHVAQILDSRMNTKYDENDKLIREVKVITLKSKLVSDFRKDFQFYKVREINNYHHAHDAYLNAVVGTALIKKYPKLESEFVYGDYKVYDVRKMIAKSEQEIGKATAKYFFYSNIMNFFKTEITLANGEIRKRPLIETNGETGEIVWDKGRDFATVRKVLSMPQVNIVKKTEVQTGGFSKESILPKRNSDKLIARKKDWDPKKYGGFDSPTVAYSVLVVAKVEKGKSKKLKSVKELLGITIMERSSFEKNPIDFLEAKGYKEVKKDLIIKLPKYSLFELENGRKRMLASAGELQKGNELALPSKYVNFLYLASHYEKLKGSPEDNEQKQLFVEQHKHYLDEIIEQISEFSKRVILADANLDKVLSAYNKHRDKPIREQAENIIHLFTLTNLGAPAAFKYFDTTIDRKRYTSTKEVLDATLIHQSITGLYETRIDLSQLGGDGGPAPEAAAKGGGGGVQEISDSRPMLHIYLNGRRFLGLLDTGADKTCIAGRDWPANWPIHQTESSLQGLGMACGVARSSQPLRWQHEDKSGIIHPFVIPTLPFTLWGRDIMKDIKVRLMTDSPDDSQDLMIGAIESNLFADQISWKSDQPVWLNQWPLKQEKLQALQQLVTEQLQLGHLEESNSPWNTPVFVIKKKSGKWRLLQDLRAVNATMHDMGALQPGLPSPVAVPKGWEIIIIDLQDCFFNIKLHPEDCKRFAFSVPSPNFKRPYQRFQWKVLPQGMKNSPTLCQKFVDKAILTVRDKYQDSYIVHYMDDILLAHPSRSIVDEILTSMIQALNKHGLVVSTEKIQKYDNLKYLGTHIQGDSVSYQKLQIRTDKLRTLNDFQKLLGNINWIRPFLKLTTGELKPLFEILNPDSNPISTRKLTPEACKALQLMNERLSTARVKRLDLSQPWSLCILKTEYTPTACLWQDGVVEWIHLPHISPKVITPYDIFCTQLIIKGRHRSKELFSKDPDYIVVPYTKVQFDLLLQEKEDWPISLLGFLGEVHFHLPKDPLLTFTLQTAIIFPHMTSTTPLEKGIVIFTDGSANGRSVTYIQGREPIIKENTQNTAQQAEIVAVITAFEEVSQPFNLYTDSKYVTGLFPEIETATLSPRTKIYTELKHLQRLIHKRQEKFYIGHIRGHTGLPGPLAQGNAYADSLTRILTAAGKRTADGSEFEKRTADGSEFESPKKKAKVE

SEQ ID NO: 3256 - protein, 2112 aa, synthetic construct
MPAAKRVKLDGGDKKYSIGLDIGTNSVGWAVITDEYKVPSKKFKVLGNTDRHSIKKNLIGALLFDSGETAEATRLKRTARRRYTRRKNRICYLQEIFSNEMAKVDDSFFHRLEESFLVEEDKKHERHPIFGNIVDEVAYHEKYPTIYHLRKKLVDSTDKADLRLIYLALAHMIKFRGHFLIEGDLNPDNSDVDKLFIQLVQTYNQLFEENPINASGVDAKAILSARLSKSRRLENLIAQLPGEKKNGLFGNLIALSLGLTPNFKSNFDLAEDAKLQLSKDTYDDDLDNLLAQIGDQYADLFLAAKNLSDAILLSDILRVNTEITKAPLSASMIKRYDEHHQDLTLLKALVRQQLPEKYKEIFFDQSKNGYAGYIDGGASQEEFYKFIKPILEKMDGTEELLVKLNREDLLRKQRTFDNGSIPHQIHLGELHAILRRQEDFYPFLKDNREKIEKILTFRIPYYVGPLARGNSRFAWMTRKSEETITPWNFEEVVDKGASAQSFIERMTNFDKNLPNEKVLPKHSLLYEYFTVYNELTKVKYVTEGMRKPAFLSGEQKKAIVDLLFKTNRKVTVKQLKEDYFKKIECFDSVEISGVEDRFNASLGTYHDLLKIIKDKDFLDNEENEDILEDIVLTLTLFEDREMIEERLKTYAHLFDDKVMKQLKRRRYTGWGRLSRKLINGIRDKQSGKTILDFLKSDGFANRNFMQLIHDDSLTFKEDIQKAQVSGQGDSLHEHIANLAGSPAIKKGILQTVKVVDELVKVMGRHKPENIVIEMARENQTTQKGQKNSRERMKRIEEGIKELGSQILKEHPVENTQLQNEKLYLYYLQNGRDMYVDQELDINRLSDYDVDHIVPQSFLKDDSIDNKVLTRSDKARGKSDNVPSEEVVKKMKNYWRQLLNAKLITQRKFDNLTKAERGGLSELDKAGFIKRQLVETRQITKHVAQILDSRMNTKYDENDKLIREVKVITLKSKLVSDFRKDFQFYKVREINNYHHAHDAYLNAVVGTALIKKYPKLESEFVYGDYKVYDVRKMIAKSEQEIGKATAKYFFYSNIMNFFKTEITLANGEIRKRPLIETNGETGEIVWDKGRDFATVRKVLSMPQVNIVKKTEVQTGGFSKESILPKRNSDKLIARKKDWDPKKYGGFDSPTVAYSVLVVAKVEKGKSKKLKSVKELLGITIMERSSFEKNPIDFLEAKGYKEVKKDLIIKLPKYSLFELENGRKRMLASAGELQKGNELALPSKYVNFLYLASHYEKLKGSPEDNEQKQLFVEQHKHYLDEIIEQISEFSKRVILADANLDKVLSAYNKHRDKPIREQAENIIHLFTLTNLGAPAAFKYFDTTIDRKRYTSTKEVLDATLIHQSITGLYETRIDLSQLGGDGGPAPAPAPGGVQEISDSRPMLHIYLNGRRFLGLLDTGADKTCIAGRDWPANWPIHQTESSLQGLGMACGVARSSQPLRWQHEDKSGIIHPFVIPTLPFTLWGRDIMKDIKVRLMTDSPDDSQDLMIGAIESNLFADQISWKSDQPVWLNQWPLKQEKLQALQQLVTEQLQLGHLEESNSPWNTPVFVIKKKSGKWRLLQDLRAVNATMHDMGALQPGLPSPVAVPKGWEIIIIDLQDCFFNIKLHPEDCKRFAFSVPSPNFKRPYQRFQWKVLPQGMKNSPTLCQKFVDKAILTVRDKYQDSYIVHYMDDILLAHPSRSIVDEILTSMIQALNKHGLVVSTEKIQKYDNLKYLGTHIQGDSVSYQKLQIRTDKLRTLNDFQKLLGNINWIRPFLKLTTGELKPLFEILNPDSNPISTRKLTPEACKALQLMNERLSTARVKRLDLSQPWSLCILKTEYTPTACLWQDGVVEWIHLPHISPKVITPYDIFCTQLIIKGRHRSKELFSKDPDYIVVPYTKVQFDLLLQEKEDWPISLLGFLGEVHFHLPKDPLLTFTLQTAIIFPHMTSTTPLEKGIVIFTDGSANGRSVTYIQGREPIIKENTQNTAQQAEIVAVITAFEEVSQPFNLYTDSKYVTGLFPEIETATLSPRTKIYTELKHLQRLIHKRQEKFYIGHIRGHTGLPGPLAQGNAYADSLTRILTAAGKRTADGSEFEKRTADGSEFESPKKKAKVE

SEQ ID NO: 3257 - protein, 2116 aa, synthetic construct
MPAAKRVKLDGGDKKYSIGLDIGTNSVGWAVITDEYKVPSKKFKVLGNTDRHSIKKNLIGALLFDSGETAEATRLKRTARRRYTRRKNRICYLQEIFSNEMAKVDDSFFHRLEESFLVEEDKKHERHPIFGNIVDEVAYHEKYPTIYHLRKKLVDSTDKADLRLIYLALAHMIKFRGHFLIEGDLNPDNSDVDKLFIQLVQTYNQLFEENPINASGVDAKAILSARLSKSRRLENLIAQLPGEKKNGLFGNLIALSLGLTPNFKSNFDLAEDAKLQLSKDTYDDDLDNLLAQIGDQYADLFLAAKNLSDAILLSDILRVNTEITKAPLSASMIKRYDEHHQDLTLLKALVRQQLPEKYKEIFFDQSKNGYAGYIDGGASQEEFYKFIKPILEKMDGTEELLVKLNREDLLRKQRTFDNGSIPHQIHLGELHAILRRQEDFYPFLKDNREKIEKILTFRIPYYVGPLARGNSRFAWMTRKSEETITPWNFEEVVDKGASAQSFIERMTNFDKNLPNEKVLPKHSLLYEYFTVYNELTKVKYVTEGMRKPAFLSGEQKKAIVDLLFKTNRKVTVKQLKEDYFKKIECFDSVEISGVEDRFNASLGTYHDLLKIIKDKDFLDNEENEDILEDIVLTLTLFEDREMIEERLKTYAHLFDDKVMKQLKRRRYTGWGRLSRKLINGIRDKQSGKTILDFLKSDGFANRNFMQLIHDDSLTFKEDIQKAQVSGQGDSLHEHIANLAGSPAIKKGILQTVKVVDELVKVMGRHKPENIVIEMARENQTTQKGQKNSRERMKRIEEGIKELGSQILKEHPVENTQLQNEKLYLYYLQNGRDMYVDQELDINRLSDYDVDHIVPQSFLKDDSIDNKVLTRSDKARGKSDNVPSEEVVKKMKNYWRQLLNAKLITQRKFDNLTKAERGGLSELDKAGFIKRQLVETRQITKHVAQILDSRMNTKYDENDKLIREVKVITLKSKLVSDFRKDFQFYKVREINNYHHAHDAYLNAVVGTALIKKYPKLESEFVYGDYKVYDVRKMIAKSEQEIGKATAKYFFYSNIMNFFKTEITLANGEIRKRPLIETNGETGEIVWDKGRDFATVRKVLSMPQVNIVKKTEVQTGGFSKESILPKRNSDKLIARKKDWDPKKYGGFDSPTVAYSVLVVAKVEKGKSKKLKSVKELLGITIMERSSFEKNPIDFLEAKGYKEVKKDLIIKLPKYSLFELENGRKRMLASAGELQKGNELALPSKYVNFLYLASHYEKLKGSPEDNEQKQLFVEQHKHYLDEIIEQISEFSKRVILADANLDKVLSAYNKHRDKPIREQAENIIHLFTLTNLGAPAAFKYFDTTIDRKRYTSTKEVLDATLIHQSITGLYETRIDLSQLGGDGGEAAAKPAPGGGGGVQEISDSRPMLHIYLNGRRFLGLLDTGADKTCIAGRDWPANWPIHQTESSLQGLGMACGVARSSQPLRWQHEDKSGIIHPFVIPTLPFTLWGRDIMKDIKVRLMTDSPDDSQDLMIGAIESNLFADQISWKSDQPVWLNQWPLKQEKLQALQQLVTEQLQLGHLEESNSPWNTPVFVIKKKSGKWRLLQDLRAVNATMHDMGALQPGLPSPVAVPKGWEIIIIDLQDCFFNIKLHPEDCKRFAFSVPSPNFKRPYQRFQWKVLPQGMKNSPTLCQKFVDKAILTVRDKYQDSYIVHYMDDILLAHPSRSIVDEILTSMIQALNKHGLVVSTEKIQKYDNLKYLGTHIQGDSVSYQKLQIRTDKLRTLNDFQKLLGNINWIRPFLKLTTGELKPLFEILNPDSNPISTRKLTPEACKALQLMNERLSTARVKRLDLSQPWSLCILKTEYTPTACLWQDGVVEWIHLPHISPKVITPYDIFCTQLIIKGRHRSKELFSKDPDYIVVPYTKVQFDLLLQEKEDWPISLLGFLGEVHFHLPKDPLLTFTLQTAIIFPHMTSTTPLEKGIVIFTDGSANGRSVTYIQGREPIIKENTQNTAQQAEIVAVITAFEEVSQPFNLYTDSKYVTGLFPEIETATLSPRTKIYTELKHLQRLIHKRQEKFYIGHIRGHTGLPGPLAQGNAYADSLTRILTAAGKRTADGSEFEKRTADGSEFESPKKKAKVE

SEQ ID NO: 3258 - protein, 2116 aa, synthetic construct
MPAAKRVKLDGGDKKYSIGLDIGTNSVGWAVITDEYKVPSKKFKVLGNTDRHSIKKNLIGALLFDSGETAEATRLKRTARRRYTRRKNRICYLQEIFSNEMAKVDDSFFHRLEESFLVEEDKKHERHPIFGNIVDEVAYHEKYPTIYHLRKKLVDSTDKADLRLIYLALAHMIKFRGHFLIEGDLNPDNSDVDKLFIQLVQTYNQLFEENPINASGVDAKAILSARLSKSRRLENLIAQLPGEKKNGLFGNLIALSLGLTPNFKSNFDLAEDAKLQLSKDTYDDDLDNLLAQIGDQYADLFLAAKNLSDAILLSDILRVNTEITKAPLSASMIKRYDEHHQDLTLLKALVRQQLPEKYKEIFFDQSKNGYAGYIDGGASQEEFYKFIKPILEKMDGTEELLVKLNREDLLRKQRTFDNGSIPHQIHLGELHAILRRQEDFYPFLKDNREKIEKILTFRIPYYVGPLARGNSRFAWMTRKSEETITPWNFEEVVDKGASAQSFIERMTNFDKNLPNEKVLPKHSLLYEYFTVYNELTKVKYVTEGMRKPAFLSGEQKKAIVDLLFKTNRKVTVKQLKEDYFKKIECFDSVEISGVEDRFNASLGTYHDLLKIIKDKDFLDNEENEDILEDIVLTLTLFEDREMIEERLKTYAHLFDDKVMKQLKRRRYTGWGRLSRKLINGIRDKQSGKTILDFLKSDGFANRNFMQLIHDDSLTFKEDIQKAQVSGQGDSLHEHIANLAGSPAIKKGILQTVKVVDELVKVMGRHKPENIVIEMARENQTTQKGQKNSRERMKRIEEGIKELGSQILKEHPVENTQLQNEKLYLYYLQNGRDMYVDQELDINRLSDYDVDHIVPQSFLKDDSIDNKVLTRSDKARGKSDNVPSEEVVKKMKNYWRQLLNAKLITQRKFDNLTKAERGGLSELDKAGFIKRQLVETRQITKHVAQILDSRMNTKYDENDKLIREVKVITLKSKLVSDFRKDFQFYKVREINNYHHAHDAYLNAVVGTALIKKYPKLESEFVYGDYKVYDVRKMIAKSEQEIGKATAKYFFYSNIMNFFKTEITLANGEIRKRPLIETNGETGEIVWDKGRDFATVRKVLSMPQVNIVKKTEVQTGGFSKESILPKRNSDKLIARKKDWDPKKYGGFDSPTVAYSVLVVAKVEKGKSKKLKSVKELLGITIMERSSFEKNPIDFLEAKGYKEVKKDLIIKLPKYSLFELENGRKRMLASAGELQKGNELALPSKYVNFLYLASHYEKLKGSPEDNEQKQLFVEQHKHYLDEIIEQISEFSKRVILADANLDKVLSAYNKHRDKPIREQAENIIHLFTLTNLGAPAAFKYFDTTIDRKRYTSTKEVLDATLIHQSITGLYETRIDLSQLGGDGGPAPGGSEAAAKGGVQEISDSRPMLHIYLNGRRFLGLLDTGADKTCIAGRDWPANWPIHQTESSLQGLGMACGVARSSQPLRWQHEDKSGIIHPFVIPTLPFTLWGRDIMKDIKVRLMTDSPDDSQDLMIGAIESNLFADQISWKSDQPVWLNQWPLKQEKLQALQQLVTEQLQLGHLEESNSPWNTPVFVIKKKSGKWRLLQDLRAVNATMHDMGALQPGLPSPVAVPKGWEIIIIDLQDCFFNIKLHPEDCKRFAFSVPSPNFKRPYQRFQWKVLPQGMKNSPTLCQKFVDKAILTVRDKYQDSYIVHYMDDILLAHPSRSIVDEILTSMIQALNKHGLVVSTEKIQKYDNLKYLGTHIQGDSVSYQKLQIRTDKLRTLNDFQKLLGNINWIRPFLKLTTGELKPLFEILNPDSNPISTRKLTPEACKALQLMNERLSTARVKRLDLSQPWSLCILKTEYTPTACLWQDGVVEWIHLPHISPKVITPYDIFCTQLIIKGRHRSKELFSKDPDYIVVPYTKVQFDLLLQEKEDWPISLLGFLGEVHFHLPKDPLLTFTLQTAIIFPHMTSTTPLEKGIVIFTDGSANGRSVTYIQGREPIIKENTQNTAQQAEIVAVITAFEEVSQPFNLYTDSKYVTGLFPEIETATLSPRTKIYTELKHLQRLIHKRQEKFYIGHIRGHTGLPGPLAQGNAYADSLTRILTAAGKRTADGSEFEKRTADGSEFESPKKKAKVE

SEQ ID NO: 3259 - protein, 2123 aa, synthetic construct
MPAAKRVKLDGGDKKYSIGLDIGTNSVGWAVITDEYKVPSKKFKVLGNTDRHSIKKNLIGALLFDSGETAEATRLKRTARRRYTRRKNRICYLQEIFSNEMAKVDDSFFHRLEESFLVEEDKKHERHPIFGNIVDEVAYHEKYPTIYHLRKKLVDSTDKADLRLIYLALAHMIKFRGHFLIEGDLNPDNSDVDKLFIQLVQTYNQLFEENPINASGVDAKAILSARLSKSRRLENLIAQLPGEKKNGLFGNLIALSLGLTPNFKSNFDLAEDAKLQLSKDTYDDDLDNLLAQIGDQYADLFLAAKNLSDAILLSDILRVNTEITKAPLSASMIKRYDEHHQDLTLLKALVRQQLPEKYKEIFFDQSKNGYAGYIDGGASQEEFYKFIKPILEKMDGTEELLVKLNREDLLRKQRTFDNGSIPHQIHLGELHAILRRQEDFYPFLKDNREKIEKILTFRIPYYVGPLARGNSRFAWMTRKSEETITPWNFEEVVDKGASAQSFIERMTNFDKNLPNEKVLPKHSLLYEYFTVYNELTKVKYVTEGMRKPAFLSGEQKKAIVDLLFKTNRKVTVKQLKEDYFKKIECFDSVEISGVEDRFNASLGTYHDLLKIIKDKDFLDNEENEDILEDIVLTLTLFEDREMIEERLKTYAHLFDDKVMKQLKRRRYTGWGRLSRKLINGIRDKQSGKTILDFLKSDGFANRNFMQLIHDDSLTFKEDIQKAQVSGQGDSLHEHIANLAGSPAIKKGILQTVKVVDELVKVMGRHKPENIVIEMARENQTTQKGQKNSRERMKRIEEGIKELGSQILKEHPVENTQLQNEKLYLYYLQNGRDMYVDQELDINRLSDYDVDHIVPQSFLKDDSIDNKVLTRSDKARGKSDNVPSEEVVKKMKNYWRQLLNAKLITQRKFDNLTKAERGGLSELDKAGFIKRQLVETRQITKHVAQILDSRMNTKYDENDKLIREVKVITLKSKLVSDFRKDFQFYKVREINNYHHAHDAYLNAVVGTALIKKYPKLESEFVYGDYKVYDVRKMIAKSEQEIGKATAKYFFYSNIMNFFKTEITLANGEIRKRPLIETNGETGEIVWDKGRDFATVRKVLSMPQVNIVKKTEVQTGGFSKESILPKRNSDKLIARKKDWDPKKYGGFDSPTVAYSVLVVAKVEKGKSKKLKSVKELLGITIMERSSFEKNPIDFLEAKGYKEVKKDLIIKLPKYSLFELENGRKRMLASAGELQKGNELALPSKYVNFLYLASHYEKLKGSPEDNEQKQLFVEQHKHYLDEIIEQISEFSKRVILADANLDKVLSAYNKHRDKPIREQAENIIHLFTLTNLGAPAAFKYFDTTIDRKRYTSTKEVLDATLIHQSITGLYETRIDLSQLGGDGGGSSGSSGSSGSSGSSGSSGGVQEISDSRPMLHIYLNGRRFLGLLDTGADKTCIAGRDWPANWPIHQTESSLQGLGMACGVARSSQPLRWQHEDKSGIIHPFVIPTLPFTLWGRDIMKDIKVRLMTDSPDDSQDLMIGAIESNLFADQISWKSDQPVWLNQWPLKQEKLQALQQLVTEQLQLGHLEESNSPWNTPVFVIKKKSGKWRLLQDLRAVNATMHDMGALQPGLPSPVAVPKGWEIIIIDLQDCFFNIKLHPEDCKRFAFSVPSPNFKRPYQRFQWKVLPQGMKNSPTLCQKFVDKAILTVRDKYQDSYIVHYMDDILLAHPSRSIVDEILTSMIQALNKHGLVVSTEKIQKYDNLKYLGTHIQGDSVSYQKLQIRTDKLRTLNDFQKLLGNINWIRPFLKLTTGELKPLFEILNPDSNPISTRKLTPEACKALQLMNERLSTARVKRLDLSQPWSLCILKTEYTPTACLWQDGVVEWIHLPHISPKVITPYDIFCTQLIIKGRHRSKELFSKDPDYIVVPYTKVQFDLLLQEKEDWPISLLGFLGEVHFHLPKDPLLTFTLQTAIIFPHMTSTTPLEKGIVIFTDGSANGRSVTYIQGREPIIKENTQNTAQQAEIVAVITAFEEVSQPFNLYTDSKYVTGLFPEIETATLSPRTKIYTELKHLQRLIHKRQEKFYIGHIRGHTGLPGPLAQGNAYADSLTRILTAAGKRTADGSEFEKRTADGSEFESPKKKAKVE

SEQ ID NO: 3260 - protein, 2125 aa, synthetic construct; identical to SEQ ID NO: 3157

SEQ ID NO: 3261 - protein, 2116 aa, synthetic construct
MPAAKRVKLDGGDKKYSIGLDIGTNSVGWAVITDEYKVPSKKFKVLGNTDRHSIKKNLIGALLFDSGETAEATRLKRTARRRYTRRKNRICYLQEIFSNEMAKVDDSFFHRLEESFLVEEDKKHERHPIFGNIVDEVAYHEKYPTIYHLRKKLVDSTDKADLRLIYLALAHMIKFRGHFLIEGDLNPDNSDVDKLFIQLVQTYNQLFEENPINASGVDAKAILSARLSKSRRLENLIAQLPGEKKNGLFGNLIALSLGLTPNFKSNFDLAEDAKLQLSKDTYDDDLDNLLAQIGDQYADLFLAAKNLSDAILLSDILRVNTEITKAPLSASMIKRYDEHHQDLTLLKALVRQQLPEKYKEIFFDQSKNGYAGYIDGGASQEEFYKFIKPILEKMDGTEELLVKLNREDLLRKQRTFDNGSIPHQIHLGELHAILRRQEDFYPFLKDNREKIEKILTFRIPYYVGPLARGNSRFAWMTRKSEETITPWNFEEVVDKGASAQSFIERMTNFDKNLPNEKVLPKHSLLYEYFTVYNELTKVKYVTEGMRKPAFLSGEQKKAIVDLLFKTNRKVTVKQLKEDYFKKIECFDSVEISGVEDRFNASLGTYHDLLKIIKDKDFLDNEENEDILEDIVLTLTLFEDREMIEERLKTYAHLFDDKVMKQLKRRRYTGWGRLSRKLINGIRDKQSGKTILDFLKSDGFANRNFMQLIHDDSLTFKEDIQKAQVSGQGDSLHEHIANLAGSPAIKKGILQTVKVVDELVKVMGRHKPENIVIEMARENQTTQKGQKNSRERMKRIEEGIKELGSQILKEHPVENTQLQNEKLYLYYLQNGRDMYVDQELDINRLSDYDVDHIVPQSFLKDDSIDNKVLTRSDKARGKSDNVPSEEVVKKMKNYWRQLLNAKLITQRKFDNLTKAERGGLSELDKAGFIKRQLVETRQITKHVAQILDSRMNTKYDENDKLIREVKVITLKSKLVSDFRKDFQFYKVREINNYHHAHDAYLNAVVGTALIKKYPKLESEFVYGDYKVYDVRKMIAKSEQEIGKATAKYFFYSNIMNFFKTEITLANGEIRKRPLIETNGETGEIVWDKGRDFATVRKVLSMPQVNIVKKTEVQTGGFSKESILPKRNSDKLIARKKDWDPKKYGGFDSPTVAYSVLVVAKVEKGKSKKLKSVKELLGITIMERSSFEKNPIDFLEAKGYKEVKKDLIIKLPKYSLFELENGRKRMLASAGELQKGNELALPSKYVNFLYLASHYEKLKGSPEDNEQKQLFVEQHKHYLDEIIEQISEFSKRVILADANLDKVLSAYNKHRDKPIREQAENIIHLFTLTNLGAPAAFKYFDTTIDRKRYTSTKEVLDATLIHQSITGLYETRIDLSQLGGDGGGGSGSSEAAAKGGVQEISDSRPMLHIYLNGRRFLGLLDTGADKTCIAGRDWPANWPIHQTESSLQGLGMACGVARSSQPLRWQHEDKSGIIHPFVIPTLPFTLWGRDIMKDIKVRLMTDSPDDSQDLMIGAIESNLFADQISWKSDQPVWLNQWPLKQEKLQALQQLVTEQLQLGHLEESNSPWNTPVFVIKKKSGKWRLLQDLRAVNATMHDMGALQPGLPSPVAVPKGWEIIIIDLQDCFFNIKLHPEDCKRFAFSVPSPNFKRPYQRFQWKVLPQGMKNSPTLCQKFVDKAILTVRDKYQDSYIVHYMDDILLAHPSRSIVDEILTSMIQALNKHGLVVSTEKIQKYDNLKYLGTHIQGDSVSYQKLQIRTDKLRTLNDFQKLLGNINWIRPFLKLTTGELKPLFEILNGDSNPISTRKLTPEACKALQLMNERLSTARVKRLDLSQPWSLCILKTEYTPTACLWQDGVVEWIHLPHISPKVITPYDIFCTQLIIKGRHRSKELFSKDPDYIVVPYTKVQFDLLLQEKEDWPISLLGFLGEVHFHLPKDPLLTFTLQTAIIFPHMTSTTPLEKGIVIFTDGSANGRSVTYIQGREPIIKENTQNTAQQAEIVAVITAFEEVSQPFNLYTDSKYVTGLFPEIETATLSPRTKIYTELKHLQRLIHKRQEKFYIGHIRGHTGLPGPLAQGNAYADSLTRILTAAGKRTADGSEFEKRTADGSEFESPKKKAKVE

SEQ ID NO: 3262 - protein, 2114 aa, synthetic construct
MPAAKRVKLDGGDKKYSIGLDIGTNSVGWAVITDEYKVPSKKFKVLGNTDRHSIKKNLIGALLFDSGETAEATRLKRTARRRYTRRKNRICYLQEIFSNEMAKVDDSFFHRLEESFLVEEDKKHERHPIFGNIVDEVAYHEKYPTIYHLRKKLVDSTDKADLRLIYLALAHMIKFRGHFLIEGDLNPDNSDVDKLFIQLVQTYNQLFEENPINASGVDAKAILSARLSKSRRLENLIAQLPGEKKNGLFGNLIALSLGLTPNFKSNFDLAEDAKLQLSKDTYDDDLDNLLAQIGDQYADLFLAAKNLSDAILLSDILRVNTEITKAPLSASMIKRYDEHHQDLTLLKALVRQQLPEKYKEIFFDQSKNGYAGYIDGGASQEEFYKFIKPILEKMDGTEELLVKLNREDLLRKQRTFDNGSIPHQIHLGELHAILRRQEDFYPFLKDNREKIEKILTFRIPYYVGPLARGNSRFAWMTRKSEETITPWNFEEVVDKGASAQSFIERMTNFDKNLPNEKVLPKHSLLYEYFTVYNELTKVKYVTEGMRKPAFLSGEQKKAIVDLLFKTNRKVTVKQLKEDYFKKIECFDSVEISGVEDRFNASLGTYHDLLKIIKDKDFLDNEENEDILEDIVLTLTLFEDREMIEERLKTYAHLFDDKVMKQLKRRRYTGWGRLSRKLINGIRDKQSGKTILDFLKSDGFANRNFMQLIHDDSLTFKEDIQKAQVSGQGDSLHEHIANLAGSPAIKKGILQTVKVVDELVKVMGRHKPENIVIEMARENQTTQKGQKNSRERMKRIEEGIKELGSQILKEHPVENTQLQNEKLYLYYLQNGRDMYVDQELDINRLSDYDVDHIVPQSFLKDDSIDNKVLTRSDKARGKSDNVPSEEVVKKMKNYWRQLLNAKLITQRKFDNLTKAERGGLSELDKAGFIKRQLVETRQITKHVAQILDSRMNTKYDENDKLIREVKVITLKSKLVSDFRKDFQFYKVREINNYHHAHDAYLNAVVGTALIKKYPKLESEFVYGDYKVYDVRKMIAKSEQEIGKATAKYFFYSNIMNFFKTEITLANGEIRKRPLIETNGETGEIVWDKGRDFATVRKVLSMPQVNIVKKTEVQTGGFSKESILPKRNSDKLIARKKDWDPKKYGGFDSPTVAYSVLVVAKVEKGKSKKLKSVKELLGITIMERSSFEKNPIDFLEAKGYKEVKKDLIIKLPKYSLFELENGRKRMLASAGELQKGNELALPSKYVNFLYLASHYEKLKGSPEDNEQKQLFVEQHKHYLDEIIEQISEFSKRVILADANLDKVLSAYNKHRDKPIREQAENIIHLFTLTNLGAPAAFKYFDTTIDRKRYTSTKEVLDATLIHQSITGLYETRIDLSQLGGDGGPAPAPAPAPGGVQEISDSRPMLHIYLNGRRFLGLLDTGADKTCIAGRDWPANWPIHQTESSLQGLGMACGVARSSQPLRWQHEDKSGIIHPFVIPTLPFTLWGRDIMKDIKVRLMTDSPDDSQDLMIGAIESNLFADQISWKSDQPVWLNQWPLKQEKLQALQQLVTEQLQLGHLEESNSPWNTPVFVIKKKSGKWRLLQDLRAVNATMHDMGALQPGLPSPVAVPKGWEIIIIDLQDCFFNIKLHPEDCKRFAFSVPSPNFKRPYQRFQWKVLPQGMKNSPTLCQKFVDKAILTVRDKYQDSYIVHYMDDILLAHPSRSIVDEILTSMIQALNKHGLVVSTEKIQKYDNLKYLGTHIQGDSVSYQKLQIRTDKLRTLNDFQKLLGNINWIRPFLKLTTGELKPLFEILNGDSNPISTRKLTPEACKALQLMNERLSTARVKRLDLSQPWSLCILKTEYTPTACLWQDGVVEWIHLPHISPKVITPYDIFCTQLIIKGRHRSKELFSKDPDYIVVPYTKVQFDLLLQEKEDWPISLLGFLGEVHFHLPKDPLLTFTLQTAIIFPHMTSTTPLEKGIVIFTDGSANGRSVTYIQGREPIIKENTQNTAQQAEIVAVITAFEEVSQPFNLYTDSKYVTGLFPEIETATLSPRTKIYTELKHLQRLIHKRQEKFYIGHIRGHTGLPGPLAQGNAYADSLTRILTAAGKRTADGSEFEKRTADGSEFESPKKKAKVE

SEQ ID NO: 3263 - protein, 2116 aa, synthetic construct; identical to SEQ ID NO: 3146

SEQ ID NO: 3264 - protein, 2114 aa, synthetic construct
MPAAKRVKLDGGDKKYSIGLDIGTNSVGWAVITDEYKVPSKKFKVLGNTDRHSIKKNLIGALLFDSGETAEATRLKRTARRRYTRRKNRICYLQEIFSNEMAKVDDSFFHRLEESFLVEEDKKHERHPIFGNIVDEVAYHEKYPTIYHLRKKLVDSTDKADLRLIYLALAHMIKFRGHFLIEGDLNPDNSDVDKLFIQLVQTYNQLFEENPINASGVDAKAILSARLSKSRRLENLIAQLPGEKKNGLFGNLIALSLGLTPNFKSNFDLAEDAKLQLSKDTYDDDLDNLLAQIGDQYADLFLAAKNLSDAILLSDILRVNTEITKAPLSASMIKRYDEHHQDLTLLKALVRQQLPEKYKEIFFDQSKNGYAGYIDGGASQEEFYKFIKPILEKMDGTEELLVKLNREDLLRKQRTFDNGSIPHQIHLGELHAILRRQEDFYPFLKDNREKIEKILTFRIPYYVGPLARGNSRFAWMTRKSEETITPWNFEEVVDKGASAQSFIERMTNFDKNLPNEKVLPKHSLLYEYFTVYNELTKVKYVTEGMRKPAFLSGEQKKAIVDLLFKTNRKVTVKQLKEDYFKKIECFDSVEISGVEDRFNASLGTYHDLLKIIKDKDFLDNEENEDILEDIVLTLTLFEDREMIEERLKTYAHLFDDKVMKQLKRRRYTGWGRLSRKLINGIRDKQSGKTILDFLKSDGFANRNFMQLIHDDSLTFKEDIQKAQVSGQGDSLHEHIANLAGSPAIKKGILQTVKVVDELVKVMGRHKPENIVIEMARENQTTQKGQKNSRERMKRIEEGIKELGSQILKEHPVENTQLQNEKLYLYYLQNGRDMYVDQELDINRLSDYDVDHIVPQSFLKDDSIDNKVLTRSDKARGKSDNVPSEEVVKKMKNYWRQLLNAKLITQRKFDNLTKAERGGLSELDKAGFIKRQLVETRQITKHVAQILDSRMNTKYDENDKLIREVKVITLKSKLVSDFRKDFQFYKVREINNYHHAHDAYLNAVVGTALIKKYPKLESEFVYGDYKVYDVRKMIAKSEQEIGKATAKYFFYSNIMNFFKTEITLANGEIRKRPLIETNGETGEIVWDKGRDFATVRKVLSMPQVNIVKKTEVQTGGFSKESILPKRNSDKLIARKKDWDPKKYGGFDSPTVAYSVLVVAKVEKGKSKKLKSVKELLGITIMERSSFEKNPIDFLEAKGYKEVKKDLIIKLPKYSLFELENGRKRMLASAGELQKGNELALPSKYVNFLYLASHYEKLKGSPEDNEQKQLFVEQHKHYLDEIIEQISEFSKRVILADANLDKVLSAYNKHRDKPIREQAENIIHLFTLTNLGAPAAFKYFDTTIDRKRYTSTKEVLDATLIHQSITGLYETRIDLSQLGGDGGGSSPAPGGGGGVQEISDSRPMLHIYLNGRRFLGLLDTGADKTCIAGRDWPANWPIHQTESSLQGLGMACGVARSSQPLRWQHEDKSGIIHPFVIPTLPFTLWGRDIMKDIKVRLMTDSPDDSQDLMIGAIESNLFADQISWKSDQPVWLNQWPLKQEKLQALQQLVTEQLQLGHLEESNSPWNTPVFVIKKKSGKWRLLQDLRAVNATMHDMGALQPGLPSPVAVPKGWEIIIIDLQDCFFNIKLHPEDCKRFAFSVPSPNFKRPYQRFQWKVLPQGMKNSPTLCQKFVDKAILTVRDKYQDSYIVHYMDDILLAHPSRSIVDEILTSMIQALNKHGLVVSTEKIQKYDNLKYLGTHIQGDSVSYQKLQIRTDKLRTLNDFQKLLGNINWIRPFLKLTTGELKPLFEILNGDSNPISTRKLTPEACKALQLMNERLSTARVKRLDLSQPWSLCILKTEYTPTACLWQDGVVEWIHLPHISPKVITPYDIFCTQLIIKGRHRSKELFSKDPDYIVVPYTKVQFDLLLQEKEDWPISLLGFLGEVHFHLPKDPLLTFTLQTAIIFPHMTSTTPLEKGIVIFTDGSANGRSVTYIQGREPIIKENTQNTAQQAEIVAVITAFEEVSQPFNLYTDSKYVTGLFPEIETATLSPRTKIYTELKHLQRLIHKRQEKFYIGHIRGHTGLPGPLAQGNAYADSLTRILTAAGKRTADGSEFEKRTADGSEFESPKKKAKVE

SEQ ID NO: 3265 - protein, 2116 aa, synthetic construct
MPAAKRVKLDGGDKKYSIGLDIGTNSVGWAVITDEYKVPSKKFKVLGNTDRHSIKKNLIGALLFDSGETAEATRLKRTARRRYTRRKNRICYLQEIFSNEMAKVDDSFFHRLEESFLVEEDKKHERHPIFGNIVDEVAYHEKYPTIYHLRKKLVDSTDKADLRLIYLALAHMIKFRGHFLIEGDLNPDNSDVDKLFIQLVQTYNQLFEENPINASGVDAKAILSARLSKSRRLENLIAQLPGEKKNGLFGNLIALSLGLTPNFKSNFDLAEDAKLQLSKDTYDDDLDNLLAQIGDQYADLFLAAKNLSDAILLSDILRVNTEITKAPLSASMIKRYDEHHQDLTLLKALVRQQLPEKYKEIFFDQSKNGYAGYIDGGASQEEFYKFIKPILEKMDGTEELLVKLNREDLLRKQRTFDNGSIPHQIHLGELHAILRRQEDFYPFLKDNREKIEKILTFRIPYYVGPLARGNSRFAWMTRKSEETITPWNFEEVVDKGASAQSFIERMTNFDKNLPNEKVLPKHSLLYEYFTVYNELTKVKYVTEGMRKPAFLSGEQKKAIVDLLFKTNRKVTVKQLKEDYFKKIECFDSVEISGVEDRFNASLGTYHDLLKIIKDKDFLDNEENEDILEDIVLTLTLFEDREMIEERLKTYAHLFDDKVMKQLKRRRYTGWGRLSRKLINGIRDKQSGKTILDFLKSDGFANRNFMQLIHDDSLTFKEDIQKAQVSGQGDSLHEHIANLAGSPAIKKGILQTVKVVDELVKVMGRHKPENIVIEMARENQTTQKGQKNSRERMKRIEEGIKELGSQILKEHPVENTQLQNEKLYLYYLQNGRDMYVDQELDINRLSDYDVDHIVPQSFLKDDSIDNKVLTRSDKARGKSDNVPSEEVVKKMKNYWRQLLNAKLITQRKFDNLTKAERGGLSELDKAGFIKRQLVETRQITKHVAQILDSRMNTKYDENDKLIREVKVITLKSKLVSDFRKDFQFYKVREINNYHHAHDAYLNAVVGTALIKKYPKLESEFVYGDYKVYDVRKMIAKSEQEIGKATAKYFFYSNIMNFFKTEITLANGEIRKRPLIETNGETGEIVWDKGRDFATVRKVLSMPQVNIVKKTEVQTGGFSKESILPKRNSDKLIARKKDWDPKKYGGFDSPTVAYSVLVVAKVEKGKSKKLKSVKELLGITIMERSSFEKNPIDFLEAKGYKEVKKDLIIKLPKYSLFELENGRKRMLASAGELQKGNELALPSKYVNFLYLASHYEKLKGSPEDNEQKQLFVEQHKHYLDEIIEQISEFSKRVILADANLDKVLSAYNKHRDKPIREQAENIIHLFTLTNLGAPAAFKYFDTTIDRKRYTSTKEVLDATLIHQSITGLYETRIDLSQLGGDGGGSSEAAAKPAPGGVQEISDSRPMLHIYLNGRRFLGLLDTGADKTCIAGRDWPANWPIHQTESSLQGLGMACGVARSSQPLRWQHEDKSGIIHPFVIPTLPFTLWGRDIMKDIKVRLMTDSPDDSQDLMIGAIESNLFADQISWKSDQPVWLNQWPLKQEKLQALQQLVTEQLQLGHLEESNSPWNTPVFVIKKKSGKWRLLQDLRAVNATMHDMGALQPGLPSPVAVPKGWEIIIIDLQDCFFNIKLHPEDCKRFAFSVPSPNFKRPYQRFQWKVLPQGMKNSPTLCQKFVDKAILTVRDKYQDSYIVHYMDDILLAHPSRSIVDEILTSMIQALNKHGLVVSTEKIQKYDNLKYLGTHIQGDSVSYQKLQIRTDKLRTLNDFQKLLGNINWIRPFLKLTTGELKPLFEILNGDSNPISTRKLTPEACKALQLMNERLSTARVKRLDLSQPWSLCILKTEYTPTACLWQDGVVEWIHLPHISPKVITPYDIFCTQLIIKGRHRSKELFSKDPDYIVVPYTKVQFDLLLQEKEDWPISLLGFLGEVHFHLPKDPLLTFTLQTAIIFPHMTSTTPLEKGIVIFTDGSANGRSVTYIQGREPIIKENTQNTAQQAEIVAVITAFEEVSQPFNLYTDSKYVTGLFPEIETATLSPRTKIYTELKHLQRLIHKRQEKFYIGHIRGHTGLPGPLAQGNAYADSLTRILTAAGKRTADGSEFEKRTADGSEFESPKKKAKVE

SEQ ID NO: 3266 - protein, 2120 aa, synthetic construct
MPAAKRVKLDGGDKKYSIGLDIGTNSVGWAVITDEYKVPSKKFKVLGNTDRHSIKKNLIGALLFDSGETAEATRLKRTARRRYTRRKNRICYLQEIFSNEMAKVDDSFFHRLEESFLVEEDKKHERHPIFGNIVDEVAYHEKYPTIYHLRKKLVDSTDKADLRLIYLALAHMIKFRGHFLIEGDLNPDNSDVDKLFIQLVQTYNQLFEENPINASGVDAKAILSARLSKSRRLENLIAQLPGEKKNGLFGNLIALSLGLTPNFKSNFDLAEDAKLQLSKDTYDDDLDNLLAQIGDQYADLFLAAKNLSDAILLSDILRVNTEITKAPLSASMIKRYDEHHQDLTLLKALVRQQLPEKYKEIFFDQSKNGYAGYIDGGASQEEFYKFIKPILEKMDGTEELLVKLNREDLLRKQRTFDNGSIPHQIHLGELHAILRRQEDFYPFLKDNREKIEKILTFRIPYYVGPLARGNSRFAWMTRKSEETITPWNFEEVVDKGASAQSFIERMTNFDKNLPNEKVLPKHSLLYEYFTVYNELTKVKYVTEGMRKPAFLSGEQKKAIVDLLFKTNRKVTVKQLKEDYFKKIECFDSVEISGVEDRFNASLGTYHDLLKIIKDKDFLDNEENEDILEDIVLTLTLFEDREMIEERLKTYAHLFDDKVMKQLKRRRYTGWGRLSRKLINGIRDKQSGKTILDFLKSDGFANRNFMQLIHDDSLTFKEDIQKAQVSGQGDSLHEHIANLAGSPAIKKGILQTVKVVDELVKVMGRHKPENIVIEMARENQTTQKGQKNSRERMKRIEEGIKELGSQILKEHPVENTQLQNEKLYLYYLQNGRDMYVDQELDINRLSDYDVDHIVPQSFLKDDSIDNKVLTRSDKARGKSDNVPSEEVVKKMKNYWRQLLNAKLITQRKFDNLTKAERGGLSELDKAGFIKRQLVETRQITKHVAQILDSRMNTKYDENDKLIREVKVITLKSKLVSDFRKDFQFYKVREINNYHHAHDAYLNAVVGTALIKKYPKLESEFVYGDYKVYDVRKMIAKSEQEIGKATAKYFFYSNIMNFFKTEITLANGEIRKRPLIETNGETGEIVWDKGRDFATVRKVLSMPQVNIVKKTEVQTGGFSKESILPKRNSDKLIARKKDWDPKKYGGFDSPTVAYSVLVVAKVEKGKSKKLKSVKELLGITIMERSSFEKNPIDFLEAKGYKEVKKDLIIKLPKYSLFELENGRKRMLASAGELQKGNELALPSKYVNFLYLASHYEKLKGSPEDNEQKQLFVEQHKHYLDEIIEQISEFSKRVILADANLDKVLSAYNKHRDKPIREQAENIIHLFTLTNLGAPAAFKYFDTTIDRKRYTSTKEVLDATLIHQSITGLYETRIDLSQLGGDGGGGSGGSGGSGGSGGSGGWVQEISDSRPMLHIYLNGRRFLGLLNTGADKTCIAGRDWPANWPIHQTESSLQGLGMACGVARSSQPLRWQHEDKSGIIHPFVIPTLPFTLWGRDIMKDIKVRLMTDSPDDSQDLMIGAIESNLFADQISWKSDQPVWLNQWPLKQEKLQALQQLVTEQLQLGHLEESNSPWNTPVFVIKKKSGKWRLLQDLRAVNATMHDMGALQPGLPSPVAVPKGWEIIIIDLQDCFFNIKLHPEDCKRFAFSVPSPNFKRPYQRFQWKVLPQGMKNSPTLCQKFVDKAILTVRDKYQDSYIVHYMDDILLAHPSRSIVDEILTSMIQALNKHGLVVSTEKIQKYDNLKYLGTHIQGDSVSYQKLQIRTDKLRTLNDFQKLLGNINWIRPFLKLTTGELKPLFEILNGDSNPISTRKLTPEACKALQLMNERLSTARVKRLDLSQPWSLCILKTEYTPTACLWQDGVVEWIHLPHISPKVITPYDIFCTQLIIKGRHRSKELFSKDPDYIVVPYTKVQFDLLLQEKEDWPISLLGFLGEVHFHLPKDPLLTFTLQTAIIFPHMTSTTPLEKGIVIFTDGSANGRSVTYIQGREPIIKENTQNTAQQAEIVAVITAFEEVSQPFNLYTDSKYVTGLFPEIETATLSPRTKIYTELKHLQRLIHKRQEKFYIGHIRGHTGLPGPLAQGNAYADSLTRILTAGKRTADGSEFEKRTADGSEFESPKKKAKVE

SEQ ID NO: 3267 - protein, 2151 aa, synthetic construct
MPAAKRVKLDGGDKKYSIGLDIGTNSVGWAVITDEYKVPSKKFKVLGNTDRHSIKKNLIGALLFDSGETAEATRLKRTARRRYTRRKNRICYLQEIFSNEMAKVDDSFFHRLEESFLVEEDKKHERHPIFGNIVDEVAYHEKYPTIYHLRKKLVDSTDKADLRLIYLALAHMIKFRGHFLIEGDLNPDNSDVDKLFIQLVQTYNQLFEENPINASGVDAKAILSARLSKSRRLENLIAQLPGEKKNGLFGNLIALSLGLTPNFKSNFDLAEDAKLQLSKDTYDDDLDNLLAQIGDQYADLFLAAKNLSDAILLSDILRVNTEITKAPLSASMIKRYDEHHQDLTLLKALVRQQLPEKYKEIFFDQSKNGYAGYIDGGASQEEFYKFIKPILEKMDGTEELLVKLNREDLLRKQRTFDNGSIPHQIHLGELHAILRRQEDFYPFLKDNREKIEKILTFRIPYYVGPLARGNSRFAWMTRKSEETITPWNFEEVVDKGASAQSFIERMTNFDKNLPNEKVLPKHSLLYEYFTVYNELTKVKYVTEGMRKPAFLSGEQKKAIVDLLFKTNRKVTVKQLKEDYFKKIECFDSVEISGVEDRFNASLGTYHDLLKIIKDKDFLDNEENEDILEDIVLTLTLFEDREMIEERLKTYAHLFDDKVMKQLKRRRYTGWGRLSRKLINGIRDKQSGKTILDFLKSDGFANRNFMQLIHDDSLTFKEDIQKAQVSGQGDSLHEHIANLAGSPAIKKGILQTVKVVDELVKVMGRHKPENIVIEMARENQTTQKGQKNSRERMKRIEEGIKELGSQILKEHPVENTQLQNEKLYLYYLQNGRDMYVDQELDINRLSDYDVDHIVPQSFLKDDSIDNKVLTRSDKARGKSDNVPSEEVVKKMKNYWRQLLNAKLITQRKFDNLTKAERGGLSELDKAGFIKRQLVETRQITKHVAQILDSRMNTKYDENDKLIREVKVITLKSKLVSDFRKDFQFYKVREINNYHHAHDAYLNAVVGTALIKKYPKLESEFVYGDYKVYDVRKMIAKSEQEIGKATAKYFFYSNIMNFFKTEITLANGEIRKRPLIETNGETGEIVWDKGRDFATVRKVLSMPQVNIVKKTEVQTGGFSKESILPKRNSDKLIARKKDWDPKKYGGFDSPTVAYSVLVVAKVEKGKSKKLKSVKELLGITIMERSSFEKNPIDFLEAKGYKEVKKDLIIKLPKYSLFELENGRKRMLASAGELQKGNELALPSKYVNFLYLASHYEKLKGSPEDNEQKQLFVEQHKHYLDEIIEQISEFSKRVILADANLDKVLSAYNKHRDKPIREQAENIIHLFTLTNLGAPAAFKYFDTTIDRKRYTSTKEVLDATLIHQSITGLYETRIDLSQLGGDGGAEAAAKEAAAKEAAAKEAAAKALEAEAAAKEAAAKEAAAKEAAAKAGGWVQEISDSRPMLHIYLNGRRFLGLLNTGADKTCIAGRDWPANWPIHQTESSLQGLGMACGVARSSQPLRWQHEDKSGIIHPFVIPTLPFTLWGRDIMKDIKVRLMTDSPDDSQDLMIGAIESNLFADQISWKSDQPVWLNQWPLKQEKLQALQQLVTEQLQLGHLEESNSPWNTPVFVIKKKSGKWRLLQDLRAVNATMHDMGALQPGLPSPVAVPKGWEIIIIDLQDCFFNIKLHPEDCKRFAFSVPSPNFKRPYQRFQWKVLPQGMKNSPTLCQKFVDKAILTVRDKYQDSYIVHYMDDILLAHPSRSIVDEILTSMIQALNKHGLVVSTEKIQKYDNLKYLGTHIQGDSVSYQKLQIRTDKLRTLNDFQKLLGNINWIRPFLKLTTGELKPLFEILNGDSNPISTRKLTPEACKALQLMNERLSTARVKRLDLSQPWSLCILKTEYTPTACLWQDGVVEWIHLPHISPKVITPYDIFCTQLIIKGRHRSKELFSKDPDYIVVPYTKVQFDLLLQEKEDWPISLLGFLGEVHFHLPKDPLLTFTLQTAIIFPHMTSTTPLEKGIVIFTDGSANGRSVTYIQGREPIIKENTQNTAQQAEIVAVITAFEEVSQPFNLYTDSKYVTGLFPEIETATLSPRTKIYTELKHLQRLIHKRQEKFYIGHIRGHTGLPGPLAQGNAYADSLTRILTAGKRTADGSEFEKRTADGSEFESPKKKAKVE

SEQ ID NO: 3268 - protein, 2135 aa, synthetic construct; identical to SEQ ID NO: 3172

SEQ ID NO: 3269 - protein, 2114 aa, synthetic construct
MPAAKRVKLDGGDKKYSIGLDIGTNSVGWAVITDEYKVPSKKFKVLGNTDRHSIKKNLIGALLFDSGETAEATRLKRTARRRYTRRKNRICYLQEIFSNEMAKVDDSFFHRLEESFLVEEDKKHERHPIFGNIVDEVAYHEKYPTIYHLRKKLVDSTDKADLRLIYLALAHMIKFRGHFLIEGDLNPDNSDVDKLFIQLVQTYNQLFEENPINASGVDAKAILSARLSKSRRLENLIAQLPGEKKNGLFGNLIALSLGLTPNFKSNFDLAEDAKLQLSKDTYDDDLDNLLAQIGDQYADLFLAAKNLSDAILLSDILRVNTEITKAPLSASMIKRYDEHHQDLTLLKALVRQQLPEKYKEIFFDQSKNGYAGYIDGGASQEEFYKFIKPILEKMDGTEELLVKLNREDLLRKQRTFDNGSIPHQIHLGELHAILRRQEDFYPFLKDNREKIEKILTFRIPYYVGPLARGNSRFAWMTRKSEETITPWNFEEVVDKGASAQSFIERMTNFDKNLPNEKVLPKHSLLYEYFTVYNELTKVKYVTEGMRKPAFLSGEQKKAIVDLLFKTNRKVTVKQLKEDYFKKIECFDSVEISGVEDRFNASLGTYHDLLKIIKDKDFLDNEENEDILEDIVLTLTLFEDREMIEERLKTYAHLFDDKVMKQLKRRRYTGWGRLSRKLINGIRDKQSGKTILDFLKSDGFANRNFMQLIHDDSLTFKEDIQKAQVSGQGDSLHEHIANLAGSPAIKKGILQTVKVVDELVKVMGRHKPENIVIEMARENQTTQKGQKNSRERMKRIEEGIKELGSQILKEHPVENTQLQNEKLYLYYLQNGRDMYVDQELDINRLSDYDVDHIVPQSFLKDDSIDNKVLTRSDKARGKSDNVPSEEVVKKMKNYWRQLLNAKLITQRKFDNLTKAERGGLSELDKAGFIKRQLVETRQITKHVAQILDSRMNTKYDENDKLIREVKVITLKSKLVSDFRKDFQFYKVREINNYHHAHDAYLNAVVGTALIKKYPKLESEFVYGDYKVYDVRKMIAKSEQEIGKATAKYFFYSNIMNFFKTEITLANGEIRKRPLIETNGETGEIVWDKGRDFATVRKVLSMPQVNIVKKTEVQTGGFSKESILPKRNSDKLIARKKDWDPKKYGGFDSPTVAYSVLVVAKVEKGKSKKLKSVKELLGITIMERSSFEKNPIDFLEAKGYKEVKKDLIIKLPKYSLFELENGRKRMLASAGELQKGNELALPSKYVNFLYLASHYEKLKGSPEDNEQKQLFVEQHKHYLDEIIEQISEFSKRVILADANLDKVLSAYNKHRDKPIREQAENIIHLFTLTNLGAPAAFKYFDTTIDRKRYTSTKEVLDATLIHQSITGLYETRIDLSQLGGDGGGGSGGGGSSGGWVQEISDSRPMLHIYLNGRRFLGLLNTGADKTCIAGRDWPANWPIHQTESSLQGLGMACGVARSSQPLRWQHEDKSGIIHPFVIPTLPFTLWGRDIMKDIKVRLMTDSPDDSQDLMIGAIESNLFADQISWKSDQPVWLNQWPLKQEKLQALQQLVTEQLQLGHLEESNSPWNTPVFVIKKKSGKWRLLQDLRAVNATMHDMGALQPGLPSPVAVPKGWEIIIIDLQDCFFNIKLHPEDCKRFAFSVPSPNFKRPYQRFQWKVLPQGMKNSPTLCQKFVDKAILTVRDKYQDSYIVHYMDDILLAHPSRSIVDEILTSMIQALNKHGLVVSTEKIQKYDNLKYLGTHIQGDSVSYQKLQIRTDKLRTLNDFQKLLGNINWIRPFLKLTTGELKPLFEILNGDSNPISTRKLTPEACKALQLMNERLSTARVKRLDLSQPWSLCILKTEYTPTACLWQDGVVEWIHLPHISPKVITPYDIFCTQLIIKGRHRSKELFSKDPDYIVVPYTKVQFDLLLQEKEDWPISLLGFLGEVHFHLPKDPLLTFTLQTAIIFPHMTSTTPLEKGIVIFTDGSANGRSVTYIQGREPIIKENTQNTAQQAEIVAVITAFEEVSQPFNLYTDSKYVTGLFPEIETATLSPRTKIYTELKHLQRLIHKRQEKFYIGHIRGHTGLPGPLAQGNAYADSLTRILTAGKRTADGSEFEKRTADGSEFESPKKKAKVE

SEQ ID NO: 3270 - protein, 2116 aa, synthetic construct; identical to SEQ ID NO: 3181

SEQ ID NO: 3271 - protein, 2116 aa, synthetic construct
MPAAKRVKLDGGDKKYSIGLDIGTNSVGWAVITDEYKVPSKKFKVLGNTDRHSIKKNLIGALLFDSGETAEATRLKRTARRRYTRRKNRICYLQEIFSNEMAKVDDSFFHRLEESFLVEEDKKHERHPIFGNIVDEVAYHEKYPTIYHLRKKLVDSTDKADLRLIYLALAHMIKFRGHFLIEGDLNPDNSDVDKLFIQLVQTYNQLFEENPINASGVDAKAILSARLSKSRRLENLIAQLPGEKKNGLFGNLIALSLGLTPNFKSNFDLAEDAKLQLSKDTYDDDLDNLLAQIGDQYADLFLAAKNLSDAILLSDILRVNTEITKAPLSASMIKRYDEHHQDLTLLKALVRQQLPEKYKEIFFDQSKNGYAGYIDGGASQEEFYKFIKPILEKMDGTEELLVKLNREDLLRKQRTFDNGSIPHQIHLGELHAILRRQEDFYPFLKDNREKIEKILTFRIPYYVGPLARGNSRFAWMTRKSEETITPWNFEEVVDKGASAQSFIERMTNFDKNLPNEKVLPKHSLLYEYFTVYNELTKVKYVTEGMRKPAFLSGEQKKAIVDLLFKTNRKVTVKQLKEDYFKKIECFDSVEISGVEDRFNASLGTYHDLLKIIKDKDFLDNEENEDILEDIVLTLTLFEDREMIEERLKTYAHLFDDKVMKQLKRRRYTGWGRLSRKLINGIRDKQSGKTILDFLKSDGFANRNFMQLIHDDSLTFKEDIQKAQVSGQGDSLHEHIANLAGSPAIKKGILQTVKVVDELVKVMGRHKPENIVIEMARENQTTQKGQKNSRERMKRIEEGIKELGSQILKEHPVENTQLQNEKLYLYYLQNGRDMYVDQELDINRLSDYDVDHIVPQSFLKDDSIDNKVLTRSDKARGKSDNVPSEEVVKKMKNYWRQLLNAKLITQRKFDNLTKAERGGLSELDKAGFIKRQLVETRQITKHVAQILDSRMNTKYDENDKLIREVKVITLKSKLVSDFRKDFQFYKVREINNYHHAHDAYLNAVVGTALIKKYPKLESEFVYGDYKVYDVRKMIAKSEQEIGKATAKYFFYSNIMNFFKTEITLANGEIRKRPLIETNGETGEIVWDKGRDFATVRKVLSMPQVNIVKKTEVQTGGFSKESILPKRNSDKLIARKKDWDPKKYGGFDSPTVAYSVLVVAKVEKGKSKKLKSVKELLGITIMERSSFEKNPIDFLEAKGYKEVKKDLIIKLPKYSLFELENGRKRMLASAGELQKGNELALPSKYVNFLYLASHYEKLKGSPEDNEQKQLFVEQHKHYLDEIIEQISEFSKRVILADANLDKVLSAYNKHRDKPIREQAENIIHLFTLTNLGAPAAFKYFDTTIDRKRYTSTKEVLDATLIHQSITGLYETRIDLSQLGGDGGEAAAKGSSGGGGGWVQEISDSRPMLHIYLNGRRFLGLLNTGADKTCIAGRDWPANWPIHQTESSLQGLGMACGVARSSQPLRWQHEDKSGIIHPFVIPTLPFTLWGRDIMKDIKVRLMTDSPDDSQDLMIGAIESNLFADQISWKSDQPVWLNQWPLKQEKLQALQQLVTEQLQLGHLEESNSPWNTPVFVIKKKSGKWRLLQDLRAVNATMHDMGALQPGLPSPVAVPKGWEIIIIDLQDCFFNIKLHPEDCKRFAFSVPSPNFKRPYQRFQWKVLPQGMKNSPTLCQKFVDKAILTVRDKYQDSYIVHYMDDILLAHPSRSIVDEILTSMIQALNKHGLVVSTEKIQKYDNLKYLGTHIQGDSVSYQKLQIRTDKLRTLNDFQKLLGNINWIRPFLKLTTGELKPLFEILNGDSNPISTRKLTPEACKALQLMNERLSTARVKRLDLSQPWSLCILKTEYTPTACLWQDGVVEWIHLPHISPKVITPYDIFCTQLIIKGRHRSKELFSKDPDYIVVPYTKVQFDLLLQEKEDWPISLLGFLGEVHFHLPKDPLLTFTLQTAIIFPHMTSTTPLEKGIVIFTDGSANGRSVTYIQGREPIIKENTQNTAQQAEIVAVITAFEEVSQPFNLYTDSKYVTGLFPEIETATLSPRTKIYTELKHLQRLIHKRQEKFYIGHIRGHTGLPGPLAQGNAYADSLTRILTAGKRTADGSEFEKRTADGSEFESPKKKAKVE

SEQ ID NO: 3272 - protein, 2114 aa, synthetic construct
MPAAKRVKLDGGDKKYSIGLDIGTNSVGWAVITDEYKVPSKKFKVLGNTDRHSIKKNLIGALLFDSGETAEATRLKRTARRRYTRRKNRICYLQEIFSNEMAKVDDSFFHRLEESFLVEEDKKHERHPIFGNIVDEVAYHEKYPTIYHLRKKLVDSTDKADLRLIYLALAHMIKFRGHFLIEGDLNPDNSDVDKLFIQLVQTYNQLFEENPINASGVDAKAILSARLSKSRRLENLIAQLPGEKKNGLFGNLIALSLGLTPNFKSNFDLAEDAKLQLSKDTYDDDLDNLLAQIGDQYADLFLAAKNLSDAILLSDILRVNTEITKAPLSASMIKRYDEHHQDLTLLKALVRQQLPEKYKEIFFDQSKNGYAGYIDGGASQEEFYKFIKPILEKMDGTEELLVKLNREDLLRKQRTFDNGSIPHQIHLGELHAILRRQEDFYPFLKDNREKIEKILTFRIPYYVGPLARGNSRFAWMTRKSEETITPWNFEEVVDKGASAQSFIERMTNFDKNLPNEKVLPKHSLLYEYFTVYNELTKVKYVTEGMRKPAFLSGEQKKAIVDLLFKTNRKVTVKQLKEDYFKKIECFDSVEISGVEDRFNASLGTYHDLLKIIKDKDFLDNEENEDILEDIVLTLTLFEDREMIEERLKTYAHLFDDKVMKQLKRRRYTGWGRLSRKLINGIRDKQSGKTILDFLKSDGFANRNFMQLIHDDSLTFKEDIQKAQVSGQGDSLHEHIANLAGSPAIKKGILQTVKVVDELVKVMGRHKPENIVIEMARENQTTQKGQKNSRERMKRIEEGIKELGSQILKEHPVENTQLQNEKLYLYYLQNGRDMYVDQELDINRLSDYDVDHIVPQSFLKDDSIDNKVLTRSDKARGKSDNVPSEEVVKKMKNYWRQLLNAKLITQRKFDNLTKAERGGLSELDKAGFIKRQLVETRQITKHVAQILDSRMNTKYDENDKLIREVKVITLKSKLVSDFRKDFQFYKVREINNYHHAHDAYLNAVVGTALIKKYPKLESEFVYGDYKVYDVRKMIAKSEQEIGKATAKYFFYSNIMNFFKTEITLANGEIRKRPLIETNGETGEIVWDKGRDFATVRKVLSMPQVNIVKKTEVQTGGFSKESILPKRNSDKLIARKKDWDPKKYGGFDSPTVAYSVLVVAKVEKGKSKKLKSVKELLGITIMERSSFEKNPIDFLEAKGYKEVKKDLIIKLPKYSLFELENGRKRMLASAGELQKGNELALPSKYVNFLYLASHYEKLKGSPEDNEQKQLFVEQHKHYLDEIIEQISEFSKRVILADANLDKVLSAYNKHRDKPIREQAENIIHLFTLTNLGAPAAFKYFDTTIDRKRYTSTKEVLDATLIHQSITGLYETRIDLSQLGGDGGGGGGGSGSSGGWVQEISDSRPMLHIYLNGRRFLGLLNTGADKTCIAGRDWPANWPIHQTESSLQGLGMACGVARSSQPLRWQHEDKSGIIHPFVIPTLPFTLWGRDIMKDIKVRLMTDSPDDSQDLMIGAIESNLFADQISWKSDQPVWLNQWPLKQEKLQALQQLVTEQLQLGHLEESNSPWNTPVFVIKKKSGKWRLLQDLRAVNATMHDMGALQPGLPSPVAVPKGWEIIIIDLQDCFFNIKLHPEDCKRFAFSVPSPNFKRPYQRFQWKVLPQGMKNSPTLCQKFVDKAILTVRDKYQDSYIVHYMDDILLAHPSRSIVDEILTSMIQALNKHGLVVSTEKIQKYDNLKYLGTHIQGDSVSYQKLQIRTDKLRTLNDFQKLLGNINWIRPFLKLTTGELKPLFEILNGDSNPISTRKLTPEACKALQLMNERLSTARVKRLDLSQPWSLCILKTEYTPTACLWQDGVVEWIHLPHISPKVITPYDIFCTQLIIKGRHRSKELFSKDPDYIVVPYTKVQFDLLLQEKEDWPISLLGFLGEVHFHLPKDPLLTFTLQTAIIFPHMTSTTPLEKGIVIFTDGSANGRSVTYIQGREPIIKENTQNTAQQAEIVAVITAFEEVSQPFNLYTDSKYVTGLFPEIETATLSPRTKIYTELKHLQRLIHKRQEKFYIGHIRGHTGLPGPLAQGNAYADSLTRILTAGKRTADGSEFEKRTADGSEFESPKKKAKVE

SEQ ID NO: 3273 - protein, 2116 aa, synthetic construct
MPAAKRVKLDGGDKKYSIGLDIGTNSVGWAVITDEYKVPSKKFKVLGNTDRHSIKKNLIGALLFDSGETAEATRLKRTARRRYTRRKNRICYLQEIFSNEMAKVDDSFFHRLEESFLVEEDKKHERHPIFGNIVDEVAYHEKYPTIYHLRKKLVDSTDKADLRLIYLALAHMIKFRGHFLIEGDLNPDNSDVDKLFIQLVQTYNQLFEENPINASGVDAKAILSARLSKSRRLENLIAQLPGEKKNGLFGNLIALSLGLTPNFKSNFDLAEDAKLQLSKDTYDDDLDNLLAQIGDQYADLFLAAKNLSDAILLSDILRVNTEITKAPLSASMIKRYDEHHQDLTLLKALVRQQLPEKYKEIFFDQSKNGYAGYIDGGASQEEFYKFIKPILEKMDGTEELLVKLNREDLLRKQRTFDNGSIPHQIHLGELHAILRRQEDFYPFLKDNREKIEKILTFRIPYYVGPLARGNSRFAWMTRKSEETITPWNFEEVVDKGASAQSFIERMTNFDKNLPNEKVLPKHSLLYEYFTVYNELTKVKYVTEGMRKPAFLSGEQKKAIVDLLFKTNRKVTVKQLKEDYFKKIECFDSVEISGVEDRFNASLGTYHDLLKIIKDKDFLDNEENEDILEDIVLTLTLFEDREMIEERLKTYAHLFDDKVMKQLKRRRYTGWGRLSRKLINGIRDKQSGKTILDFLKSDGFANRNFMQLIHDDSLTFKEDIQKAQVSGQGDSLHEHIANLAGSPAIKKGILQTVKVVDELVKVMGRHKPENIVIEMARENQTTQKGQKNSRERMKRIEEGIKELGSQILKEHPVENTQLQNEKLYLYYLQNGRDMYVDQELDINRLSDYDVDHIVPQSFLKDDSIDNKVLTRSDKARGKSDNVPSEEVVKKMKNYWRQLLNAKLITQRKFDNLTKAERGGLSELDKAGFIKRQLVETRQITKHVAQILDSRMNTKYDENDKLIREVKVITLKSKLVSDFRKDFQFYKVREINNYHHAHDAYLNAVVGTALIKKYPKLESEFVYGDYKVYDVRKMIAKSEQEIGKATAKYFFYSNIMNFFKTEITLANGEIRKRPLIETNGETGEIVWDKGRDFATVRKVLSMPQVNIVKKTEVQTGGFSKESILPKRNSDKLIARKKDWDPKKYGGFDSPTVAYSVLVVAKVEKGKSKKLKSVKELLGITIMERSSFEKNPIDFLEAKGYKEVKKDLIIKLPKYSLFELENGRKRMLASAGELQKGNELALPSKYVNFLYLASHYEKLKGSPEDNEQKQLFVEQHKHYLDEIIEQISEFSKRVILADANLDKVLSAYNKHRDKPIREQAENIIHLFTLTNLGAPAAFKYFDTTIDRKRYTSTKEVLDATLIHQSITGLYETRIDLSQLGGDGGEAAAKGGGPAPGGWVQEISDSRPMLHIYLNGRRFLGLLNTGADKTCIAGRDWPANWPIHQTESSLQGLGMACGVARSSQPLRWQHEDKSGIIHPFVIPTLPFTLWGRDIMKDIKVRLMTDSPDDSQDLMIGAIESNLFADQISWKSDQPVWLNQWPLKQEKLQALQQLVTEQLQLGHLEESNSPWNTPVFVIKKKSGKWRLLQDLRAVNATMHDMGALQPGLPSPVAVPKGWEIIIIDLQDCFFNIKLHPEDCKRFAFSVPSPNFKRPYQRFQWKVLPQGMKNSPTLCQKFVDKAILTVRDKYQDSYIVHYMDDILLAHPSRSIVDEILTSMIQALNKHGLVVSTEKIQKYDNLKYLGTHIQGDSVSYQKLQIRTDKLRTLNDFQKLLGNINWIRPFLKLTTGELKPLFEILNGDSNPISTRKLTPEACKALQLMNERLSTARVKRLDLSQPWSLCILKTEYTPTACLWQDGVVEWIHLPHISPKVITPYDIFCTQLIIKGRHRSKELFSKDPDYIVVPYTKVQFDLLLQEKEDWPISLLGFLGEVHFHLPKDPLLTFTLQTAIIFPHMTSTTPLEKGIVIFTDGSANGRSVTYIQGREPIIKENTQNTAQQAEIVAVITAFEEVSQPFNLYTDSKYVTGLFPEIETATLSPRTKIYTELKHLQRLIHKRQEKFYIGHIRGHTGLPGPLAQGNAYADSLTRILTAGKRTADGSEFEKRTADGSEFESPKKKAKVE

SEQ ID NO: 3274 - protein, 2116 aa, synthetic construct
MPAAKRVKLDGGDKKYSIGLDIGTNSVGWAVITDEYKVPSKKFKVLGNTDRHSIKKNLIGALLFDSGETAEATRLKRTARRRYTRRKNRICYLQEIFSNEMAKVDDSFFHRLEESFLVEEDKKHERHPIFGNIVDEVAYHEKYPTIYHLRKKLVDSTDKADLRLIYLALAHMIKFRGHFLIEGDLNPDNSDVDKLFIQLVQTYNQLFEENPINASGVDAKAILSARLSKSRRLENLIAQLPGEKKNGLFGNLIALSLGLTPNFKSNFDLAEDAKLQLSKDTYDDDLDNLLAQIGDQYADLFLAAKNLSDAILLSDILRVNTEITKAPLSASMIKRYDEHHQDLTLLKALVRQQLPEKYKEIFFDQSKNGYAGYIDGGASQEEFYKFIKPILEKMDGTEELLVKLNREDLLRKQRTFDNGSIPHQIHLGELHAILRRQEDFYPFLKDNREKIEKILTFRIPYYVGPLARGNSRFAWMTRKSEETITPWNFEEVVDKGASAQSFIERMTNFDKNLPNEKVLPKHSLLYEYFTVYNELTKVKYVTEGMRKPAFLSGEQKKAIVDLLFKTNRKVTVKQLKEDYFKKIECFDSVEISGVEDRFNASLGTYHDLLKIIKDKDFLDNEENEDILEDIVLTLTLFEDREMIEERLKTYAHLFDDKVMKQLKRRRYTGWGRLSRKLINGIRDKQSGKTILDFLKSDGFANRNFMQLIHDDSLTFKEDIQKAQVSGQGDSLHEHIANLAGSPAIKKGILQTVKVVDELVKVMGRHKPENIVIEMARENQTTQKGQKNSRERMKRIEEGIKELGSQILKEHPVENTQLQNEKLYLYYLQNGRDMYVDQELDINRLSDYDVDHIVPQSFLKDDSIDNKVLTRSDKARGKSDNVPSEEVVKKMKNYWRQLLNAKLITQRKFDNLTKAERGGLSELDKAGFIKRQLVETRQITKHVAQILDSRMNTKYDENDKLIREVKVITLKSKLVSDFRKDFQFYKVREINNYHHAHDAYLNAVVGTALIKKYPKLESEFVYGDYKVYDVRKMIAKSEQEIGKATAKYFFYSNIMNFFKTEITLANGEIRKRPLIETNGETGEIVWDKGRDFATVRKVLSMPQVNIVKKTEVQTGGFSKESILPKRNSDKLIARKKDWDPKKYGGFDSPTVAYSVLVVAKVEKGKSKKLKSVKELLGITIMERSSFEKNPIDFLEAKGYKEVKKDLIIKLPKYSLFELENGRKRMLASAGELQKGNELALPSKYVNFLYLASHYEKLKGSPEDNEQKQLFVEQHKHYLDEIIEQISEFSKRVILADANLDKVLSAYNKHRDKPIREQAENIIHLFTLTNLGAPAAFKYFDTTIDRKRYTSTKEVLDATLIHQSITGLYETRIDLSQLGGDGGPAPEAAAKGGGGGWVQEISDSRPMLHIYLNGRRFLGLLNTGADKTCIAGRDWPANWPIHQTESSLQGLGMACGVARSSQPLRWQHEDKSGIIHPFVIPTLPFTLWGRDIMKDIKVRLMTDSPDDSQDLMIGAIESNLFADQISWKSDQPVWLNQWPLKQEKLQALQQLVTEQLQLGHLEESNSPWNTPVFVIKKKSGKWRLLQDLRAVNATMHDMGALQPGLPSPVAVPKGWEIIIIDLQDCFFNIKLHPEDCKRFAFSVPSPNFKRPYQRFQWKVLPQGMKNSPTLCQKFVDKAILTVRDKYQDSYIVHYMDDILLAHPSRSIVDEILTSMIQALNKHGLVVSTEKIQKYDNLKYLGTHIQGDSVSYQKLQIRTDKLRTLNDFQKLLGNINWIRPFLKLTTGELKPLFEILNGDSNPISTRKLTPEACKALQLMNERLSTARVKRLDLSQPWSLCILKTEYTPTACLWQDGVVEWIHLPHISPKVITPYDIFCTQLIIKGRHRSKELFSKDPDYIVVPYTKVQFDLLLQEKEDWPISLLGFLGEVHFHLPKDPLLTFTLQTAIIFPHMTSTTPLEKGIVIFTDGSANGRSVTYIQGREPIIKENTQNTAQQAEIVAVITAFEEVSQPFNLYTDSKYVTGLFPEIETATLSPRTKIYTELKHLQRLIHKRQEKFYIGHIRGHTGLPGPLAQGNAYADSLTRILTAGKRTADGSEFEKRTADGSEFESPKKKAKVE

SEQ ID NO: 3275 - protein, 2114 aa, synthetic construct
MPAAKRVKLDGGDKKYSIGLDIGTNSVGWAVITDEYKVPSKKFKVLGNTDRHSIKKNLIGALLFDSGETAEATRLKRTARRRYTRRKNRICYLQEIFSNEMAKVDDSFFHRLEESFLVEEDKKHERHPIFGNIVDEVAYHEKYPTIYHLRKKLVDSTDKADLRLIYLALAHMIKFRGHFLIEGDLNPDNSDVDKLFIQLVQTYNQLFEENPINASGVDAKAILSARLSKSRRLENLIAQLPGEKKNGLFGNLIALSLGLTPNFKSNFDLAEDAKLQLSKDTYDDDLDNLLAQIGDQYADLFLAAKNLSDAILLSDILRVNTEITKAPLSASMIKRYDEHHQDLTLLKALVRQQLPEKYKEIFFDQSKNGYAGYIDGGASQEEFYKFIKPILEKMDGTEELLVKLNREDLLRKQRTFDNGSIPHQIHLGELHAILRRQEDFYPFLKDNREKIEKILTFRIPYYVGPLARGNSRFAWMTRKSEETITPWNFEEVVDKGASAQSFIERMTNFDKNLPNEKVLPKHSLLYEYFTVYNELTKVKYVTEGMRKPAFLSGEQKKAIVDLLFKTNRKVTVKQLKEDYFKKIECFDSVEISGVEDRFNASLGTYHDLLKIIKDKDFLDNEENEDILEDIVLTLTLFEDREMIEERLKTYAHLFDDKVMKQLKRRRYTGWGRLSRKLINGIRDKQSGKTILDFLKSDGFANRNFMQLIHDDSLTFKEDIQKAQVSGQGDSLHEHIANLAGSPAIKKGILQTVKVVDELVKVMGRHKPENIVIEMARENQTTQKGQKNSRERMKRIEEGIKELGSQILKEHPVENTQLQNEKLYLYYLQNGRDMYVDQELDINRLSDYDVDHIVPQSFLKDDSIDNKVLTRSDKARGKSDNVPSEEVVKKMKNYWRQLLNAKLITQRKFDNLTKAERGGLSELDKAGFIKRQLVETRQITKHVAQILDSRMNTKYDENDKLIREVKVITLKSKLVSDFRKDFQFYKVREINNYHHAHDAYLNAVVGTALIKKYPKLESEFVYGDYKVYDVRKMIAKSEQEIGKATAKYFFYSNIMNFFKTEITLANGEIRKRPLIETNGETGEIVWDKGRDFATVRKVLSMPQVNIVKKTEVQTGGFSKESILPKRNSDKLIARKKDWDPKKYGGFDSPTVAYSVLVVAKVEKGKSKKLKSVKELLGITIMERSSFEKNPIDFLEAKGYKEVKKDLIIKLPKYSLFELENGRKRMLASAGELQKGNELALPSKYVNFLYLASHYEKLKGSPEDNEQKQLFVEQHKHYLDEIIEQISEFSKRVILADANLDKVLSAYNKHRDKPIREQAENIIHLFTLTNLGAPAAFKYFDTTIDRKRYTSTKEVLDATLIHQSITGLYETRIDLSQLGGDGGGGGPAPGGSGGWVQEISDSRPMLHIYLNGRRFLGLLNTGADKTCIAGRDWPANWPIHQTESSLQGLGMACGVARSSQPLRWQHEDKSGIIHPFVIPTLPFTLWGRDIMKDIKVRLMTDSPDDSQDLMIGAIESNLFADQISWKSDQPVWLNQWPLKQEKLQALQQLVTEQLQLGHLEESNSPWNTPVFVIKKKSGKWRLLQDLRAVNATMHDMGALQPGLPSPVAVPKGWEIIIIDLQDCFFNIKLHPEDCKRFAFSVPSPNFKRPYQRFQWKVLPQGMKNSPTLCQKFVDKAILTVRDKYQDSYIVHYMDDILLAHPSRSIVDEILTSMIQALNKHGLVVSTEKIQKYDNLKYLGTHIQGDSVSYQKLQIRTDKLRTLNDFQKLLGNINWIRPFLKLTTGELKPLFEILNGDSNPISTRKLTPEACKALQLMNERLSTARVKRLDLSQPWSLCILKTEYTPTACLWQDGVVEWIHLPHISPKVITPYDIFCTQLIIKGRHRSKELFSKDPDYIVVPYTKVQFDLLLQEKEDWPISLLGFLGEVHFHLPKDPLLTFTLQTAIIFPHMTSTTPLEKGIVIFTDGSANGRSVTYIQGREPIIKENTQNTAQQAEIVAVITAFEEVSQPFNLYTDSKYVTGLFPEIETATLSPRTKIYTELKHLQRLIHKRQEKFYIGHIRGHTGLPGPLAQGNAYADSLTRILTAGKRTADGSEFEKRTADGSEFESPKKKAKVE

SEQ ID NO: 3276 - protein, 2114 aa, synthetic construct
MPAAKRVKLDGGDKKYSIGLDIGTNSVGWAVITDEYKVPSKKFKVLGNTDRHSIKKNLIGALLFDSGETAEATRLKRTARRRYTRRKNRICYLQEIFSNEMAKVDDSFFHRLEESFLVEEDKKHERHPIFGNIVDEVAYHEKYPTIYHLRKKLVDSTDKADLRLIYLALAHMIKFRGHFLIEGDLNPDNSDVDKLFIQLVQTYNQLFEENPINASGVDAKAILSARLSKSRRLENLIAQLPGEKKNGLFGNLIALSLGLTPNFKSNFDLAEDAKLQLSKDTYDDDLDNLLAQIGDQYADLFLAAKNLSDAILLSDILRVNTEITKAPLSASMIKRYDEHHQDLTLLKALVRQQLPEKYKEIFFDQSKNGYAGYIDGGASQEEFYKFIKPILEKMDGTEELLVKLNREDLLRKQRTFDNGSIPHQIHLGELHAILRRQEDFYPFLKDNREKIEKILTFRIPYYVGPLARGNSRFAWMTRKSEETITPWNFEEVVDKGASAQSFIERMTNFDKNLPNEKVLPKHSLLYEYFTVYNELTKVKYVTEGMRKPAFLSGEQKKAIVDLLFKTNRKVTVKQLKEDYFKKIECFDSVEISGVEDRFNASLGTYHDLLKIIKDKDFLDNEENEDILEDIVLTLTLFEDREMIEERLKTYAHLFDDKVMKQLKRRRYTGWGRLSRKLINGIRDKQSGKTILDFLKSDGFANRNFMQLIHDDSLTFKEDIQKAQVSGQGDSLHEHIANLAGSPAIKKGILQTVKVVDELVKVMGRHKPENIVIEMARENQTTQKGQKNSRERMKRIEEGIKELGSQILKEHPVENTQLQNEKLYLYYLQNGRDMYVDQELDINRLSDYDVDHIVPQSFLKDDSIDNKVLTRSDKARGKSDNVPSEEVVKKMKNYWRQLLNAKLITQRKFDNLTKAERGGLSELDKAGFIKRQLVETRQITKHVAQILDSRMNTKYDENDKLIREVKVITLKSKLVSDFRKDFQFYKVREINNYHHAHDAYLNAVVGTALIKKYPKLESEFVYGDYKVYDVRKMIAKSEQEIGKATAKYFFYSNIMNFFKTEITLANGEIRKRPLIETNGETGEIVWDKGRDFATVRKVLSMPQVNIVKKTEVQTGGFSKESILPKRNSDKLIARKKDWDPKKYGGFDSPTVAYSVLVVAKVEKGKSKKLKSVKELLGITIMERSSFEKNPIDFLEAKGYKEVKKDLIIKLPKYSLFELENGRKRMLASAGELQKGNELALPSKYVNFLYLASHYEKLKGSPEDNEQKQLFVEQHKHYLDEIIEQISEFSKRVILADANLDKVLSAYNKHRDKPIREQAENIIHLFTLTNLGAPAAFKYFDTTIDRKRYTSTKEVLDATLIHQSITGLYETRIDLSQLGGDGGGGSGGGPAPGGWVQEISDSRPMLHIYLNGRRFLGLLNTGADKTCIAGRDWPANWPIHQTESSLQGLGMACGVARSSQPLRWQHEDKSGIIHPFVIPTLPFTLWGRDIMKDIKVRLMTDSPDDSQDLMIGAIESNLFADQISWKSDQPVWLNQWPLKQEKLQALQQLVTEQLQLGHLEESNSPWNTPVFVIKKKSGKWRLLQDLRAVNATMHDMGALQPGLPSPVAVPKGWEIIIIDLQDCFFNIKLHPEDCKRFAFSVPSPNFKRPYQRFQWKVLPQGMKNSPTLCQKFVDKAILTVRDKYQDSYIVHYMDDILLAHPSRSIVDEILTSMIQALNKHGLVVSTEKIQKYDNLKYLGTHIQGDSVSYQKLQIRTDKLRTLNDFQKLLGNINWIRPFLKLTTGELKPLFEILNGDSNPISTRKLTPEACKALQLMNERLSTARVKRLDLSQPWSLCILKTEYTPTACLWQDGVVEWIHLPHISPKVITPYDIFCTQLIIKGRHRSKELFSKDPDYIVVPYTKVQFDLLLQEKEDWPISLLGFLGEVHFHLPKDPLLTFTLQTAIIFPHMTSTTPLEKGIVIFTDGSANGRSVTYIQGREPIIKENTQNTAQQAEIVAVITAFEEVSQPFNLYTDSKYVTGLFPEIETATLSPRTKIYTELKHLQRLIHKRQEKFYIGHIRGHTGLPGPLAQGNAYADSLTRILTAGKRTADGSEFEKRTADGSEFESPKKKAKVE

SEQ ID NO: 3277 - protein, 2135 aa, synthetic construct; identical to SEQ ID NO: 3173

SEQ ID NO: 3278 - protein, 2110 aa, synthetic construct
MPAAKRVKLDGGDKKYSIGLDIGTNSVGWAVITDEYKVPSKKFKVLGNTDRHSIKKNLIGALLFDSGETAEATRLKRTARRRYTRRKNRICYLQEIFSNEMAKVDDSFFHRLEESFLVEEDKKHERHPIFGNIVDEVAYHEKYPTIYHLRKKLVDSTDKADLRLIYLALAHMIKFRGHFLIEGDLNPDNSDVDKLFIQLVQTYNQLFEENPINASGVDAKAILSARLSKSRRLENLIAQLPGEKKNGLFGNLIALSLGLTPNFKSNFDLAEDAKLQLSKDTYDDDLDNLLAQIGDQYADLFLAAKNLSDAILLSDILRVNTEITKAPLSASMIKRYDEHHQDLTLLKALVRQQLPEKYKEIFFDQSKNGYAGYIDGGASQEEFYKFIKPILEKMDGTEELLVKLNREDLLRKQRTFDNGSIPHQIHLGELHAILRRQEDFYPFLKDNREKIEKILTFRIPYYVGPLARGNSRFAWMTRKSEETITPWNFEEVVDKGASAQSFIERMTNFDKNLPNEKVLPKHSLLYEYFTVYNELTKVKYVTEGMRKPAFLSGEQKKAIVDLLFKTNRKVTVKQLKEDYFKKIECFDSVEISGVEDRFNASLGTYHDLLKIIKDKDFLDNEENEDILEDIVLTLTLFEDREMIEERLKTYAHLFDDKVMKQLKRRRYTGWGRLSRKLINGIRDKQSGKTILDFLKSDGFANRNFMQLIHDDSLTFKEDIQKAQVSGQGDSLHEHIANLAGSPAIKKGILQTVKVVDELVKVMGRHKPENIVIEMARENQTTQKGQKNSRERMKRIEEGIKELGSQILKEHPVENTQLQNEKLYLYYLQNGRDMYVDQELDINRLSDYDVDHIVPQSFLKDDSIDNKVLTRSDKARGKSDNVPSEEVVKKMKNYWRQLLNAKLITQRKFDNLTKAERGGLSELDKAGFIKRQLVETRQITKHVAQILDSRMNTKYDENDKLIREVKVITLKSKLVSDFRKDFQFYKVREINNYHHAHDAYLNAVVGTALIKKYPKLESEFVYGDYKVYDVRKMIAKSEQEIGKATAKYFFYSNIMNFFKTEITLANGEIRKRPLIETNGETGEIVWDKGRDFATVRKVLSMPQVNIVKKTEVQTGGFSKESILPKRNSDKLIARKKDWDPKKYGGFDSPTVAYSVLVVAKVEKGKSKKLKSVKELLGITIMERSSFEKNPIDFLEAKGYKEVKKDLIIKLPKYSLFELENGRKRMLASAGELQKGNELALPSKYVNFLYLASHYEKLKGSPEDNEQKQLFVEQHKHYLDEIIEQISEFSKRVILADANLDKVLSAYNKHRDKPIREQAENIIHLFTLTNLGAPAAFKYFDTTIDRKRYTSTKEVLDATLIHQSITGLYETRIDLSQLGGDGGEAAAKGGWVQEISDSRPMLHIYLNGRRFLGLLNTGADKTCIAGRDWPANWPIHQTESSLQGLGMACGVARSSQPLRWQHEDKSGIIHPFVIPTLPFTLWGRDIMKDIKVRLMTDSPDDSQDLMIGAIESNLFADQISWKSDQPVWLNQWPLKQEKLQALQQLVTEQLQLGHLEESNSPWNTPVFVIKKKSGKWRLLQDLRAVNATMHDMGALQPGLPSPVAVPKGWEIIIIDLQDCFFNIKLHPEDCKRFAFSVPSPNFKRPYQRFQWKVLPQGMKNSPTLCQKFVDKAILTVRDKYQDSYIVHYMDDILLAHPSRSIVDEILTSMIQALNKHGLVVSTEKIQKYDNLKYLGTHIQGDSVSYQKLQIRTDKLRTLNDFQKLLGNINWIRPFLKLTTGELKPLFEILNGDSNPISTRKLTPEACKALQLMNERLSTARVKRLDLSQPWSLCILKTEYTPTACLWQDGVVEWIHLPHISPKVITPYDIFCTQLIIKGRHRSKELFSKDPDYIVVPYTKVQFDLLLQEKEDWPISLLGFLGEVHFHLPKDPLLTFTLQTAIIFPHMTSTTPLEKGIVIFTDGSANGRSVTYIQGREPIIKENTQNTAQQAEIVAVITAFEEVSQPFNLYTDSKYVTGLFPEIETATLSPRTKIYTELKHLQRLIHKRQEKFYIGHIRGHTGLPGPLAQGNAYADSLTRILTAGKRTADGSEFEKRTADGSEFESPKKKAKVE

SEQ ID NO: 3279 - protein, 2116 aa, synthetic construct
MPAAKRVKLDGGDKKYSIGLDIGTNSVGWAVITDEYKVPSKKFKVLGNTDRHSIKKNLIGALLFDSGETAEATRLKRTARRRYTRRKNRICYLQEIFSNEMAKVDDSFFHRLEESFLVEEDKKHERHPIFGNIVDEVAYHEKYPTIYHLRKKLVDSTDKADLRLIYLALAHMIKFRGHFLIEGDLNPDNSDVDKLFIQLVQTYNQLFEENPINASGVDAKAILSARLSKSRRLENLIAQLPGEKKNGLFGNLIALSLGLTPNFKSNFDLAEDAKLQLSKDTYDDDLDNLLAQIGDQYADLFLAAKNLSDAILLSDILRVNTEITKAPLSASMIKRYDEHHQDLTLLKALVRQQLPEKYKEIFFDQSKNGYAGYIDGGASQEEFYKFIKPILEKMDGTEELLVKLNREDLLRKQRTFDNGSIPHQIHLGELHAILRRQEDFYPFLKDNREKIEKILTFRIPYYVGPLARGNSRFAWMTRKSEETITPWNFEEVVDKGASAQSFIERMTNFDKNLPNEKVLPKHSLLYEYFTVYNELTKVKYVTEGMRKPAFLSGEQKKAIVDLLFKTNRKVTVKQLKEDYFKKIECFDSVEISGVEDRFNASLGTYHDLLKIIKDKDFLDNEENEDILEDIVLTLTLFEDREMIEERLKTYAHLFDDKVMKQLKRRRYTGWGRLSRKLINGIRDKQSGKTILDFLKSDGFANRNFMQLIHDDSLTFKEDIQKAQVSGQGDSLHEHIANLAGSPAIKKGILQTVKVVDELVKVMGRHKPENIVIEMARENQTTQKGQKNSRERMKRIEEGIKELGSQILKEHPVENTQLQNEKLYLYYLQNGRDMYVDQELDINRLSDYDVDHIVPQSFLKDDSIDNKVLTRSDKARGKSDNVPSEEVVKKMKNYWRQLLNAKLITQRKFDNLTKAERGGLSELDKAGFIKRQLVETRQITKHVAQILDSRMNTKYDENDKLIREVKVITLKSKLVSDFRKDFQFYKVREINNYHHAHDAYLNAVVGTALIKKYPKLESEFVYGDYKVYDVRKMIAKSEQEIGKATAKYFFYSNIMNFFKTEITLANGEIRKRPLIETNGETGEIVWDKGRDFATVRKVLSMPQVNIVKKTEVQTGGFSKESILPKRNSDKLIARKKDWDPKKYGGFDSPTVAYSVLVVAKVEKGKSKKLKSVKELLGITIMERSSFEKNPIDFLEAKGYKEVKKDLIIKLPKYSLFELENGRKRMLASAGELQKGNELALPSKYVNFLYLASHYEKLKGSPEDNEQKQLFVEQHKHYLDEIIEQISEFSKRVILADANLDKVLSAYNKHRDKPIREQAENIIHLFTLTNLGAPAAFKYFDTTIDRKRYTSTKEVLDATLIHQSITGLYETRIDLSQLGGDGGGGGGGSEAAAKGGWVQEISDSRPMLHIYLNGRRFLGLLNTGADKTCIAGRDWPANWPIHQTESSLQGLGMACGVARSSQPLRWQHEDKSGIIHPFVIPTLPFTLWGRDIMKDIKVRLMTDSPDDSQDLMIGAIESNLFADQISWKSDQPVWLNQWPLKQEKLQALQQLVTEQLQLGHLEESNSPWNTPVFVIKKKSGKWRLLQDLRAVNATMHDMGALQPGLPSPVAVPKGWEIIIIDLQDCFFNIKLHPEDCKRFAFSVPSPNFKRPYQRFQWKVLPQGMKNSPTLCQKFVDKAILTVRDKYQDSYIVHYMDDILLAHPSRSIVDEILTSMIQALNKHGLVVSTEKIQKYDNLKYLGTHIQGDSVSYQKLQIRTDKLRTLNDFQKLLGNINWIRPFLKLTTGELKPLFEILNGDSNPISTRKLTPEACKALQLMNERLSTARVKRLDLSQPWSLCILKTEYTPTACLWQDGVVEWIHLPHISPKVITPYDIFCTQLIIKGRHRSKELFSKDPDYIVVPYTKVQFDLLLQEKEDWPISLLGFLGEVHFHLPKDPLLTFTLQTAIIFPHMTSTTPLEKGIVIFTDGSANGRSVTYIQGREPIIKENTQNTAQQAEIVAVITAFEEVSQPFNLYTDSKYVTGLFPEIETATLSPRTKIYTELKHLQRLIHKRQEKFYIGHIRGHTGLPGPLAQGNAYADSLTRILTAGKRTADGSEFEKRTADGSEFESPKKKAKVE

SEQ ID NO: 3280 - protein, 2125 aa, synthetic construct; identical to SEQ ID NO: 3193

SEQ ID NO: 3281 - protein, 2120 aa, synthetic construct
MPAAKRVKLDGGDKKYSIGLDIGTNSVGWAVITDEYKVPSKKFKVLGNTDRHSIKKNLIGALLFDSGETAEATRLKRTARRRYTRRKNRICYLQEIFSNEMAKVDDSFFHRLEESFLVEEDKKHERHPIFGNIVDEVAYHEKYPTIYHLRKKLVDSTDKADLRLIYLALAHMIKFRGHFLIEGDLNPDNSDVDKLFIQLVQTYNQLFEENPINASGVDAKAILSARLSKSRRLENLIAQLPGEKKNGLFGNLIALSLGLTPNFKSNFDLAEDAKLQLSKDTYDDDLDNLLAQIGDQYADLFLAAKNLSDAILLSDILRVNTEITKAPLSASMIKRYDEHHQDLTLLKALVRQQLPEKYKEIFFDQSKNGYAGYIDGGASQEEFYKFIKPILEKMDGTEELLVKLNREDLLRKQRTFDNGSIPHQIHLGELHAILRRQEDFYPFLKDNREKIEKILTFRIPYYVGPLARGNSRFAWMTRKSEETITPWNFEEVVDKGASAQSFIERMTNFDKNLPNEKVLPKHSLLYEYFTVYNELTKVKYVTEGMRKPAFLSGEQKKAIVDLLFKTNRKVTVKQLKEDYFKKIECFDSVEISGVEDRFNASLGTYHDLLKIIKDKDFLDNEENEDILEDIVLTLTLFEDREMIEERLKTYAHLFDDKVMKQLKRRRYTGWGRLSRKLINGIRDKQSGKTILDFLKSDGFANRNFMQLIHDDSLTFKEDIQKAQVSGQGDSLHEHIANLAGSPAIKKGILQTVKVVDELVKVMGRHKPENIVIEMARENQTTQKGQKNSRERMKRIEEGIKELGSQILKEHPVENTQLQNEKLYLYYLQNGRDMYVDQELDINRLSDYDVDHIVPQSFLKDDSIDNKVLTRSDKARGKSDNVPSEEVVKKMKNYWRQLLNAKLITQRKFDNLTKAERGGLSELDKAGFIKRQLVETRQITKHVAQILDSRMNTKYDENDKLIREVKVITLKSKLVSDFRKDFQFYKVREINNYHHAHDAYLNAVVGTALIKKYPKLESEFVYGDYKVYDVRKMIAKSEQEIGKATAKYFFYSNIMNFFKTEITLANGEIRKRPLIETNGETGEIVWDKGRDFATVRKVLSMPQVNIVKKTEVQTGGFSKESILPKRNSDKLIARKKDWDPKKYGGFDSPTVAYSVLVVAKVEKGKSKKLKSVKELLGITIMERSSFEKNPIDFLEAKGYKEVKKDLIIKLPKYSLFELENGRKRMLASAGELQKGNELALPSKYVNFLYLASHYEKLKGSPEDNEQKQLFVEQHKHYLDEIIEQISEFSKRVILADANLDKVLSAYNKHRDKPIREQAENIIHLFTLTNLGAPAAFKYFDTTIDRKRYTSTKEVLDATLIHQSITGLYETRIDLSQLGGDGGGSSGSSGSSGSSGSSGGWVQEISDSRPMLHIYLNGRRFLGLLNTGADKTCIAGRDWPANWPIHQTESSLQGLGMACGVARSSQPLRWQHEDKSGIIHPFVIPTLPFTLWGRDIMKDIKVRLMTDSPDDSQDLMIGAIESNLFADQISWKSDQPVWLNQWPLKQEKLQALQQLVTEQLQLGHLEESNSPWNTPVFVIKKKSGKWRLLQDLRAVNATMHDMGALQPGLPSPVAVPKGWEIIIIDLQDCFFNIKLHPEDCKRFAFSVPSPNFKRPYQRFQWKVLPQGMKNSPTLCQKFVDKAILTVRDKYQDSYIVHYMDDILLAHPSRSIVDEILTSMIQALNKHGLVVSTEKIQKYDNLKYLGTHIQGDSVSYQKLQIRTDKLRTLNDFQKLLGNINWIRPFLKLTTGELKPLFEILNGDSNPISTRKLTPEACKALQLMNERLSTARVKRLDLSQPWSLCILKTEYTPTACLWQDGVVEWIHLPHISPKVITPYDIFCTQLIIKGRHRSKELFSKDPDYIVVPYTKVQFDLLLQEKEDWPISLLGFLGEVHFHLPKDPLLTFTLQTAIIFPHMTSTTPLEKGIVIFTDGSANGRSVTYIQGREPIIKENTQNTAQQAEIVAVITAFEEVSQPFNLYTDSKYVTGLFPEIETATLSPRTKIYTELKHLQRLIHKRQEKFYIGHIRGHTGLPGPLAQGNAYADSLTRILTAGKRTADGSEFEKRTADGSEFESPKKKAKVE

SEQ ID NO: 3282 - protein, 2123 aa, synthetic construct
MPAAKRVKLDGGDKKYSIGLDIGTNSVGWAVITDEYKVPSKKFKVLGNTDRHSIKKNLIGALLFDSGETAEATRLKRTARRRYTRRKNRICYLQEIFSNEMAKVDDSFFHRLEESFLVEEDKKHERHPIFGNIVDEVAYHEKYPTIYHLRKKLVDSTDKADLRLIYLALAHMIKFRGHFLIEGDLNPDNSDVDKLFIQLVQTYNQLFEENPINASGVDAKAILSARLSKSRRLENLIAQLPGEKKNGLFGNLIALSLGLTPNFKSNFDLAEDAKLQLSKDTYDDDLDNLLAQIGDQYADLFLAAKNLSDAILLSDILRVNTEITKAPLSASMIKRYDEHHQDLTLLKALVRQQLPEKYKEIFFDQSKNGYAGYIDGGASQEEFYKFIKPILEKMDGTEELLVKLNREDLLRKQRTFDNGSIPHQIHLGELHAILRRQEDFYPFLKDNREKIEKILTFRIPYYVGPLARGNSRFAWMTRKSEETITPWNFEEVVDKGASAQSFIERMTNFDKNLPNEKVLPKHSLLYEYFTVYNELTKVKYVTEGMRKPAFLSGEQKKAIVDLLFKTNRKVTVKQLKEDYFKKIECFDSVEISGVEDRFNASLGTYHDLLKIIKDKDFLDNEENEDILEDIVLTLTLFEDREMIEERLKTYAHLFDDKVMKQLKRRRYTGWGRLSRKLINGIRDKQSGKTILDFLKSDGFANRNFMQLIHDDSLTFKEDIQKAQVSGQGDSLHEHIANLAGSPAIKKGILQTVKVVDELVKVMGRHKPENIVIEMARENQTTQKGQKNSRERMKRIEEGIKELGSQILKEHPVENTQLQNEKLYLYYLQNGRDMYVDQELDINRLSDYDVDHIVPQSFLKDDSIDNKVLTRSDKARGKSDNVPSEEVVKKMKNYWRQLLNAKLITQRKFDNLTKAERGGLSELDKAGFIKRQLVETRQITKHVAQILDSRMNTKYDENDKLIREVKVITLKSKLVSDFRKDFQFYKVREINNYHHAHDAYLNAVVGTALIKKYPKLESEFVYGDYKVYDVRKMIAKSEQEIGKATAKYFFYSNIMNFFKTEITLANGEIRKRPLIETNGETGEIVWDKGRDFATVRKVLSMPQVNIVKKTEVQTGGFSKESILPKRNSDKLIARKKDWDPKKYGGFDSPTVAYSVLVVAKVEKGKSKKLKSVKELLGITIMERSSFEKNPIDFLEAKGYKEVKKDLIIKLPKYSLFELENGRKRMLASAGELQKGNELALPSKYVNFLYLASHYEKLKGSPEDNEQKQLFVEQHKHYLDEIIEQISEFSKRVILADANLDKVLSAYNKHRDKPIREQAENIIHLFTLTNLGAPAAFKYFDTTIDRKRYTSTKEVLDATLIHQSITGLYETRIDLSQLGGDGGGSSGSSGSSGSSGSSGSSGGWVQEISDSRPMLHIYLNGRRFLGLLNTGADKTCIAGRDWPANWPIHQTESSLQGLGMACGVARSSQPLRWQHEDKSGIIHPFVIPTLPFTLWGRDIMKDIKVRLMTDSPDDSQDLMIGAIESNLFADQISWKSDQPVWLNQWPLKQEKLQALQQLVTEQLQLGHLEESNSPWNTPVFVIKKKSGKWRLLQDLRAVNATMHDMGALQPGLPSPVAVPKGWEIIIIDLQDCFFNIKLHPEDCKRFAFSVPSPNFKRPYQRFQWKVLPQGMKNSPTLCQKFVDKAILTVRDKYQDSYIVHYMDDILLAHPSRSIVDEILTSMIQALNKHGLVVSTEKIQKYDNLKYLGTHIQGDSVSYQKLQIRTDKLRTLNDFQKLLGNINWIRPFLKLTTGELKPLFEILNGDSNPISTRKLTPEACKALQLMNERLSTARVKRLDLSQPWSLCILKTEYTPTACLWQDGVVEWIHLPHISPKVITPYDIFCTQLIIKGRHRSKELFSKDPDYIVVPYTKVQFDLLLQEKEDWPISLLGFLGEVHFHLPKDPLLTFTLQTAIIFPHMTSTTPLEKGIVIFTDGSANGRSVTYIQGREPIIKENTQNTAQQAEIVAVITAFEEVSQPFNLYTDSKYVTGLFPEIETATLSPRTKIYTELKHLQRLIHKRQEKFYIGHIRGHTGLPGPLAQGNAYADSLTRILTAGKRTADGSEFEKRTADGSEFESPKKKAKVE

SEQ ID NO: 3283 - protein, 2116 aa, synthetic construct
MPAAKRVKLDGGDKKYSIGLDIGTNSVGWAVITDEYKVPSKKFKVLGNTDRHSIKKNLIGALLFDSGETAEATRLKRTARRRYTRRKNRICYLQEIFSNEMAKVDDSFFHRLEESFLVEEDKKHERHPIFGNIVDEVAYHEKYPTIYHLRKKLVDSTDKADLRLIYLALAHMIKFRGHFLIEGDLNPDNSDVDKLFIQLVQTYNQLFEENPINASGVDAKAILSARLSKSRRLENLIAQLPGEKKNGLFGNLIALSLGLTPNFKSNFDLAEDAKLQLSKDTYDDDLDNLLAQIGDQYADLFLAAKNLSDAILLSDILRVNTEITKAPLSASMIKRYDEHHQDLTLLKALVRQQLPEKYKEIFFDQSKNGYAGYIDGGASQEEFYKFIKPILEKMDGTEELLVKLNREDLLRKQRTFDNGSIPHQIHLGELHAILRRQEDFYPFLKDNREKIEKILTFRIPYYVGPLARGNSRFAWMTRKSEETITPWNFEEVVDKGASAQSFIERMTNFDKNLPNEKVLPKHSLLYEYFTVYNELTKVKYVTEGMRKPAFLSGEQKKAIVDLLFKTNRKVTVKQLKEDYFKKIECFDSVEISGVEDRFNASLGTYHDLLKIIKDKDFLDNEENEDILEDIVLTLTLFEDREMIEERLKTYAHLFDDKVMKQLKRRRYTGWGRLSRKLINGIRDKQSGKTILDFLKSDGFANRNFMQLIHDDSLTFKEDIQKAQVSGQGDSLHEHIANLAGSPAIKKGILQTVKVVDELVKVMGRHKPENIVIEMARENQTTQKGQKNSRERMKRIEEGIKELGSQILKEHPVENTQLQNEKLYLYYLQNGRDMYVDQELDINRLSDYDVDHIVPQSFLKDDSIDNKVLTRSDKARGKSDNVPSEEVVKKMKNYWRQLLNAKLITQRKFDNLTKAERGGLSELDKAGFIKRQLVETRQITKHVAQILDSRMNTKYDENDKLIREVKVITLKSKLVSDFRKDFQFYKVREINNYHHAHDAYLNAVVGTALIKKYPKLESEFVYGDYKVYDVRKMIAKSEQEIGKATAKYFFYSNIMNFFKTEITLANGEIRKRPLIETNGETGEIVWDKGRDFATVRKVLSMPQVNIVKKTEVQTGGFSKESILPKRNSDKLIARKKDWDPKKYGGFDSPTVAYSVLVVAKVEKGKSKKLKSVKELLGITIMERSSFEKNPIDFLEAKGYKEVKKDLIIKLPKYSLFELENGRKRMLASAGELQKGNELALPSKYVNFLYLASHYEKLKGSPEDNEQKQLFVEQHKHYLDEIIEQISEFSKRVILADANLDKVLSAYNKHRDKPIREQAENIIHLFTLTNLGAPAAFKYFDTTIDRKRYTSTKEVLDATLIHQSITGLYETRIDLSQLGGDGGEAAAKGGGGSSGGWVQEISDSRPMLHIYLNGRRFLGLLNTGADKTCIAGRDWPANWPIHQTESSLQGLGMACGVARSSQPLRWQHEDKSGIIHPFVIPTLPFTLWGRDIMKDIKVRLMTDSPDDSQDLMIGAIESNLFADQISWKSDQPVWLNQWPLKQEKLQALQQLVTEQLQLGHLEESNSPWNTPVFVIKKKSGKWRLLQDLRAVNATMHDMGALQPGLPSPVAVPKGWEIIIIDLQDCFFNIKLHPEDCKRFAFSVPSPNFKRPYQRFQWKVLPQGMKNSPTLCQKFVDKAILTVRDKYQDSYIVHYMDDILLAHPSRSIVDEILTSMIQALNKHGLVVSTEKIQKYDNLKYLGTHIQGDSVSYQKLQIRTDKLRTLNDFQKLLGNINWIRPFLKLTTGELKPLFEILNGDSNPISTRKLTPEACKALQLMNERLSTARVKRLDLSQPWSLCILKTEYTPTACLWQDGVVEWIHLPHISPKVITPYDIFCTQLIIKGRHRSKELFSKDPDYIVVPYTKVQFDLLLQEKEDWPISLLGFLGEVHFHLPKDPLLTFTLQTAIIFPHMTSTTPLEKGIVIFTDGSANGRSVTYIQGREPIIKENTQNTAQQAEIVAVITAFEEVSQPFNLYTDSKYVTGLFPEIETATLSPRTKIYTELKHLQRLIHKRQEKFYIGHIRGHTGLPGPLAQGNAYADSLTRILTAGKRTADGSEFEKRTADGSEFESPKKKAKVE

SEQ ID NO: 3284 - protein, 2116 aa, synthetic construct
MPAAKRVKLDGGDKKYSIGLDIGTNSVGWAVITDEYKVPSKKFKVLGNTDRHSIKKNLIGALLFDSGETAEATRLKRTARRRYTRRKNRICYLQEIFSNEMAKVDDSFFHRLEESFLVEEDKKHERHPIFGNIVDEVAYHEKYPTIYHLRKKLVDSTDKADLRLIYLALAHMIKFRGHFLIEGDLNPDNSDVDKLFIQLVQTYNQLFEENPINASGVDAKAILSARLSKSRRLENLIAQLPGEKKNGLFGNLIALSLGLTPNFKSNFDLAEDAKLQLSKDTYDDDLDNLLAQIGDQYADLFLAAKNLSDAILLSDILRVNTEITKAPLSASMIKRYDEHHQDLTLLKALVRQQLPEKYKEIFFDQSKNGYAGYIDGGASQEEFYKFIKPILEKMDGTEELLVKLNREDLLRKQRTFDNGSIPHQIHLGELHAILRRQEDFYPFLKDNREKIEKILTFRIPYYVGPLARGNSRFAWMTRKSEETITPWNFEEVVDKGASAQSFIERMTNFDKNLPNEKVLPKHSLLYEYFTVYNELTKVKYVTEGMRKPAFLSGEQKKAIVDLLFKTNRKVTVKQLKEDYFKKIECFDSVEISGVEDRFNASLGTYHDLLKIIKDKDFLDNEENEDILEDIVLTLTLFEDREMIEERLKTYAHLFDDKVMKQLKRRRYTGWGRLSRKLINGIRDKQSGKTILDFLKSDGFANRNFMQLIHDDSLTFKEDIQKAQVSGQGDSLHEHIANLAGSPAIKKGILQTVKVVDELVKVMGRHKPENIVIEMARENQTTQKGQKNSRERMKRIEEGIKELGSQILKEHPVENTQLQNEKLYLYYLQNGRDMYVDQELDINRLSDYDVDHIVPQSFLKDDSIDNKVLTRSDKARGKSDNVPSEEVVKKMKNYWRQLLNAKLITQRKFDNLTKAERGGLSELDKAGFIKRQLVETRQITKHVAQILDSRMNTKYDENDKLIREVKVITLKSKLVSDFRKDFQFYKVREINNYHHAHDAYLNAVVGTALIKKYPKLESEFVYGDYKVYDVRKMIAKSEQEIGKATAKYFFYSNIMNFFKTEITLANGEIRKRPLIETNGETGEIVWDKGRDFATVRKVLSMPQVNIVKKTEVQTGGFSKESILPKRNSDKLIARKKDWDPKKYGGFDSPTVAYSVLVVAKVEKGKSKKLKSVKELLGITIMERSSFEKNPIDFLEAKGYKEVKKDLIIKLPKYSLFELENGRKRMLASAGELQKGNELALPSKYVNFLYLASHYEKLKGSPEDNEQKQLFVEQHKHYLDEIIEQISEFSKRVILADANLDKVLSAYNKHRDKPIREQAENIIHLFTLTNLGAPAAFKYFDTTIDRKRYTSTKEVLDATLIHQSITGLYETRIDLSQLGGDGGEAAAKGGGGGSGGWVQEISDSRPMLHIYLNGRRFLGLLNTGADKTCIAGRDWPANWPIHQTESSLQGLGMACGVARSSQPLRWQHEDKSGIIHPFVIPTLPFTLWGRDIMKDIKVRLMTDSPDDSQDLMIGAIESNLFADQISWKSDQPVWLNQWPLKQEKLQALQQLVTEQLQLGHLEESNSPWNTPVFVIKKKSGKWRLLQDLRAVNATMHDMGALQPGLPSPVAVPKGWEIIIIDLQDCFFNIKLHPEDCKRFAFSVPSPNFKRPYQRFQWKVLPQGMKNSPTLCQKFVDKAILTVRDKYQDSYIVHYMDDILLAHPSRSIVDEILTSMIQALNKHGLVVSTEKIQKYDNLKYLGTHIQGDSVSYQKLQIRTDKLRTLNDFQKLLGNINWIRPFLKLTTGELKPLFEILNGDSNPISTRKLTPEACKALQLMNERLSTARVKRLDLSQPWSLCILKTEYTPTACLWQDGVVEWIHLPHISPKVITPYDIFCTQLIIKGRHRSKELFSKDPDYIVVPYTKVQFDLLLQEKEDWPISLLGFLGEVHFHLPKDPLLTFTLQTAIIFPHMTSTTPLEKGIVIFTDGSANGRSVTYIQGREPIIKENTQNTAQQAEIVAVITAFEEVSQPFNLYTDSKYVTGLFPEIETATLSPRTKIYTELKHLQRLIHKRQEKFYIGHIRGHTGLPGPLAQGNAYADSLTRILTAGKRTADGSEFEKRTADGSEFESPKKKAKVE

SEQ ID NO: 3285 - protein, 2116 aa, synthetic construct
MPAAKRVKLDGGDKKYSIGLDIGTNSVGWAVITDEYKVPSKKFKVLGNTDRHSIKKNLIGALLFDSGETAEATRLKRTARRRYTRRKNRICYLQEIFSNEMAKVDDSFFHRLEESFLVEEDKKHERHPIFGNIVDEVAYHEKYPTIYHLRKKLVDSTDKADLRLIYLALAHMIKFRGHFLIEGDLNPDNSDVDKLFIQLVQTYNQLFEENPINASGVDAKAILSARLSKSRRLENLIAQLPGEKKNGLFGNLIALSLGLTPNFKSNFDLAEDAKLQLSKDTYDDDLDNLLAQIGDQYADLFLAAKNLSDAILLSDILRVNTEITKAPLSASMIKRYDEHHQDLTLLKALVRQQLPEKYKEIFFDQSKNGYAGYIDGGASQEEFYKFIKPILEKMDGTEELLVKLNREDLLRKQRTFDNGSIPHQIHLGELHAILRRQEDFYPFLKDNREKIEKILTFRIPYYVGPLARGNSRFAWMTRKSEETITPWNFEEVVDKGASAQSFIERMTNFDKNLPNEKVLPKHSLLYEYFTVYNELTKVKYVTEGMRKPAFLSGEQKKAIVDLLFKTNRKVTVKQLKEDYFKKIECFDSVEISGVEDRFNASLGTYHDLLKIIKDKDFLDNEENEDILEDIVLTLTLFEDREMIEERLKTYAHLFDDKVMKQLKRRRYTGWGRLSRKLINGIRDKQSGKTILDFLKSDGFANRNFMQLIHDDSLTFKEDIQKAQVSGQGDSLHEHIANLAGSPAIKKGILQTVKVVDELVKVMGRHKPENIVIEMARENQTTQKGQKNSRERMKRIEEGIKELGSQILKEHPVENTQLQNEKLYLYYLQNGRDMYVDQELDINRLSDYDVDHIVPQSFLKDDSIDNKVLTRSDKARGKSDNVPSEEVVKKMKNYWRQLLNAKLITQRKFDNLTKAERGGLSELDKAGFIKRQLVETRQITKHVAQILDSRMNTKYDENDKLIREVKVITLKSKLVSDFRKDFQFYKVREINNYHHAHDAYLNAVVGTALIKKYPKLESEFVYGDYKVYDVRKMIAKSEQEIGKATAKYFFYSNIMNFFKTEITLANGEIRKRPLIETNGETGEIVWDKGRDFATVRKVLSMPQVNIVKKTEVQTGGFSKESILPKRNSDKLIARKKDWDPKKYGGFDSPTVAYSVLVVAKVEKGKSKKLKSVKELLGITIMERSSFEKNPIDFLEAKGYKEVKKDLIIKLPKYSLFELENGRKRMLASAGELQKGNELALPSKYVNFLYLASHYEKLKGSPEDNEQKQLFVEQHKHYLDEIIEQISEFSKRVILADANLDKVLSAYNKHRDKPIREQAENIIHLFTLTNLGAPAAFKYFDTTIDRKRYTSTKEVLDATLIHQSITGLYETRIDLSQLGGDGGGGGGSSEAAAKGGWVQEISDSRPMLHIYLNGRRFLGLLNTGADKTCIAGRDWPANWPIHQTESSLQGLGMACGVARSSQPLRWQHEDKSGIIHPFVIPTLPFTLWGRDIMKDIKVRLMTDSPDDSQDLMIGAIESNLFADQISWKSDQPVWLNQWPLKQEKLQALQQLVTEQLQLGHLEESNSPWNTPVFVIKKKSGKWRLLQDLRAVNATMHDMGALQPGLPSPVAVPKGWEIIIIDLQDCFFNIKLHPEDCKRFAFSVPSPNFKRPYQRFQWKVLPQGMKNSPTLCQKFVDKAILTVRDKYQDSYIVHYMDDILLAHPSRSIVDEILTSMIQALNKHGLVVSTEKIQKYDNLKYLGTHIQGDSVSYQKLQIRTDKLRTLNDFQKLLGNINWIRPFLKLTTGELKPLFEILNGDSNPISTRKLTPEACKALQLMNERLSTARVKRLDLSQPWSLCILKTEYTPTACLWQDGVVEWIHLPHISPKVITPYDIFCTQLIIKGRHRSKELFSKDPDYIVVPYTKVQFDLLLQEKEDWPISLLGFLGEVHFHLPKDPLLTFTLQTAIIFPHMTSTTPLEKGIVIFTDGSANGRSVTYIQGREPIIKENTQNTAQQAEIVAVITAFEEVSQPFNLYTDSKYVTGLFPEIETATLSPRTKIYTELKHLQRLIHKRQEKFYIGHIRGHTGLPGPLAQGNAYADSLTRILTAGKRTADGSEFEKRTADGSEFESPKKKAKVE

SEQ ID NO: 3286 - protein, 2116 aa, synthetic construct
MPAAKRVKLDGGDKKYSIGLDIGTNSVGWAVITDEYKVPSKKFKVLGNTDRHSIKKNLIGALLFDSGETAEATRLKRTARRRYTRRKNRICYLQEIFSNEMAKVDDSFFHRLEESFLVEEDKKHERHPIFGNIVDEVAYHEKYPTIYHLRKKLVDSTDKADLRLIYLALAHMIKFRGHFLIEGDLNPDNSDVDKLFIQLVQTYNQLFEENPINASGVDAKAILSARLSKSRRLENLIAQLPGEKKNGLFGNLIALSLGLTPNFKSNFDLAEDAKLQLSKDTYDDDLDNLLAQIGDQYADLFLAAKNLSDAILLSDILRVNTEITKAPLSASMIKRYDEHHQDLTLLKALVRQQLPEKYKEIFFDQSKNGYAGYIDGGASQEEFYKFIKPILEKMDGTEELLVKLNREDLLRKQRTFDNGSIPHQIHLGELHAILRRQEDFYPFLKDNREKIEKILTFRIPYYVGPLARGNSRFAWMTRKSEETITPWNFEEVVDKGASAQSFIERMTNFDKNLPNEKVLPKHSLLYEYFTVYNELTKVKYVTEGMRKPAFLSGEQKKAIVDLLFKTNRKVTVKQLKEDYFKKIECFDSVEISGVEDRFNASLGTYHDLLKIIKDKDFLDNEENEDILEDIVLTLTLFEDREMIEERLKTYAHLFDDKVMKQLKRRRYTGWGRLSRKLINGIRDKQSGKTILDFLKSDGFANRNFMQLIHDDSLTFKEDIQKAQVSGQGDSLHEHIANLAGSPAIKKGILQTVKVVDELVKVMGRHKPENIVIEMARENQTTQKGQKNSRERMKRIEEGIKELGSQILKEHPVENTQLQNEKLYLYYLQNGRDMYVDQELDINRLSDYDVDHIVPQSFLKDDSIDNKVLTRSDKARGKSDNVPSEEVVKKMKNYWRQLLNAKLITQRKFDNLTKAERGGLSELDKAGFIKRQLVETRQITKHVAQILDSRMNTKYDENDKLIREVKVITLKSKLVSDFRKDFQFYKVREINNYHHAHDAYLNAVVGTALIKKYPKLESEFVYGDYKVYDVRKMIAKSEQEIGKATAKYFFYSNIMNFFKTEITLANGEIRKRPLIETNGETGEIVWDKGRDFATVRKVLSMPQVNIVKKTEVQTGGFSKESILPKRNSDKLIARKKDWDPKKYGGFDSPTVAYSVLVVAKVEKGKSKKLKSVKELLGITIMERSSFEKNPIDFLEAKGYKEVKKDLIIKLPKYSLFELENGRKRMLASAGELQKGNELALPSKYVNFLYLASHYEKLKGSPEDNEQKQLFVEQHKHYLDEIIEQISEFSKRVILADANLDKVLSAYNKHRDKPIREQAENIIHLFTLTNLGAPAAFKYFDTTIDRKRYTSTKEVLDATLIHQSITGLYETRIDLSQLGGDGGGGSGGGEAAAKGGWVQEISDSRPMLHIYLNGRRFLGLLNTGADKTCIAGRDWPANWPIHQTESSLQGLGMACGVARSSQPLRWQHEDKSGIIHPFVIPTLPFTLWGRDIMKDIKVRLMTDSPDDSQDLMIGAIESNLFADQISWKSDQPVWLNQWPLKQEKLQALQQLVTEQLQLGHLEESNSPWNTPVFVIKKKSGKWRLLQDLRAVNATMHDMGALQPGLPSPVAVPKGWEIIIIDLQDCFFNIKLHPEDCKRFAFSVPSPNFKRPYQRFQWKVLPQGMKNSPTLCQKFVDKAILTVRDKYQDSYIVHYMDDILLAHPSRSIVDEILTSMIQALNKHGLVVSTEKIQKYDNLKYLGTHIQGDSVSYQKLQIRTDKLRTLNDFQKLLGNINWIRPFLKLTTGELKPLFEILNGDSNPISTRKLTPEACKALQLMNERLSTARVKRLDLSQPWSLCILKTEYTPTACLWQDGVVEWIHLPHISPKVITPYDIFCTQLIIKGRHRSKELFSKDPDYIVVPYTKVQFDLLLQEKEDWPISLLGFLGEVHFHLPKDPLLTFTLQTAIIFPHMTSTTPLEKGIVIFTDGSANGRSVTYIQGREPIIKENTQNTAQQAEIVAVITAFEEVSQPFNLYTDSKYVTGLFPEIETATLSPRTKIYTELKHLQRLIHKRQEKFYIGHIRGHTGLPGPLAQGNAYADSLTRILTAGKRTADGSEFEKRTADGSEFESPKKKAKVE

SEQ ID NO: 3287 - protein, 2114 aa, synthetic construct; identical to SEQ ID NO: 3179

SEQ ID NO: 3288 - protein, 2116 aa, synthetic construct
MPAAKRVKLDGGDKKYSIGLDIGTNSVGWAVITDEYKVPSKKFKVLGNTDRHSIKKNLIGALLFDSGETAEATRLKRTARRRYTRRKNRICYLQEIFSNEMAKVDDSFFHRLEESFLVEEDKKHERHPIFGNIVDEVAYHEKYPTIYHLRKKLVDSTDKADLRLIYLALAHMIKFRGHFLIEGDLNPDNSDVDKLFIQLVQTYNQLFEENPINASGVDAKAILSARLSKSRRLENLIAQLPGEKKNGLFGNLIALSLGLTPNFKSNFDLAEDAKLQLSKDTYDDDLDNLLAQIGDQYADLFLAAKNLSDAILLSDILRVNTEITKAPLSASMIKRYDEHHQDLTLLKALVRQQLPEKYKEIFFDQSKNGYAGYIDGGASQEEFYKFIKPILEKMDGTEELLVKLNREDLLRKQRTFDNGSIPHQIHLGELHAILRRQEDFYPFLKDNREKIEKILTFRIPYYVGPLARGNSRFAWMTRKSEETITPWNFEEVVDKGASAQSFIERMTNFDKNLPNEKVLPKHSLLYEYFTVYNELTKVKYVTEGMRKPAFLSGEQKKAIVDLLFKTNRKVTVKQLKEDYFKKIECFDSVEISGVEDRFNASLGTYHDLLKIIKDKDFLDNEENEDILEDIVLTLTLFEDREMIEERLKTYAHLFDDKVMKQLKRRRYTGWGRLSRKLINGIRDKQSGKTILDFLKSDGFANRNFMQLIHDDSLTFKEDIQKAQVSGQGDSLHEHIANLAGSPAIKKGILQTVKVVDELVKVMGRHKPENIVIEMARENQTTQKGQKNSRERMKRIEEGIKELGSQILKEHPVENTQLQNEKLYLYYLQNGRDMYVDQELDINRLSDYDVDHIVPQSFLKDDSIDNKVLTRSDKARGKSDNVPSEEVVKKMKNYWRQLLNAKLITQRKFDNLTKAERGGLSELDKAGFIKRQLVETRQITKHVAQILDSRMNTKYDENDKLIREVKVITLKSKLVSDFRKDFQFYKVREINNYHHAHDAYLNAVVGTALIKKYPKLESEFVYGDYKVYDVRKMIAKSEQEIGKATAKYFFYSNIMNFFKTEITLANGEIRKRPLIETNGETGEIVWDKGRDFATVRKVLSMPQVNIVKKTEVQTGGFSKESILPKRNSDKLIARKKDWDPKKYGGFDSPTVAYSVLVVAKVEKGKSKKLKSVKELLGITIMERSSFEKNPIDFLEAKGYKEVKKDLIIKLPKYSLFELENGRKRMLASAGELQKGNELALPSKYVNFLYLASHYEKLKGSPEDNEQKQLFVEQHKHYLDEIIEQISEFSKRVILADANLDKVLSAYNKHRDKPIREQAENIIHLFTLTNLGAPAAFKYFDTTIDRKRYTSTKEVLDATLIHQSITGLYETRIDLSQLGGDGGPAPEAAAKGGSGGWVQEISDSRPMLHIYLNGRRFLGLLNTGADKTCIAGRDWPANWPIHQTESSLQGLGMACGVARSSQPLRWQHEDKSGIIHPFVIPTLPFTLWGRDIMKDIKVRLMTDSPDDSQDLMIGAIESNLFADQISWKSDQPVWLNQWPLKQEKLQALQQLVTEQLQLGHLEESNSPWNTPVFVIKKKSGKWRLLQDLRAVNATMHDMGALQPGLPSPVAVPKGWEIIIIDLQDCFFNIKLHPEDCKRFAFSVPSPNFKRPYQRFQWKVLPQGMKNSPTLCQKFVDKAILTVRDKYQDSYIVHYMDDILLAHPSRSIVDEILTSMIQALNKHGLVVSTEKIQKYDNLKYLGTHIQGDSVSYQKLQIRTDKLRTLNDFQKLLGNINWIRPFLKLTTGELKPLFEILNGDSNPISTRKLTPEACKALQLMNERLSTARVKRLDLSQPWSLCILKTEYTPTACLWQDGVVEWIHLPHISPKVITPYDIFCTQLIIKGRHRSKELFSKDPDYIVVPYTKVQFDLLLQEKEDWPISLLGFLGEVHFHLPKDPLLTFTLQTAIIFPHMTSTTPLEKGIVIFTDGSANGRSVTYIQGREPIIKENTQNTAQQAEIVAVITAFEEVSQPFNLYTDSKYVTGLFPEIETATLSPRTKIYTELKHLQRLIHKRQEKFYIGHIRGHTGLPGPLAQGNAYADSLTRILTAGKRTADGSEFEKRTADGSEFESPKKKAKVE

SEQ ID NO: 3289 - protein, 2116 aa, synthetic construct; identical to SEQ ID NO: 3178

SEQ ID NO: 3290 - protein, 2116 aa, synthetic construct
MPAAKRVKLDGGDKKYSIGLDIGTNSVGWAVITDEYKVPSKKFKVLGNTDRHSIKKNLIGALLFDSGETAEATRLKRTARRRYTRRKNRICYLQEIFSNEMAKVDDSFFHRLEESFLVEEDKKHERHPIFGNIVDEVAYHEKYPTIYHLRKKLVDSTDKADLRLIYLALAHMIKFRGHFLIEGDLNPDNSDVDKLFIQLVQTYNQLFEENPINASGVDAKAILSARLSKSRRLENLIAQLPGEKKNGLFGNLIALSLGLTPNFKSNFDLAEDAKLQLSKDTYDDDLDNLLAQIGDQYADLFLAAKNLSDAILLSDILRVNTEITKAPLSASMIKRYDEHHQDLTLLKALVRQQLPEKYKEIFFDQSKNGYAGYIDGGASQEEFYKFIKPILEKMDGTEELLVKLNREDLLRKQRTFDNGSIPHQIHLGELHAILRRQEDFYPFLKDNREKIEKILTFRIPYYVGPLARGNSRFAWMTRKSEETITPWNFEEVVDKGASAQSFIERMTNFDKNLPNEKVLPKHSLLYEYFTVYNELTKVKYVTEGMRKPAFLSGEQKKAIVDLLFKTNRKVTVKQLKEDYFKKIECFDSVEISGVEDRFNASLGTYHDLLKIIKDKDFLDNEENEDILEDIVLTLTLFEDREMIEERLKTYAHLFDDKVMKQLKRRRYTGWGRLSRKLINGIRDKQSGKTILDFLKSDGFANRNFMQLIHDDSLTFKEDIQKAQVSGQGDSLHEHIANLAGSPAIKKGILQTVKVVDELVKVMGRHKPENIVIEMARENQTTQKGQKNSRERMKRIEEGIKELGSQILKEHPVENTQLQNEKLYLYYLQNGRDMYVDQELDINRLSDYDVDHIVPQSFLKDDSIDNKVLTRSDKARGKSDNVPSEEVVKKMKNYWRQLLNAKLITQRKFDNLTKAERGGLSELDKAGFIKRQLVETRQITKHVAQILDSRMNTKYDENDKLIREVKVITLKSKLVSDFRKDFQFYKVREINNYHHAHDAYLNAVVGTALIKKYPKLESEFVYGDYKVYDVRKMIAKSEQEIGKATAKYFFYSNIMNFFKTEITLANGEIRKRPLIETNGETGEIVWDKGRDFATVRKVLSMPQVNIVKKTEVQTGGFSKESILPKRNSDKLIARKKDWDPKKYGGFDSPTVAYSVLVVAKVEKGKSKKLKSVKELLGITIMERSSFEKNPIDFLEAKGYKEVKKDLIIKLPKYSLFELENGRKRMLASAGELQKGNELALPSKYVNFLYLASHYEKLKGSPEDNEQKQLFVEQHKHYLDEIIEQISEFSKRVILADANLDKVLSAYNKHRDKPIREQAENIIHLFTLTNLGAPAAFKYFDTTIDRKRYTSTKEVLDATLIHQSITGLYETRIDLSQLGGDGGPAPGGSEAAAKGGWVQEISDSRPMLHIYLNGRRFLGLLNTGADKTCIAGRDWPANWPIHQTESSLQGLGMACGVARSSQPLRWQHEDKSGIIHPFVIPTLPFTLWGRDIMKDIKVRLMTDSPDDSQDLMIGAIESNLFADQISWKSDQPVWLNQWPLKQEKLQALQQLVTEQLQLGHLEESNSPWNTPVFVIKKKSGKWRLLQDLRAVNATMHDMGALQPGLPSPVAVPKGWEIIIIDLQDCFFNIKLHPEDCKRFAFSVPSPNFKRPYQRFQWKVLPQGMKNSPTLCQKFVDKAILTVRDKYQDSYIVHYMDDILLAHPSRSIVDEILTSMIQALNKHGLVVSTEKIQKYDNLKYLGTHIQGDSVSYQKLQIRTDKLRTLNDFQKLLGNINWIRPFLKLTTGELKPLFEILNGDSNPISTRKLTPEACKALQLMNERLSTARVKRLDLSQPWSLCILKTEYTPTACLWQDGVVEWIHLPHISPKVITPYDIFCTQLIIKGRHRSKELFSKDPDYIVVPYTKVQFDLLLQEKEDWPISLLGFLGEVHFHLPKDPLLTFTLQTAIIFPHMTSTTPLEKGIVIFTDGSANGRSVTYIQGREPIIKENTQNTAQQAEIVAVITAFEEVSQPFNLYTDSKYVTGLFPEIETATLSPRTKIYTELKHLQRLIHKRQEKFYIGHIRGHTGLPGPLAQGNAYADSLTRILTAGKRTADGSEFEKRTADGSEFESPKKKAKVE

SEQ ID NO: 3291 - protein, 2116 aa, synthetic construct
MPAAKRVKLDGGDKKYSIGLDIGTNSVGWAVITDEYKVPSKKFKVLGNTDRHSIKKNLIGALLFDSGETAEATRLKRTARRRYTRRKNRICYLQEIFSNEMAKVDDSFFHRLEESFLVEEDKKHERHPIFGNIVDEVAYHEKYPTIYHLRKKLVDSTDKADLRLIYLALAHMIKFRGHFLIEGDLNPDNSDVDKLFIQLVQTYNQLFEENPINASGVDAKAILSARLSKSRRLENLIAQLPGEKKNGLFGNLIALSLGLTPNFKSNFDLAEDAKLQLSKDTYDDDLDNLLAQIGDQYADLFLAAKNLSDAILLSDILRVNTEITKAPLSASMIKRYDEHHQDLTLLKALVRQQLPEKYKEIFFDQSKNGYAGYIDGGASQEEFYKFIKPILEKMDGTEELLVKLNREDLLRKQRTFDNGSIPHQIHLGELHAILRRQEDFYPFLKDNREKIEKILTFRIPYYVGPLARGNSRFAWMTRKSEETITPWNFEEVVDKGASAQSFIERMTNFDKNLPNEKVLPKHSLLYEYFTVYNELTKVKYVTEGMRKPAFLSGEQKKAIVDLLFKTNRKVTVKQLKEDYFKKIECFDSVEISGVEDRFNASLGTYHDLLKIIKDKDFLDNEENEDILEDIVLTLTLFEDREMIEERLKTYAHLFDDKVMKQLKRRRYTGWGRLSRKLINGIRDKQSGKTILDFLKSDGFANRNFMQLIHDDSLTFKEDIQKAQVSGQGDSLHEHIANLAGSPAIKKGILQTVKVVDELVKVMGRHKPENIVIEMARENQTTQKGQKNSRERMKRIEEGIKELGSQILKEHPVENTQLQNEKLYLYYLQNGRDMYVDQELDINRLSDYDVDHIVPQSFLKDDSIDNKVLTRSDKARGKSDNVPSEEVVKKMKNYWRQLLNAKLITQRKFDNLTKAERGGLSELDKAGFIKRQLVETRQITKHVAQILDSRMNTKYDENDKLIREVKVITLKSKLVSDFRKDFQFYKVREINNYHHAHDAYLNAVVGTALIKKYPKLESEFVYGDYKVYDVRKMIAKSEQEIGKATAKYFFYSNIMNFFKTEITLANGEIRKRPLIETNGETGEIVWDKGRDFATVRKVLSMPQVNIVKKTEVQTGGFSKESILPKRNSDKLIARKKDWDPKKYGGFDSPTVAYSVLVVAKVEKGKSKKLKSVKELLGITIMERSSFEKNPIDFLEAKGYKEVKKDLIIKLPKYSLFELENGRKRMLASAGELQKGNELALPSKYVNFLYLASHYEKLKGSPEDNEQKQLFVEQHKHYLDEIIEQISEFSKRVILADANLDKVLSAYNKHRDKPIREQAENIIHLFTLTNLGAPAAFKYFDTTIDRKRYTSTKEVLDATLIHQSITGLYETRIDLSQLGGDGGGGSEAAAKGGGGGWVQEISDSRPMLHIYLNGRRFLGLLNTGADKTCIAGRDWPANWPIHQTESSLQGLGMACGVARSSQPLRWQHEDKSGIIHPFVIPTLPFTLWGRDIMKDIKVRLMTDSPDDSQDLMIGAIESNLFADQISWKSDQPVWLNQWPLKQEKLQALQQLVTEQLQLGHLEESNSPWNTPVFVIKKKSGKWRLLQDLRAVNATMHDMGALQPGLPSPVAVPKGWEIIIIDLQDCFFNIKLHPEDCKRFAFSVPSPNFKRPYQRFQWKVLPQGMKNSPTLCQKFVDKAILTVRDKYQDSYIVHYMDDILLAHPSRSIVDEILTSMIQALNKHGLVVSTEKIQKYDNLKYLGTHIQGDSVSYQKLQIRTDKLRTLNDFQKLLGNINWIRPFLKLTTGELKPLFEILNGDSNPISTRKLTPEACKALQLMNERLSTARVKRLDLSQPWSLCILKTEYTPTACLWQDGVVEWIHLPHISPKVITPYDIFCTQLIIKGRHRSKELFSKDPDYIVVPYTKVQFDLLLQEKEDWPISLLGFLGEVHFHLPKDPLLTFTLQTAIIFPHMTSTTPLEKGIVIFTDGSANGRSVTYIQGREPIIKENTQNTAQQAEIVAVITAFEEVSQPFNLYTDSKYVTGLFPEIETATLSPRTKIYTELKHLQRLIHKRQEKFYIGHIRGHTGLPGPLAQGNAYADSLTRILTAGKRTADGSEFEKRTADGSEFESPKKKAKVE

SEQ ID NO: 3292 - protein, 2114 aa, synthetic construct
MPAAKRVKLDGGDKKYSIGLDIGTNSVGWAVITDEYKVPSKKFKVLGNTDRHSIKKNLIGALLFDSGETAEATRLKRTARRRYTRRKNRICYLQEIFSNEMAKVDDSFFHRLEESFLVEEDKKHERHPIFGNIVDEVAYHEKYPTIYHLRKKLVDSTDKADLRLIYLALAHMIKFRGHFLIEGDLNPDNSDVDKLFIQLVQTYNQLFEENPINASGVDAKAILSARLSKSRRLENLIAQLPGEKKNGLFGNLIALSLGLTPNFKSNFDLAEDAKLQLSKDTYDDDLDNLLAQIGDQYADLFLAAKNLSDAILLSDILRVNTEITKAPLSASMIKRYDEHHQDLTLLKALVRQQLPEKYKEIFFDQSKNGYAGYIDGGASQEEFYKFIKPILEKMDGTEELLVKLNREDLLRKQRTFDNGSIPHQIHLGELHAILRRQEDFYPFLKDNREKIEKILTFRIPYYVGPLARGNSRFAWMTRKSEETITPWNFEEVVDKGASAQSFIERMTNFDKNLPNEKVLPKHSLLYEYFTVYNELTKVKYVTEGMRKPAFLSGEQKKAIVDLLFKTNRKVTVKQLKEDYFKKIECFDSVEISGVEDRFNASLGTYHDLLKIIKDKDFLDNEENEDILEDIVLTLTLFEDREMIEERLKTYAHLFDDKVMKQLKRRRYTGWGRLSRKLINGIRDKQSGKTILDFLKSDGFANRNFMQLIHDDSLTFKEDIQKAQVSGQGDSLHEHIANLAGSPAIKKGILQTVKVVDELVKVMGRHKPENIVIEMARENQTTQKGQKNSRERMKRIEEGIKELGSQILKEHPVENTQLQNEKLYLYYLQNGRDMYVDQELDINRLSDYDVDHIVPQSFLKDDSIDNKVLTRSDKARGKSDNVPSEEVVKKMKNYWRQLLNAKLITQRKFDNLTKAERGGLSELDKAGFIKRQLVETRQITKHVAQILDSRMNTKYDENDKLIREVKVITLKSKLVSDFRKDFQFYKVREINNYHHAHDAYLNAVVGTALIKKYPKLESEFVYGDYKVYDVRKMIAKSEQEIGKATAKYFFYSNIMNFFKTEITLANGEIRKRPLIETNGETGEIVWDKGRDFATVRKVLSMPQVNIVKKTEVQTGGFSKESILPKRNSDKLIARKKDWDPKKYGGFDSPTVAYSVLVVAKVEKGKSKKLKSVKELLGITIMERSSFEKNPIDFLEAKGYKEVKKDLIIKLPKYSLFELENGRKRMLASAGELQKGNELALPSKYVNFLYLASHYEKLKGSPEDNEQKQLFVEQHKHYLDEIIEQISEFSKRVILADANLDKVLSAYNKHRDKPIREQAENIIHLFTLTNLGAPAAFKYFDTTIDRKRYTSTKEVLDATLIHQSITGLYETRIDLSQLGGDGGGGSGGSGGSGGWVQEISDSRPMLHIYLNGRRFLGLLNTGADKTCIAGRDWPANWPIHQTESSLQGLGMACGVARSSQPLRWQHEDKSGIIHPFVIPTLPFTLWGRDIMKDIKVRLMTDSPDDSQDLMIGAIESNLFADQISWKSDQPVWLNQWPLKQEKLQALQQLVTEQLQLGHLEESNSPWNTPVFVIKKKSGKWRLLQDLRAVNATMHDMGALQPGLPSPVAVPKGWEIIIIDLQDCFFNIKLHPEDCKRFAFSVPSPNFKRPYQRFQWKVLPQGMKNSPTLCQKFVDKAILTVRDKYQDSYIVHYMDDILLAHPSRSIVDEILTSMIQALNKHGLVVSTEKIQKYDNLKYLGTHIQGDSVSYQKLQIRTDKLRTLNDFQKLLGNINWIRPFLKLTTGELKPLFEILNGDSNPISTRKLTPEACKALQLMNERLSTARVKRLDLSQPWSLCILKTEYTPTACLWQDGVVEWIHLPHISPKVITPYDIFCTQLIIKGRHRSKELFSKDPDYIVVPYTKVQFDLLLQEKEDWPISLLGFLGEVHFHLPKDPLLTFTLQTAIIFPHMTSTTPLEKGIVIFTDGSANGRSVTYIQGREPIIKENTQNTAQQAEIVAVITAFEEVSQPFNLYTDSKYVTGLFPEIETATLSPRTKIYTELKHLQRLIHKRQEKFYIGHIRGHTGLPGPLAQGNAYADSLTRILTAGKRTADGSEFEKRTADGSEFESPKKKAKVE

SEQ ID NO: 3293 - protein, 2113 aa, synthetic construct
MPAAKRVKLDGGDKKYSIGLDIGTNSVGWAVITDEYKVPSKKFKVLGNTDRHSIKKNLIGALLFDSGETAEATRLKRTARRRYTRRKNRICYLQEIFSNEMAKVDDSFFHRLEESFLVEEDKKHERHPIFGNIVDEVAYHEKYPTIYHLRKKLVDSTDKADLRLIYLALAHMIKFRGHFLIEGDLNPDNSDVDKLFIQLVQTYNQLFEENPINASGVDAKAILSARLSKSRRLENLIAQLPGEKKNGLFGNLIALSLGLTPNFKSNFDLAEDAKLQLSKDTYDDDLDNLLAQIGDQYADLFLAAKNLSDAILLSDILRVNTEITKAPLSASMIKRYDEHHQDLTLLKALVRQQLPEKYKEIFFDQSKNGYAGYIDGGASQEEFYKFIKPILEKMDGTEELLVKLNREDLLRKQRTFDNGSIPHQIHLGELHAILRRQEDFYPFLKDNREKIEKILTFRIPYYVGPLARGNSRFAWMTRKSEETITPWNFEEVVDKGASAQSFIERMTNFDKNLPNEKVLPKHSLLYEYFTVYNELTKVKYVTEGMRKPAFLSGEQKKAIVDLLFKTNRKVTVKQLKEDYFKKIECFDSVEISGVEDRFNASLGTYHDLLKIIKDKDFLDNEENEDILEDIVLTLTLFEDREMIEERLKTYAHLFDDKVMKQLKRRRYTGWGRLSRKLINGIRDKQSGKTILDFLKSDGFANRNFMQLIHDDSLTFKEDIQKAQVSGQGDSLHEHIANLAGSPAIKKGILQTVKVVDELVKVMGRHKPENIVIEMARENQTTQKGQKNSRERMKRIEEGIKELGSQILKEHPVENTQLQNEKLYLYYLQNGRDMYVDQELDINRLSDYDVDHIVPQSFLKDDSIDNKVLTRSDKARGKSDNVPSEEVVKKMKNYWRQLLNAKLITQRKFDNLTKAERGGLSELDKAGFIKRQLVETRQITKHVAQILDSRMNTKYDENDKLIREVKVITLKSKLVSDFRKDFQFYKVREINNYHHAHDAYLNAVVGTALIKKYPKLESEFVYGDYKVYDVRKMIAKSEQEIGKATAKYFFYSNIMNFFKTEITLANGEIRKRPLIETNGETGEIVWDKGRDFATVRKVLSMPQVNIVKKTEVQTGGFSKESILPKRNSDKLIARKKDWDPKKYGGFDSPTVAYSVLVVAKVEKGKSKKLKSVKELLGITIMERSSFEKNPIDFLEAKGYKEVKKDLIIKLPKYSLFELENGRKRMLASAGELQKGNELALPSKYVNFLYLASHYEKLKGSPEDNEQKQLFVEQHKHYLDEIIEQISEFSKRVILADANLDKVLSAYNKHRDKPIREQAENIIHLFTLTNLGAPAAFKYFDTTIDRKRYTSTKEVLDATLIHQSITGLYETRIDLSQLGGDGGGGSEAAAKGGWVQEISDSRPMLHIYLNGRRFLGLLNTGADKTCIAGRDWPANWPIHQTESSLQGLGMACGVARSSQPLRWQHEDKSGIIHPFVIPTLPFTLWGRDIMKDIKVRLMTDSPDDSQDLMIGAIESNLFADQISWKSDQPVWLNQWPLKQEKLQALQQLVTEQLQLGHLEESNSPWNTPVFVIKKKSGKWRLLQDLRAVNATMHDMGALQPGLPSPVAVPKGWEIIIIDLQDCFFNIKLHPEDCKRFAFSVPSPNFKRPYQRFQWKVLPQGMKNSPTLCQKFVDKAILTVRDKYQDSYIVHYMDDILLAHPSRSIVDEILTSMIQALNKHGLVVSTEKIQKYDNLKYLGTHIQGDSVSYQKLQIRTDKLRTLNDFQKLLGNINWIRPFLKLTTGELKPLFEILNGDSNPISTRKLTPEACKALQLMNERLSTARVKRLDLSQPWSLCILKTEYTPTACLWQDGVVEWIHLPHISPKVITPYDIFCTQLIIKGRHRSKELFSKDPDYIVVPYTKVQFDLLLQEKEDWPISLLGFLGEVHFHLPKDPLLTFTLQTAIIFPHMTSTTPLEKGIVIFTDGSANGRSVTYIQGREPIIKENTQNTAQQAEIVAVITAFEEVSQPFNLYTDSKYVTGLFPEIETATLSPRTKIYTELKHLQRLIHKRQEKFYIGHIRGHTGLPGPLAQGNAYADSLTRILTAGKRTADGSEFEKRTADGSEFESPKKKAKVE

SEQ ID NO: 3294 - protein, 2043 aa, synthetic construct
MPAAKRVKLDGGDKKYSIGLDIGTNSVGWAVITDEYKVPSKKFKVLGNTDRHSIKKNLIGALLFDSGETAEATRLKRTARRRYTRRKNRICYLQEIFSNEMAKVDDSFFHRLEESFLVEEDKKHERHPIFGNIVDEVAYHEKYPTIYHLRKKLVDSTDKADLRLIYLALAHMIKFRGHFLIEGDLNPDNSDVDKLFIQLVQTYNQLFEENPINASGVDAKAILSARLSKSRRLENLIAQLPGEKKNGLFGNLIALSLGLTPNFKSNFDLAEDAKLQLSKDTYDDDLDNLLAQIGDQYADLFLAAKNLSDAILLSDILRVNTEITKAPLSASMIKRYDEHHQDLTLLKALVRQQLPEKYKEIFFDQSKNGYAGYIDGGASQEEFYKFIKPILEKMDGTEELLVKLNREDLLRKQRTFDNGSIPHQIHLGELHAILRRQEDFYPFLKDNREKIEKILTFRIPYYVGPLARGNSRFAWMTRKSEETITPWNFEEVVDKGASAQSFIERMTNFDKNLPNEKVLPKHSLLYEYFTVYNELTKVKYVTEGMRKPAFLSGEQKKAIVDLLFKTNRKVTVKQLKEDYFKKIECFDSVEISGVEDRFNASLGTYHDLLKIIKDKDFLDNEENEDILEDIVLTLTLFEDREMIEERLKTYAHLFDDKVMKQLKRRRYTGWGRLSRKLINGIRDKQSGKTILDFLKSDGFANRNFMQLIHDDSLTFKEDIQKAQVSGQGDSLHEHIANLAGSPAIKKGILQTVKVVDELVKVMGRHKPENIVIEMARENQTTQKGQKNSRERMKRIEEGIKELGSQILKEHPVENTQLQNEKLYLYYLQNGRDMYVDQELDINRLSDYDVDHIVPQSFLKDDSIDNKVLTRSDKARGKSDNVPSEEVVKKMKNYWRQLLNAKLITQRKFDNLTKAERGGLSELDKAGFIKRQLVETRQITKHVAQILDSRMNTKYDENDKLIREVKVITLKSKLVSDFRKDFQFYKVREINNYHHAHDAYLNAVVGTALIKKYPKLESEFVYGDYKVYDVRKMIAKSEQEIGKATAKYFFYSNIMNFFKTEITLANGEIRKRPLIETNGETGEIVWDKGRDFATVRKVLSMPQVNIVKKTEVQTGGFSKESILPKRNSDKLIARKKDWDPKKYGGFDSPTVAYSVLVVAKVEKGKSKKLKSVKELLGITIMERSSFEKNPIDFLEAKGYKEVKKDLIIKLPKYSLFELENGRKRMLASAGELQKGNELALPSKYVNFLYLASHYEKLKGSPEDNEQKQLFVEQHKHYLDEIIEQISEFSKRVILADANLDKVLSAYNKHRDKPIREQAENIIHLFTLTNLGAPAAFKYFDTTIDRKRYTSTKEVLDATLIHQSITGLYETRIDLSQLGGDGGEAAAKEAAAKEAAAKEAAAKEAAAKEAAAKGGGRDIMKDIKVRLMTDSPDDSQDLMIGAIESNLFADQISWKSDQPVWLNQWPLKQEKLQALQQLVTEQLQLGHLEESNSPWNTPVFVIKKKSGKWRLLQDLRAVNATMHDMGALQPGLPSPVAVPKGWEIIIIDLQDCFFNIKLHPEDCKRFAFSVPSPNFKRPYQRFQWKVLPQGMKNSPTLCQKFVDKAILTVRDKYQDSYIVHYMDDILLAHPSRSIVDEILTSMIQALNKHGLVVSTEKIQKYDNLKYLGTHIQGDSVSYQKLQIRTDKLRTLNDFQKLLGNINWIRPFLKLTTGELKPLFEILNGDSNPISTRKLTPEACKALQLMNERLSTARVKRLDLSQPWSLCILKTEYTPTACLWQDGVVEWIHLPHISPKVITPYDIFCTQLIIKGRHRSKELFSKDPDYIVVPYTKVQFDLLLQEKEDWPISLLGFLGEVHFHLPKDPLLTFTLQTAIIFPHMTSTTPLEKGIVIFTDGSANGRSVTYIQGREPIIKENTQNTAQQAEIVAVITAFEEVSQPFNLYTDSKYVTGLFPEIETATLSPRTKIYTELKHLQRLIHKRQEKFYIGHIRGHTGLPGPLAQGNAYADSLTRILTAGKRTADGSEFEKRTADGSEFESPKKKAKVE

SEQ ID NO: 3295 - protein, 2046 aa, synthetic construct; identical to SEQ ID NO: 3238

SEQ ID NO: 3296 - protein, 2028 aa, synthetic construct; identical to SEQ ID NO: 3201

SEQ ID NO: 3297 - protein, 2031 aa, synthetic construct
MPAAKRVKLDGGDKKYSIGLDIGTNSVGWAVITDEYKVPSKKFKVLGNTDRHSIKKNLIGALLFDSGETAEATRLKRTARRRYTRRKNRICYLQEIFSNEMAKVDDSFFHRLEESFLVEEDKKHERHPIFGNIVDEVAYHEKYPTIYHLRKKLVDSTDKADLRLIYLALAHMIKFRGHFLIEGDLNPDNSDVDKLFIQLVQTYNQLFEENPINASGVDAKAILSARLSKSRRLENLIAQLPGEKKNGLFGNLIALSLGLTPNFKSNFDLAEDAKLQLSKDTYDDDLDNLLAQIGDQYADLFLAAKNLSDAILLSDILRVNTEITKAPLSASMIKRYDEHHQDLTLLKALVRQQLPEKYKEIFFDQSKNGYAGYIDGGASQEEFYKFIKPILEKMDGTEELLVKLNREDLLRKQRTFDNGSIPHQIHLGELHAILRRQEDFYPFLKDNREKIEKILTFRIPYYVGPLARGNSRFAWMTRKSEETITPWNFEEVVDKGASAQSFIERMTNFDKNLPNEKVLPKHSLLYEYFTVYNELTKVKYVTEGMRKPAFLSGEQKKAIVDLLFKTNRKVTVKQLKEDYFKKIECFDSVEISGVEDRFNASLGTYHDLLKIIKDKDFLDNEENEDILEDIVLTLTLFEDREMIEERLKTYAHLFDDKVMKQLKRRRYTGWGRLSRKLINGIRDKQSGKTILDFLKSDGFANRNFMQLIHDDSLTFKEDIQKAQVSGQGDSLHEHIANLAGSPAIKKGILQTVKVVDELVKVMGRHKPENIVIEMARENQTTQKGQKNSRERMKRIEEGIKELGSQILKEHPVENTQLQNEKLYLYYLQNGRDMYVDQELDINRLSDYDVDHIVPQSFLKDDSIDNKVLTRSDKARGKSDNVPSEEVVKKMKNYWRQLLNAKLITQRKFDNLTKAERGGLSELDKAGFIKRQLVETRQITKHVAQILDSRMNTKYDENDKLIREVKVITLKSKLVSDFRKDFQFYKVREINNYHHAHDAYLNAVVGTALIKKYPKLESEFVYGDYKVYDVRKMIAKSEQEIGKATAKYFFYSNIMNFFKTEITLANGEIRKRPLIETNGETGEIVWDKGRDFATVRKVLSMPQVNIVKKTEVQTGGFSKESILPKRNSDKLIARKKDWDPKKYGGFDSPTVAYSVLVVAKVEKGKSKKLKSVKELLGITIMERSSFEKNPIDFLEAKGYKEVKKDLIIKLPKYSLFELENGRKRMLASAGELQKGNELALPSKYVNFLYLASHYEKLKGSPEDNEQKQLFVEQHKHYLDEIIEQISEFSKRVILADANLDKVLSAYNKHRDKPIREQAENIIHLFTLTNLGAPAAFKYFDTTIDRKRYTSTKEVLDATLIHQSITGLYETRIDLSQLGGDGGGSSGSSGSSGSSGSSGSSGGGRDIMKDIKVRLMTDSPDDSQDLMIGAIESNLFADQISWKSDQPVWLNQWPLKQEKLQALQQLVTEQLQLGHLEESNSPWNTPVFVIKKKSGKWRLLQDLRAVNATMHDMGALQPGLPSPVAVPKGWEIIIIDLQDCFFNIKLHPEDCKRFAFSVPSPNFKRPYQRFQWKVLPQGMKNSPTLCQKFVDKAILTVRDKYQDSYIVHYMDDILLAHPSRSIVDEILTSMIQALNKHGLVVSTEKIQKYDNLKYLGTHIQGDSVSYQKLQIRTDKLRTLNDFQKLLGNINWIRPFLKLTTGELKPLFEILNGDSNPISTRKLTPEACKALQLMNERLSTARVKRLDLSQPWSLCILKTEYTPTACLWQDGVVEWIHLPHISPKVITPYDIFCTQLIIKGRHRSKELFSKDPDYIVVPYTKVQFDLLLQEKEDWPISLLGFLGEVHFHLPKDPLLTFTLQTAIIFPHMTSTTPLEKGIVIFTDGSANGRSVTYIQGREPIIKENTQNTAQQAEIVAVITAFEEVSQPFNLYTDSKYVTGLFPEIETATLSPRTKIYTELKHLQRLIHKRQEKFYIGHIRGHTGLPGPLAQGNAYADSLTRILTAGKRTADGSEFEKRTADGSEFESPKKKAKVE

SEQ ID NO: 3298 - protein, 2028 aa, synthetic construct
MPAAKRVKLDGGDKKYSIGLDIGTNSVGWAVITDEYKVPSKKFKVLGNTDRHSIKKNLIGALLFDSGETAEATRLKRTARRRYTRRKNRICYLQEIFSNEMAKVDDSFFHRLEESFLVEEDKKHERHPIFGNIVDEVAYHEKYPTIYHLRKKLVDSTDKADLRLIYLALAHMIKFRGHFLIEGDLNPDNSDVDKLFIQLVQTYNQLFEENPINASGVDAKAILSARLSKSRRLENLIAQLPGEKKNGLFGNLIALSLGLTPNFKSNFDLAEDAKLQLSKDTYDDDLDNLLAQIGDQYADLFLAAKNLSDAILLSDILRVNTEITKAPLSASMIKRYDEHHQDLTLLKALVRQQLPEKYKEIFFDQSKNGYAGYIDGGASQEEFYKFIKPILEKMDGTEELLVKLNREDLLRKQRTFDNGSIPHQIHLGELHAILRRQEDFYPFLKDNREKIEKILTFRIPYYVGPLARGNSRFAWMTRKSEETITPWNFEEVVDKGASAQSFIERMTNFDKNLPNEKVLPKHSLLYEYFTVYNELTKVKYVTEGMRKPAFLSGEQKKAIVDLLFKTNRKVTVKQLKEDYFKKIECFDSVEISGVEDRFNASLGTYHDLLKIIKDKDFLDNEENEDILEDIVLTLTLFEDREMIEERLKTYAHLFDDKVMKQLKRRRYTGWGRLSRKLINGIRDKQSGKTILDFLKSDGFANRNFMQLIHDDSLTFKEDIQKAQVSGQGDSLHEHIANLAGSPAIKKGILQTVKVVDELVKVMGRHKPENIVIEMARENQTTQKGQKNSRERMKRIEEGIKELGSQILKEHPVENTQLQNEKLYLYYLQNGRDMYVDQELDINRLSDYDVDHIVPQSFLKDDSIDNKVLTRSDKARGKSDNVPSEEVVKKMKNYWRQLLNAKLITQRKFDNLTKAERGGLSELDKAGFIKRQLVETRQITKHVAQILDSRMNTKYDENDKLIREVKVITLKSKLVSDFRKDFQFYKVREINNYHHAHDAYLNAVVGTALIKKYPKLESEFVYGDYKVYDVRKMIAKSEQEIGKATAKYFFYSNIMNFFKTEITLANGEIRKRPLIETNGETGEIVWDKGRDFATVRKVLSMPQVNIVKKTEVQTGGFSKESILPKRNSDKLIARKKDWDPKKYGGFDSPTVAYSVLVVAKVEKGKSKKLKSVKELLGITIMERSSFEKNPIDFLEAKGYKEVKKDLIIKLPKYSLFELENGRKRMLASAGELQKGNELALPSKYVNFLYLASHYEKLKGSPEDNEQKQLFVEQHKHYLDEIIEQISEFSKRVILADANLDKVLSAYNKHRDKPIREQAENIIHLFTLTNLGAPAAFKYFDTTIDRKRYTSTKEVLDATLIHQSITGLYETRIDLSQLGGDGGGGGGSEAAAKGGGGSGGGRDIMKDIKVRLMTDSPDDSQDLMIGAIESNLFADQISWKSDQPVWLNQWPLKQEKLQALQQLVTEQLQLGHLEESNSPWNTPVFVIKKKSGKWRLLQDLRAVNATMHDMGALQPGLPSPVAVPKGWEIIIIDLQDCFFNIKLHPEDCKRFAFSVPSPNFKRPYQRFQWKVLPQGMKNSPTLCQKFVDKAILTVRDKYQDSYIVHYMDDILLAHPSRSIVDEILTSMIQALNKHGLVVSTEKIQKYDNLKYLGTHIQGDSVSYQKLQIRTDKLRTLNDFQKLLGNINWIRPFLKLTTGELKPLFEILNGDSNPISTRKLTPEACKALQLMNERLSTARVKRLDLSQPWSLCILKTEYTPTACLWQDGVVEWIHLPHISPKVITPYDIFCTQLIIKGRHRSKELFSKDPDYIVVPYTKVQFDLLLQEKEDWPISLLGFLGEVHFHLPKDPLLTFTLQTAIIFPHMTSTTPLEKGIVIFTDGSANGRSVTYIQGREPIIKENTQNTAQQAEIVAVITAFEEVSQPFNLYTDSKYVTGLFPEIETATLSPRTKIYTELKHLQRLIHKRQEKFYIGHIRGHTGLPGPLAQGNAYADSLTRILTAGKRTADGSEFEKRTADGSEFESPKKKAKVE

SEQ ID NO: 3299 - protein, 2028 aa, synthetic construct
MPAAKRVKLDGGDKKYSIGLDIGTNSVGWAVITDEYKVPSKKFKVLGNTDRHSIKKNLIGALLFDSGETAEATRLKRTARRRYTRRKNRICYLQEIFSNEMAKVDDSFFHRLEESFLVEEDKKHERHPIFGNIVDEVAYHEKYPTIYHLRKKLVDSTDKADLRLIYLALAHMIKFRGHFLIEGDLNPDNSDVDKLFIQLVQTYNQLFEENPINASGVDAKAILSARLSKSRRLENLIAQLPGEKKNGLFGNLIALSLGLTPNFKSNFDLAEDAKLQLSKDTYDDDLDNLLAQIGDQYADLFLAAKNLSDAILLSDILRVNTEITKAPLSASMIKRYDEHHQDLTLLKALVRQQLPEKYKEIFFDQSKNGYAGYIDGGASQEEFYKFIKPILEKMDGTEELLVKLNREDLLRKQRTFDNGSIPHQIHLGELHAILRRQEDFYPFLKDNREKIEKILTFRIPYYVGPLARGNSRFAWMTRKSEETITPWNFEEVVDKGASAQSFIERMTNFDKNLPNEKVLPKHSLLYEYFTVYNELTKVKYVTEGMRKPAFLSGEQKKAIVDLLFKTNRKVTVKQLKEDYFKKIECFDSVEISGVEDRFNASLGTYHDLLKIIKDKDFLDNEENEDILEDIVLTLTLFEDREMIEERLKTYAHLFDDKVMKQLKRRRYTGWGRLSRKLINGIRDKQSGKTILDFLKSDGFANRNFMQLIHDDSLTFKEDIQKAQVSGQGDSLHEHIANLAGSPAIKKGILQTVKVVDELVKVMGRHKPENIVIEMARENQTTQKGQKNSRERMKRIEEGIKELGSQILKEHPVENTQLQNEKLYLYYLQNGRDMYVDQELDINRLSDYDVDHIVPQSFLKDDSIDNKVLTRSDKARGKSDNVPSEEVVKKMKNYWRQLLNAKLITQRKFDNLTKAERGGLSELDKAGFIKRQLVETRQITKHVAQILDSRMNTKYDENDKLIREVKVITLKSKLVSDFRKDFQFYKVREINNYHHAHDAYLNAVVGTALIKKYPKLESEFVYGDYKVYDVRKMIAKSEQEIGKATAKYFFYSNIMNFFKTEITLANGEIRKRPLIETNGETGEIVWDKGRDFATVRKVLSMPQVNIVKKTEVQTGGFSKESILPKRNSDKLIARKKDWDPKKYGGFDSPTVAYSVLVVAKVEKGKSKKLKSVKELLGITIMERSSFEKNPIDFLEAKGYKEVKKDLIIKLPKYSLFELENGRKRMLASAGELQKGNELALPSKYVNFLYLASHYEKLKGSPEDNEQKQLFVEQHKHYLDEIIEQISEFSKRVILADANLDKVLSAYNKHRDKPIREQAENIIHLFTLTNLGAPAAFKYFDTTIDRKRYTSTKEVLDATLIHQSITGLYETRIDLSQLGGDGGEAAAKEAAAKEAAAKGGGRDIMKDIKVRLMTDSPDDSQDLMIGAIESNLFADQISWKSDQPVWLNQWPLKQEKLQALQQLVTEQLQLGHLEESNSPWNTPVFVIKKKSGKWRLLQDLRAVNATMHDMGALQPGLPSPVAVPKGWEIIIIDLQDCFFNIKLHPEDCKRFAFSVPSPNFKRPYQRFQWKVLPQGMKNSPTLCQKFVDKAILTVRDKYQDSYIVHYMDDILLAHPSRSIVDEILTSMIQALNKHGLVVSTEKIQKYDNLKYLGTHIQGDSVSYQKLQIRTDKLRTLNDFQKLLGNINWIRPFLKLTTGELKPLFEILNGDSNPISTRKLTPEACKALQLMNERLSTARVKRLDLSQPWSLCILKTEYTPTACLWQDGVVEWIHLPHISPKVITPYDIFCTQLIIKGRHRSKELFSKDPDYIVVPYTKVQFDLLLQEKEDWPISLLGFLGEVHFHLPKDPLLTFTLQTAIIFPHMTSTTPLEKGIVIFTDGSANGRSVTYIQGREPIIKENTQNTAQQAEIVAVITAFEEVSQPFNLYTDSKYVTGLFPEIETATLSPRTKIYTELKHLQRLIHKRQEKFYIGHIRGHTGLPGPLAQGNAYADSLTRILTAGKRTADGSEFEKRTADGSEFESPKKKAKVE

SEQ ID NO: 3300 - protein, 2024 aa, synthetic construct; identical to SEQ ID NO: 3213

SEQ ID NO: 3301 - protein, 2024 aa, synthetic construct
MPAAKRVKLDGGDKKYSIGLDIGTNSVGWAVITDEYKVPSKKFKVLGNTDRHSIKKNLIGALLFDSGETAEATRLKRTARRRYTRRKNRICYLQEIFSNEMAKVDDSFFHRLEESFLVEEDKKHERHPIFGNIVDEVAYHEKYPTIYHLRKKLVDSTDKADLRLIYLALAHMIKFRGHFLIEGDLNPDNSDVDKLFIQLVQTYNQLFEENPINASGVDAKAILSARLSKSRRLENLIAQLPGEKKNGLFGNLIALSLGLTPNFKSNFDLAEDAKLQLSKDTYDDDLDNLLAQIGDQYADLFLAAKNLSDAILLSDILRVNTEITKAPLSASMIKRYDEHHQDLTLLKALVRQQLPEKYKEIFFDQSKNGYAGYIDGGASQEEFYKFIKPILEKMDGTEELLVKLNREDLLRKQRTFDNGSIPHQIHLGELHAILRRQEDFYPFLKDNREKIEKILTFRIPYYVGPLARGNSRFAWMTRKSEETITPWNFEEVVDKGASAQSFIERMTNFDKNLPNEKVLPKHSLLYEYFTVYNELTKVKYVTEGMRKPAFLSGEQKKAIVDLLFKTNRKVTVKQLKEDYFKKIECFDSVEISGVEDRFNASLGTYHDLLKIIKDKDFLDNEENEDILEDIVLTLTLFEDREMIEERLKTYAHLFDDKVMKQLKRRRYTGWGRLSRKLINGIRDKQSGKTILDFLKSDGFANRNFMQLIHDDSLTFKEDIQKAQVSGQGDSLHEHIANLAGSPAIKKGILQTVKVVDELVKVMGRHKPENIVIEMARENQTTQKGQKNSRERMKRIEEGIKELGSQILKEHPVENTQLQNEKLYLYYLQNGRDMYVDQELDINRLSDYDVDHIVPQSFLKDDSIDNKVLTRSDKARGKSDNVPSEEVVKKMKNYWRQLLNAKLITQRKFDNLTKAERGGLSELDKAGFIKRQLVETRQITKHVAQILDSRMNTKYDENDKLIREVKVITLKSKLVSDFRKDFQFYKVREINNYHHAHDAYLNAVVGTALIKKYPKLESEFVYGDYKVYDVRKMIAKSEQEIGKATAKYFFYSNIMNFFKTEITLANGEIRKRPLIETNGETGEIVWDKGRDFATVRKVLSMPQVNIVKKTEVQTGGFSKESILPKRNSDKLIARKKDWDPKKYGGFDSPTVAYSVLVVAKVEKGKSKKLKSVKELLGITIMERSSFEKNPIDFLEAKGYKEVKKDLIIKLPKYSLFELENGRKRMLASAGELQKGNELALPSKYVNFLYLASHYEKLKGSPEDNEQKQLFVEQHKHYLDEIIEQISEFSKRVILADANLDKVLSAYNKHRDKPIREQAENIIHLFTLTNLGAPAAFKYFDTTIDRKRYTSTKEVLDATLIHQSITGLYETRIDLSQLGGDGGEAAAKGSSGGSGGGRDIMKDIKVRLMTDSPDDSQDLMIGAIESNLFADQISWKSDQPVWLNQWPLKQEKLQALQQLVTEQLQLGHLEESNSPWNTPVFVIKKKSGKWRLLQDLRAVNATMHDMGALQPGLPSPVAVPKGWEIIIIDLQDCFFNIKLHPEDCKRFAFSVPSPNFKRPYQRFQWKVLPQGMKNSPTLCQKFVDKAILTVRDKYQDSYIVHYMDDILLAHPSRSIVDEILTSMIQALNKHGLVVSTEKIQKYDNLKYLGTHIQGDSVSYQKLQIRTDKLRTLNDFQKLLGNINWIRPFLKLTTGELKPLFEILNGDSNPISTRKLTPEACKALQLMNERLSTARVKRLDLSQPWSLCILKTEYTPTACLWQDGVVEWIHLPHISPKVITPYDIFCTQLIIKGRHRSKELFSKDPDYIVVPYTKVQFDLLLQEKEDWPISLLGFLGEVHFHLPKDPLLTFTLQTAIIFPHMTSTTPLEKGIVIFTDGSANGRSVTYIQGREPIIKENTQNTAQQAEIVAVITAFEEVSQPFNLYTDSKYVTGLFPEIETATLSPRTKIYTELKHLQRLIHKRQEKFYIGHIRGHTGLPGPLAQGNAYADSLTRILTAGKRTADGSEFEKRTADGSEFESPKKKAKVE

SEQ ID NO: 3302 - protein, 2028 aa, synthetic construct
MPAAKRVKLDGGDKKYSIGLDIGTNSVGWAVITDEYKVPSKKFKVLGNTDRHSIKKNLIGALLFDSGETAEATRLKRTARRRYTRRKNRICYLQEIFSNEMAKVDDSFFHRLEESFLVEEDKKHERHPIFGNIVDEVAYHEKYPTIYHLRKKLVDSTDKADLRLIYLALAHMIKFRGHFLIEGDLNPDNSDVDKLFIQLVQTYNQLFEENPINASGVDAKAILSARLSKSRRLENLIAQLPGEKKNGLFGNLIALSLGLTPNFKSNFDLAEDAKLQLSKDTYDDDLDNLLAQIGDQYADLFLAAKNLSDAILLSDILRVNTEITKAPLSASMIKRYDEHHQDLTLLKALVRQQLPEKYKEIFFDQSKNGYAGYIDGGASQEEFYKFIKPILEKMDGTEELLVKLNREDLLRKQRTFDNGSIPHQIHLGELHAILRRQEDFYPFLKDNREKIEKILTFRIPYYVGPLARGNSRFAWMTRKSEETITPWNFEEVVDKGASAQSFIERMTNFDKNLPNEKVLPKHSLLYEYFTVYNELTKVKYVTEGMRKPAFLSGEQKKAIVDLLFKTNRKVTVKQLKEDYFKKIECFDSVEISGVEDRFNASLGTYHDLLKIIKDKDFLDNEENEDILEDIVLTLTLFEDREMIEERLKTYAHLFDDKVMKQLKRRRYTGWGRLSRKLINGIRDKQSGKTILDFLKSDGFANRNFMQLIHDDSLTFKEDIQKAQVSGQGDSLHEHIANLAGSPAIKKGILQTVKVVDELVKVMGRHKPENIVIEMARENQTTQKGQKNSRERMKRIEEGIKELGSQILKEHPVENTQLQNEKLYLYYLQNGRDMYVDQELDINRLSDYDVDHIVPQSFLKDDSIDNKVLTRSDKARGKSDNVPSEEVVKKMKNYWRQLLNAKLITQRKFDNLTKAERGGLSELDKAGFIKRQLVETRQITKHVAQILDSRMNTKYDENDKLIREVKVITLKSKLVSDFRKDFQFYKVREINNYHHAHDAYLNAVVGTALIKKYPKLESEFVYGDYKVYDVRKMIAKSEQEIGKATAKYFFYSNIMNFFKTEITLANGEIRKRPLIETNGETGEIVWDKGRDFATVRKVLSMPQVNIVKKTEVQTGGFSKESILPKRNSDKLIARKKDWDPKKYGGFDSPTVAYSVLVVAKVEKGKSKKLKSVKELLGITIMERSSFEKNPIDFLEAKGYKEVKKDLIIKLPKYSLFELENGRKRMLASAGELQKGNELALPSKYVNFLYLASHYEKLKGSPEDNEQKQLFVEQHKHYLDEIIEQISEFSKRVILADANLDKVLSAYNKHRDKPIREQAENIIHLFTLTNLGAPAAFKYFDTTIDRKRYTSTKEVLDATLIHQSITGLYETRIDLSQLGGDGGGGSGGSGGSGGSGGSGGGRDIMKDIKVRLMTDSPDDSQDLMIGAIESNLFADQISWKSDQPVWLNQWPLKQEKLQALQQLVTEQLQLGHLEESNSPWNTPVFVIKKKSGKWRLLQDLRAVNATMHDMGALQPGLPSPVAVPKGWEIIIIDLQDCFFNIKLHPEDCKRFAFSVPSPNFKRPYQRFQWKVLPQGMKNSPTLCQKFVDKAILTVRDKYQDSYIVHYMDDILLAHPSRSIVDEILTSMIQALNKHGLVVSTEKIQKYDNLKYLGTHIQGDSVSYQKLQIRTDKLRTLNDFQKLLGNINWIRPFLKLTTGELKPLFEILNGDSNPISTRKLTPEACKALQLMNERLSTARVKRLDLSQPWSLCILKTEYTPTACLWQDGVVEWIHLPHISPKVITPYDIFCTQLIIKGRHRSKELFSKDPDYIVVPYTKVQFDLLLQEKEDWPISLLGFLGEVHFHLPKDPLLTFTLQTAIIFPHMTSTTPLEKGIVIFTDGSANGRSVTYIQGREPIIKENTQNTAQQAEIVAVITAFEEVSQPFNLYTDSKYVTGLFPEIETATLSPRTKIYTELKHLQRLIHKRQEKFYIGHIRGHTGLPGPLAQGNAYADSLTRILTAGKRTADGSEFEKRTADGSEFESPKKKAKVE

SEQ ID NO: 3303 - protein, 2028 aa, synthetic construct
MPAAKRVKLDGGDKKYSIGLDIGTNSVGWAVITDEYKVPSKKFKVLGNTDRHSIKKNLIGALLFDSGETAEATRLKRTARRRYTRRKNRICYLQEIFSNEMAKVDDSFFHRLEESFLVEEDKKHERHPIFGNIVDEVAYHEKYPTIYHLRKKLVDSTDKADLRLIYLALAHMIKFRGHFLIEGDLNPDNSDVDKLFIQLVQTYNQLFEENPINASGVDAKAILSARLSKSRRLENLIAQLPGEKKNGLFGNLIALSLGLTPNFKSNFDLAEDAKLQLSKDTYDDDLDNLLAQIGDQYADLFLAAKNLSDAILLSDILRVNTEITKAPLSASMIKRYDEHHQDLTLLKALVRQQLPEKYKEIFFDQSKNGYAGYIDGGASQEEFYKFIKPILEKMDGTEELLVKLNREDLLRKQRTFDNGSIPHQIHLGELHAILRRQEDFYPFLKDNREKIEKILTFRIPYYVGPLARGNSRFAWMTRKSEETITPWNFEEVVDKGASAQSFIERMTNFDKNLPNEKVLPKHSLLYEYFTVYNELTKVKYVTEGMRKPAFLSGEQKKAIVDLLFKTNRKVTVKQLKEDYFKKIECFDSVEISGVEDRFNASLGTYHDLLKIIKDKDFLDNEENEDILEDIVLTLTLFEDREMIEERLKTYAHLFDDKVMKQLKRRRYTGWGRLSRKLINGIRDKQSGKTILDFLKSDGFANRNFMQLIHDDSLTFKEDIQKAQVSGQGDSLHEHIANLAGSPAIKKGILQTVKVVDELVKVMGRHKPENIVIEMARENQTTQKGQKNSRERMKRIEEGIKELGSQILKEHPVENTQLQNEKLYLYYLQNGRDMYVDQELDINRLSDYDVDHIVPQSFLKDDSIDNKVLTRSDKARGKSDNVPSEEVVKKMKNYWRQLLNAKLITQRKFDNLTKAERGGLSELDKAGFIKRQLVETRQITKHVAQILDSRMNTKYDENDKLIREVKVITLKSKLVSDFRKDFQFYKVREINNYHHAHDAYLNAVVGTALIKKYPKLESEFVYGDYKVYDVRKMIAKSEQEIGKATAKYFFYSNIMNFFKTEITLANGEIRKRPLIETNGETGEIVWDKGRDFATVRKVLSMPQVNIVKKTEVQTGGFSKESILPKRNSDKLIARKKDWDPKKYGGFDSPTVAYSVLVVAKVEKGKSKKLKSVKELLGITIMERSSFEKNPIDFLEAKGYKEVKKDLIIKLPKYSLFELENGRKRMLASAGELQKGNELALPSKYVNFLYLASHYEKLKGSPEDNEQKQLFVEQHKHYLDEIIEQISEFSKRVILADANLDKVLSAYNKHRDKPIREQAENIIHLFTLTNLGAPAAFKYFDTTIDRKRYTSTKEVLDATLIHQSITGLYETRIDLSQLGGDGGGSSGSSGSSGSSGSSGGGRDIMKDIKVRLMTDSPDDSQDLMIGAIESNLFADQISWKSDQPVWLNQWPLKQEKLQALQQLVTEQLQLGHLEESNSPWNTPVFVIKKKSGKWRLLQDLRAVNATMHDMGALQPGLPSPVAVPKGWEIIIIDLQDCFFNIKLHPEDCKRFAFSVPSPNFKRPYQRFQWKVLPQGMKNSPTLCQKFVDKAILTVRDKYQDSYIVHYMDDILLAHPSRSIVDEILTSMIQALNKHGLVVSTEKIQKYDNLKYLGTHIQGDSVSYQKLQIRTDKLRTLNDFQKLLGNINWIRPFLKLTTGELKPLFEILNGDSNPISTRKLTPEACKALQLMNERLSTARVKRLDLSQPWSLCILKTEYTPTACLWQDGVVEWIHLPHISPKVITPYDIFCTQLIIKGRHRSKELFSKDPDYIVVPYTKVQFDLLLQEKEDWPISLLGFLGEVHFHLPKDPLLTFTLQTAIIFPHMTSTTPLEKGIVIFTDGSANGRSVTYIQGREPIIKENTQNTAQQAEIVAVITAFEEVSQPFNLYTDSKYVTGLFPEIETATLSPRTKIYTELKHLQRLIHKRQEKFYIGHIRGHTGLPGPLAQGNAYADSLTRILTAGKRTADGSEFEKRTADGSEFESPKKKAKVE

SEQ ID NO: 3304 - protein, 2022 aa, synthetic construct; identical to SEQ ID NO: 3221

SEQ ID NO: 3305 - protein, 2022 aa, synthetic construct
MPAAKRVKLDGGDKKYSIGLDIGTNSVGWAVITDEYKVPSKKFKVLGNTDRHSIKKNLIGALLFDSGETAEATRLKRTARRRYTRRKNRICYLQEIFSNEMAKVDDSFFHRLEESFLVEEDKKHERHPIFGNIVDEVAYHEKYPTIYHLRKKLVDSTDKADLRLIYLALAHMIKFRGHFLIEGDLNPDNSDVDKLFIQLVQTYNQLFEENPINASGVDAKAILSARLSKSRRLENLIAQLPGEKKNGLFGNLIALSLGLTPNFKSNFDLAEDAKLQLSKDTYDDDLDNLLAQIGDQYADLFLAAKNLSDAILLSDILRVNTEITKAPLSASMIKRYDEHHQDLTLLKALVRQQLPEKYKEIFFDQSKNGYAGYIDGGASQEEFYKFIKPILEKMDGTEELLVKLNREDLLRKQRTFDNGSIPHQIHLGELHAILRRQEDFYPFLKDNREKIEKILTFRIPYYVGPLARGNSRFAWMTRKSEETITPWNFEEVVDKGASAQSFIERMTNFDKNLPNEKVLPKHSLLYEYFTVYNELTKVKYVTEGMRKPAFLSGEQKKAIVDLLFKTNRKVTVKQLKEDYFKKIECFDSVEISGVEDRFNASLGTYHDLLKIIKDKDFLDNEENEDILEDIVLTLTLFEDREMIEERLKTYAHLFDDKVMKQLKRRRYTGWGRLSRKLINGIRDKQSGKTILDFLKSDGFANRNFMQLIHDDSLTFKEDIQKAQVSGQGDSLHEHIANLAGSPAIKKGILQTVKVVDELVKVMGRHKPENIVIEMARENQTTQKGQKNSRERMKRIEEGIKELGSQILKEHPVENTQLQNEKLYLYYLQNGRDMYVDQELDINRLSDYDVDHIVPQSFLKDDSIDNKVLTRSDKARGKSDNVPSEEVVKKMKNYWRQLLNAKLITQRKFDNLTKAERGGLSELDKAGFIKRQLVETRQITKHVAQILDSRMNTKYDENDKLIREVKVITLKSKLVSDFRKDFQFYKVREINNYHHAHDAYLNAVVGTALIKKYPKLESEFVYGDYKVYDVRKMIAKSEQEIGKATAKYFFYSNIMNFFKTEITLANGEIRKRPLIETNGETGEIVWDKGRDFATVRKVLSMPQVNIVKKTEVQTGGFSKESILPKRNSDKLIARKKDWDPKKYGGFDSPTVAYSVLVVAKVEKGKSKKLKSVKELLGITIMERSSFEKNPIDFLEAKGYKEVKKDLIIKLPKYSLFELENGRKRMLASAGELQKGNELALPSKYVNFLYLASHYEKLKGSPEDNEQKQLFVEQHKHYLDEIIEQISEFSKRVILADANLDKVLSAYNKHRDKPIREQAENIIHLFTLTNLGAPAAFKYFDTTIDRKRYTSTKEVLDATLIHQSITGLYETRIDLSQLGGDGGGSSGGSPAPGGGRDIMKDIKVRLMTDSPDDSQDLMIGAIESNLFADQISWKSDQPVWLNQWPLKQEKLQALQQLVTEQLQLGHLEESNSPWNTPVFVIKKKSGKWRLLQDLRAVNATMHDMGALQPGLPSPVAVPKGWEIIIIDLQDCFFNIKLHPEDCKRFAFSVPSPNFKRPYQRFQWKVLPQGMKNSPTLCQKFVDKAILTVRDKYQDSYIVHYMDDILLAHPSRSIVDEILTSMIQALNKHGLVVSTEKIQKYDNLKYLGTHIQGDSVSYQKLQIRTDKLRTLNDFQKLLGNINWIRPFLKLTTGELKPLFEILNGDSNPISTRKLTPEACKALQLMNERLSTARVKRLDLSQPWSLCILKTEYTPTACLWQDGVVEWIHLPHISPKVITPYDIFCTQLIIKGRHRSKELFSKDPDYIVVPYTKVQFDLLLQEKEDWPISLLGFLGEVHFHLPKDPLLTFTLQTAIIFPHMTSTTPLEKGIVIFTDGSANGRSVTYIQGREPIIKENTQNTAQQAEIVAVITAFEEVSQPFNLYTDSKYVTGLFPEIETATLSPRTKIYTELKHLQRLIHKRQEKFYIGHIRGHTGLPGPLAQGNAYADSLTRILTAGKRTADGSEFEKRTADGSEFESPKKKAKVE

SEQ ID NO: 3306 - protein, 2024 aa, synthetic construct
MPAAKRVKLDGGDKKYSIGLDIGTNSVGWAVITDEYKVPSKKFKVLGNTDRHSIKKNLIGALLFDSGETAEATRLKRTARRRYTRRKNRICYLQEIFSNEMAKVDDSFFHRLEESFLVEEDKKHERHPIFGNIVDEVAYHEKYPTIYHLRKKLVDSTDKADLRLIYLALAHMIKFRGHFLIEGDLNPDNSDVDKLFIQLVQTYNQLFEENPINASGVDAKAILSARLSKSRRLENLIAQLPGEKKNGLFGNLIALSLGLTPNFKSNFDLAEDAKLQLSKDTYDDDLDNLLAQIGDQYADLFLAAKNLSDAILLSDILRVNTEITKAPLSASMIKRYDEHHQDLTLLKALVRQQLPEKYKEIFFDQSKNGYAGYIDGGASQEEFYKFIKPILEKMDGTEELLVKLNREDLLRKQRTFDNGSIPHQIHLGELHAILRRQEDFYPFLKDNREKIEKILTFRIPYYVGPLARGNSRFAWMTRKSEETITPWNFEEVVDKGASAQSFIERMTNFDKNLPNEKVLPKHSLLYEYFTVYNELTKVKYVTEGMRKPAFLSGEQKKAIVDLLFKTNRKVTVKQLKEDYFKKIECFDSVEISGVEDRFNASLGTYHDLLKIIKDKDFLDNEENEDILEDIVLTLTLFEDREMIEERLKTYAHLFDDKVMKQLKRRRYTGWGRLSRKLINGIRDKQSGKTILDFLKSDGFANRNFMQLIHDDSLTFKEDIQKAQVSGQGDSLHEHIANLAGSPAIKKGILQTVKVVDELVKVMGRHKPENIVIEMARENQTTQKGQKNSRERMKRIEEGIKELGSQILKEHPVENTQLQNEKLYLYYLQNGRDMYVDQELDINRLSDYDVDHIVPQSFLKDDSIDNKVLTRSDKARGKSDNVPSEEVVKKMKNYWRQLLNAKLITQRKFDNLTKAERGGLSELDKAGFIKRQLVETRQITKHVAQILDSRMNTKYDENDKLIREVKVITLKSKLVSDFRKDFQFYKVREINNYHHAHDAYLNAVVGTALIKKYPKLESEFVYGDYKVYDVRKMIAKSEQEIGKATAKYFFYSNIMNFFKTEITLANGEIRKRPLIETNGETGEIVWDKGRDFATVRKVLSMPQVNIVKKTEVQTGGFSKESILPKRNSDKLIARKKDWDPKKYGGFDSPTVAYSVLVVAKVEKGKSKKLKSVKELLGITIMERSSFEKNPIDFLEAKGYKEVKKDLIIKLPKYSLFELENGRKRMLASAGELQKGNELALPSKYVNFLYLASHYEKLKGSPEDNEQKQLFVEQHKHYLDEIIEQISEFSKRVILADANLDKVLSAYNKHRDKPIREQAENIIHLFTLTNLGAPAAFKYFDTTIDRKRYTSTKEVLDATLIHQSITGLYETRIDLSQLGGDGGEAAAKGGGGSSGGGRDIMKDIKVRLMTDSPDDSQDLMIGAIESNLFADQISWKSDQPVWLNQWPLKQEKLQALQQLVTEQLQLGHLEESNSPWNTPVFVIKKKSGKWRLLQDLRAVNATMHDMGALQPGLPSPVAVPKGWEIIIIDLQDCFFNIKLHPEDCKRFAFSVPSPNFKRPYQRFQWKVLPQGMKNSPTLCQKFVDKAILTVRDKYQDSYIVHYMDDILLAHPSRSIVDEILTSMIQALNKHGLVVSTEKIQKYDNLKYLGTHIQGDSVSYQKLQIRTDKLRTLNDFQKLLGNINWIRPFLKLTTGELKPLFEILNGDSNPISTRKLTPEACKALQLMNERLSTARVKRLDLSQPWSLCILKTEYTPTACLWQDGVVEWIHLPHISPKVITPYDIFCTQLIIKGRHRSKELFSKDPDYIVVPYTKVQFDLLLQEKEDWPISLLGFLGEVHFHLPKDPLLTFTLQTAIIFPHMTSTTPLEKGIVIFTDGSANGRSVTYIQGREPIIKENTQNTAQQAEIVAVITAFEEVSQPFNLYTDSKYVTGLFPEIETATLSPRTKIYTELKHLQRLIHKRQEKFYIGHIRGHTGLPGPLAQGNAYADSLTRILTAGKRTADGSEFEKRTADGSEFESPKKKAKVE

SEQ ID NO: 3307 - protein, 2021 aa, synthetic construct
MPAAKRVKLDGGDKKYSIGLDIGTNSVGWAVITDEYKVPSKKFKVLGNTDRHSIKKNLIGALLFDSGETAEATRLKRTARRRYTRRKNRICYLQEIFSNEMAKVDDSFFHRLEESFLVEEDKKHERHPIFGNIVDEVAYHEKYPTIYHLRKKLVDSTDKADLRLIYLALAHMIKFRGHFLIEGDLNPDNSDVDKLFIQLVQTYNQLFEENPINASGVDAKAILSARLSKSRRLENLIAQLPGEKKNGLFGNLIALSLGLTPNFKSNFDLAEDAKLQLSKDTYDDDLDNLLAQIGDQYADLFLAAKNLSDAILLSDILRVNTEITKAPLSASMIKRYDEHHQDLTLLKALVRQQLPEKYKEIFFDQSKNGYAGYIDGGASQEEFYKFIKPILEKMDGTEELLVKLNREDLLRKQRTFDNGSIPHQIHLGELHAILRRQEDFYPFLKDNREKIEKILTFRIPYYVGPLARGNSRFAWMTRKSEETITPWNFEEVVDKGASAQSFIERMTNFDKNLPNEKVLPKHSLLYEYFTVYNELTKVKYVTEGMRKPAFLSGEQKKAIVDLLFKTNRKVTVKQLKEDYFKKIECFDSVEISGVEDRFNASLGTYHDLLKIIKDKDFLDNEENEDILEDIVLTLTLFEDREMIEERLKTYAHLFDDKVMKQLKRRRYTGWGRLSRKLINGIRDKQSGKTILDFLKSDGFANRNFMQLIHDDSLTFKEDIQKAQVSGQGDSLHEHIANLAGSPAIKKGILQTVKVVDELVKVMGRHKPENIVIEMARENQTTQKGQKNSRERMKRIEEGIKELGSQILKEHPVENTQLQNEKLYLYYLQNGRDMYVDQELDINRLSDYDVDHIVPQSFLKDDSIDNKVLTRSDKARGKSDNVPSEEVVKKMKNYWRQLLNAKLITQRKFDNLTKAERGGLSELDKAGFIKRQLVETRQITKHVAQILDSRMNTKYDENDKLIREVKVITLKSKLVSDFRKDFQFYKVREINNYHHAHDAYLNAVVGTALIKKYPKLESEFVYGDYKVYDVRKMIAKSEQEIGKATAKYFFYSNIMNFFKTEITLANGEIRKRPLIETNGETGEIVWDKGRDFATVRKVLSMPQVNIVKKTEVQTGGFSKESILPKRNSDKLIARKKDWDPKKYGGFDSPTVAYSVLVVAKVEKGKSKKLKSVKELLGITIMERSSFEKNPIDFLEAKGYKEVKKDLIIKLPKYSLFELENGRKRMLASAGELQKGNELALPSKYVNFLYLASHYEKLKGSPEDNEQKQLFVEQHKHYLDEIIEQISEFSKRVILADANLDKVLSAYNKHRDKPIREQAENIIHLFTLTNLGAPAAFKYFDTTIDRKRYTSTKEVLDATLIHQSITGLYETRIDLSQLGGDGGGSSEAAAKGGGRDIMKDIKVRLMTDSPDDSQDLMIGAIESNLFADQISWKSDQPVWLNQWPLKQEKLQALQQLVTEQLQLGHLEESNSPWNTPVFVIKKKSGKWRLLQDLRAVNATMHDMGALQPGLPSPVAVPKGWEIIIIDLQDCFFNIKLHPEDCKRFAFSVPSPNFKRPYQRFQWKVLPQGMKNSPTLCQKFVDKAILTVRDKYQDSYIVHYMDDILLAHPSRSIVDEILTSMIQALNKHGLVVSTEKIQKYDNLKYLGTHIQGDSVSYQKLQIRTDKLRTLNDFQKLLGNINWIRPFLKLTTGELKPLFEILNGDSNPISTRKLTPEACKALQLMNERLSTARVKRLDLSQPWSLCILKTEYTPTACLWQDGVVEWIHLPHISPKVITPYDIFCTQLIIKGRHRSKELFSKDPDYIVVPYTKVQFDLLLQEKEDWPISLLGFLGEVHFHLPKDPLLTFTLQTAIIFPHMTSTTPLEKGIVIFTDGSANGRSVTYIQGREPIIKENTQNTAQQAEIVAVITAFEEVSQPFNLYTDSKYVTGLFPEIETATLSPRTKIYTELKHLQRLIHKRQEKFYIGHIRGHTGLPGPLAQGNAYADSLTRILTAGKRTADGSEFEKRTADGSEFESPKKKAKVE

SEQ ID NO: 3308 - protein, 2022 aa, synthetic construct; identical to SEQ ID NO: 3224

SEQ ID NO: 3309 - protein, 2024 aa, synthetic construct
MPAAKRVKLDGGDKKYSIGLDIGTNSVGWAVITDEYKVPSKKFKVLGNTDRHSIKKNLIGALLFDSGETAEATRLKRTARRRYTRRKNRICYLQEIFSNEMAKVDDSFFHRLEESFLVEEDKKHERHPIFGNIVDEVAYHEKYPTIYHLRKKLVDSTDKADLRLIYLALAHMIKFRGHFLIEGDLNPDNSDVDKLFIQLVQTYNQLFEENPINASGVDAKAILSARLSKSRRLENLIAQLPGEKKNGLFGNLIALSLGLTPNFKSNFDLAEDAKLQLSKDTYDDDLDNLLAQIGDQYADLFLAAKNLSDAILLSDILRVNTEITKAPLSASMIKRYDEHHQDLTLLKALVRQQLPEKYKEIFFDQSKNGYAGYIDGGASQEEFYKFIKPILEKMDGTEELLVKLNREDLLRKQRTFDNGSIPHQIHLGELHAILRRQEDFYPFLKDNREKIEKILTFRIPYYVGPLARGNSRFAWMTRKSEETITPWNFEEVVDKGASAQSFIERMTNFDKNLPNEKVLPKHSLLYEYFTVYNELTKVKYVTEGMRKPAFLSGEQKKAIVDLLFKTNRKVTVKQLKEDYFKKIECFDSVEISGVEDRFNASLGTYHDLLKIIKDKDFLDNEENEDILEDIVLTLTLFEDREMIEERLKTYAHLFDDKVMKQLKRRRYTGWGRLSRKLINGIRDKQSGKTILDFLKSDGFANRNFMQLIHDDSLTFKEDIQKAQVSGQGDSLHEHIANLAGSPAIKKGILQTVKVVDELVKVMGRHKPENIVIEMARENQTTQKGQKNSRERMKRIEEGIKELGSQILKEHPVENTQLQNEKLYLYYLQNGRDMYVDQELDINRLSDYDVDHIVPQSFLKDDSIDNKVLTRSDKARGKSDNVPSEEVVKKMKNYWRQLLNAKLITQRKFDNLTKAERGGLSELDKAGFIKRQLVETRQITKHVAQILDSRMNTKYDENDKLIREVKVITLKSKLVSDFRKDFQFYKVREINNYHHAHDAYLNAVVGTALIKKYPKLESEFVYGDYKVYDVRKMIAKSEQEIGKATAKYFFYSNIMNFFKTEITLANGEIRKRPLIETNGETGEIVWDKGRDFATVRKVLSMPQVNIVKKTEVQTGGFSKESILPKRNSDKLIARKKDWDPKKYGGFDSPTVAYSVLVVAKVEKGKSKKLKSVKELLGITIMERSSFEKNPIDFLEAKGYKEVKKDLIIKLPKYSLFELENGRKRMLASAGELQKGNELALPSKYVNFLYLASHYEKLKGSPEDNEQKQLFVEQHKHYLDEIIEQISEFSKRVILADANLDKVLSAYNKHRDKPIREQAENIIHLFTLTNLGAPAAFKYFDTTIDRKRYTSTKEVLDATLIHQSITGLYETRIDLSQLGGDGGPAPAPAPAPAPGGGRDIMKDIKVRLMTDSPDDSQDLMIGAIESNLFADQISWKSDQPVWLNQWPLKQEKLQALQQLVTEQLQLGHLEESNSPWNTPVFVIKKKSGKWRLLQDLRAVNATMHDMGALQPGLPSPVAVPKGWEIIIIDLQDCFFNIKLHPEDCKRFAFSVPSPNFKRPYQRFQWKVLPQGMKNSPTLCQKFVDKAILTVRDKYQDSYIVHYMDDILLAHPSRSIVDEILTSMIQALNKHGLVVSTEKIQKYDNLKYLGTHIQGDSVSYQKLQIRTDKLRTLNDFQKLLGNINWIRPFLKLTTGELKPLFEILNGDSNPISTRKLTPEACKALQLMNERLSTARVKRLDLSQPWSLCILKTEYTPTACLWQDGVVEWIHLPHISPKVITPYDIFCTQLIIKGRHRSKELFSKDPDYIVVPYTKVQFDLLLQEKEDWPISLLGFLGEVHFHLPKDPLLTFTLQTAIIFPHMTSTTPLEKGIVIFTDGSANGRSVTYIQGREPIIKENTQNTAQQAEIVAVITAFEEVSQPFNLYTDSKYVTGLFPEIETATLSPRTKIYTELKHLQRLIHKRQEKFYIGHIRGHTGLPGPLAQGNAYADSLTRILTAGKRTADGSEFEKRTADGSEFESPKKKAKVE

SEQ ID NO: 3310 - protein, 2024 aa, synthetic construct
MPAAKRVKLDGGDKKYSIGLDIGTNSVGWAVITDEYKVPSKKFKVLGNTDRHSIKKNLIGALLFDSGETAEATRLKRTARRRYTRRKNRICYLQEIFSNEMAKVDDSFFHRLEESFLVEEDKKHERHPIFGNIVDEVAYHEKYPTIYHLRKKLVDSTDKADLRLIYLALAHMIKFRGHFLIEGDLNPDNSDVDKLFIQLVQTYNQLFEENPINASGVDAKAILSARLSKSRRLENLIAQLPGEKKNGLFGNLIALSLGLTPNFKSNFDLAEDAKLQLSKDTYDDDLDNLLAQIGDQYADLFLAAKNLSDAILLSDILRVNTEITKAPLSASMIKRYDEHHQDLTLLKALVRQQLPEKYKEIFFDQSKNGYAGYIDGGASQEEFYKFIKPILEKMDGTEELLVKLNREDLLRKQRTFDNGSIPHQIHLGELHAILRRQEDFYPFLKDNREKIEKILTFRIPYYVGPLARGNSRFAWMTRKSEETITPWNFEEVVDKGASAQSFIERMTNFDKNLPNEKVLPKHSLLYEYFTVYNELTKVKYVTEGMRKPAFLSGEQKKAIVDLLFKTNRKVTVKQLKEDYFKKIECFDSVEISGVEDRFNASLGTYHDLLKIIKDKDFLDNEENEDILEDIVLTLTLFEDREMIEERLKTYAHLFDDKVMKQLKRRRYTGWGRLSRKLINGIRDKQSGKTILDFLKSDGFANRNFMQLIHDDSLTFKEDIQKAQVSGQGDSLHEHIANLAGSPAIKKGILQTVKVVDELVKVMGRHKPENIVIEMARENQTTQKGQKNSRERMKRIEEGIKELGSQILKEHPVENTQLQNEKLYLYYLQNGRDMYVDQELDINRLSDYDVDHIVPQSFLKDDSIDNKVLTRSDKARGKSDNVPSEEVVKKMKNYWRQLLNAKLITQRKFDNLTKAERGGLSELDKAGFIKRQLVETRQITKHVAQILDSRMNTKYDENDKLIREVKVITLKSKLVSDFRKDFQFYKVREINNYHHAHDAYLNAVVGTALIKKYPKLESEFVYGDYKVYDVRKMIAKSEQEIGKATAKYFFYSNIMNFFKTEITLANGEIRKRPLIETNGETGEIVWDKGRDFATVRKVLSMPQVNIVKKTEVQTGGFSKESILPKRNSDKLIARKKDWDPKKYGGFDSPTVAYSVLVVAKVEKGKSKKLKSVKELLGITIMERSSFEKNPIDFLEAKGYKEVKKDLIIKLPKYSLFELENGRKRMLASAGELQKGNELALPSKYVNFLYLASHYEKLKGSPEDNEQKQLFVEQHKHYLDEIIEQISEFSKRVILADANLDKVLSAYNKHRDKPIREQAENIIHLFTLTNLGAPAAFKYFDTTIDRKRYTSTKEVLDATLIHQSITGLYETRIDLSQLGGDGGGSSEAAAKGGSGGGRDIMKDIKVRLMTDSPDDSQDLMIGAIESNLFADQISWKSDQPVWLNQWPLKQEKLQALQQLVTEQLQLGHLEESNSPWNTPVFVIKKKSGKWRLLQDLRAVNATMHDMGALQPGLPSPVAVPKGWEIIIIDLQDCFFNIKLHPEDCKRFAFSVPSPNFKRPYQRFQWKVLPQGMKNSPTLCQKFVDKAILTVRDKYQDSYIVHYMDDILLAHPSRSIVDEILTSMIQALNKHGLVVSTEKIQKYDNLKYLGTHIQGDSVSYQKLQIRTDKLRTLNDFQKLLGNINWIRPFLKLTTGELKPLFEILNGDSNPISTRKLTPEACKALQLMNERLSTARVKRLDLSQPWSLCILKTEYTPTACLWQDGVVEWIHLPHISPKVITPYDIFCTQLIIKGRHRSKELFSKDPDYIVVPYTKVQFDLLLQEKEDWPISLLGFLGEVHFHLPKDPLLTFTLQTAIIFPHMTSTTPLEKGIVIFTDGSANGRSVTYIQGREPIIKENTQNTAQQAEIVAVITAFEEVSQPFNLYTDSKYVTGLFPEIETATLSPRTKIYTELKHLQRLIHKRQEKFYIGHIRGHTGLPGPLAQGNAYADSLTRILTAGKRTADGSEFEKRTADGSEFESPKKKAKVE

SEQ ID NO: 3311 - protein, 2024 aa, synthetic construct
MPAAKRVKLDGGDKKYSIGLDIGTNSVGWAVITDEYKVPSKKFKVLGNTDRHSIKKNLIGALLFDSGETAEATRLKRTARRRYTRRKNRICYLQEIFSNEMAKVDDSFFHRLEESFLVEEDKKHERHPIFGNIVDEVAYHEKYPTIYHLRKKLVDSTDKADLRLIYLALAHMIKFRGHFLIEGDLNPDNSDVDKLFIQLVQTYNQLFEENPINASGVDAKAILSARLSKSRRLENLIAQLPGEKKNGLFGNLIALSLGLTPNFKSNFDLAEDAKLQLSKDTYDDDLDNLLAQIGDQYADLFLAAKNLSDAILLSDILRVNTEITKAPLSASMIKRYDEHHQDLTLLKALVRQQLPEKYKEIFFDQSKNGYAGYIDGGASQEEFYKFIKPILEKMDGTEELLVKLNREDLLRKQRTFDNGSIPHQIHLGELHAILRRQEDFYPFLKDNREKIEKILTFRIPYYVGPLARGNSRFAWMTRKSEETITPWNFEEVVDKGASAQSFIERMTNFDKNLPNEKVLPKHSLLYEYFTVYNELTKVKYVTEGMRKPAFLSGEQKKAIVDLLFKTNRKVTVKQLKEDYFKKIECFDSVEISGVEDRFNASLGTYHDLLKIIKDKDFLDNEENEDILEDIVLTLTLFEDREMIEERLKTYAHLFDDKVMKQLKRRRYTGWGRLSRKLINGIRDKQSGKTILDFLKSDGFANRNFMQLIHDDSLTFKEDIQKAQVSGQGDSLHEHIANLAGSPAIKKGILQTVKVVDELVKVMGRHKPENIVIEMARENQTTQKGQKNSRERMKRIEEGIKELGSQILKEHPVENTQLQNEKLYLYYLQNGRDMYVDQELDINRLSDYDVDHIVPQSFLKDDSIDNKVLTRSDKARGKSDNVPSEEVVKKMKNYWRQLLNAKLITQRKFDNLTKAERGGLSELDKAGFIKRQLVETRQITKHVAQILDSRMNTKYDENDKLIREVKVITLKSKLVSDFRKDFQFYKVREINNYHHAHDAYLNAVVGTALIKKYPKLESEFVYGDYKVYDVRKMIAKSEQEIGKATAKYFFYSNIMNFFKTEITLANGEIRKRPLIETNGETGEIVWDKGRDFATVRKVLSMPQVNIVKKTEVQTGGFSKESILPKRNSDKLIARKKDWDPKKYGGFDSPTVAYSVLVVAKVEKGKSKKLKSVKELLGITIMERSSFEKNPIDFLEAKGYKEVKKDLIIKLPKYSLFELENGRKRMLASAGELQKGNELALPSKYVNFLYLASHYEKLKGSPEDNEQKQLFVEQHKHYLDEIIEQISEFSKRVILADANLDKVLSAYNKHRDKPIREQAENIIHLFTLTNLGAPAAFKYFDTTIDRKRYTSTKEVLDATLIHQSITGLYETRIDLSQLGGDGGGGGGSSEAAAKGGGRDIMKDIKVRLMTDSPDDSQDLMIGAIESNLFADQISWKSDQPVWLNQWPLKQEKLQALQQLVTEQLQLGHLEESNSPWNTPVFVIKKKSGKWRLLQDLRAVNATMHDMGALQPGLPSPVAVPKGWEIIIIDLQDCFFNIKLHPEDCKRFAFSVPSPNFKRPYQRFQWKVLPQGMKNSPTLCQKFVDKAILTVRDKYQDSYIVHYMDDILLAHPSRSIVDEILTSMIQALNKHGLVVSTEKIQKYDNLKYLGTHIQGDSVSYQKLQIRTDKLRTLNDFQKLLGNINWIRPFLKLTTGELKPLFEILNGDSNPISTRKLTPEACKALQLMNERLSTARVKRLDLSQPWSLCILKTEYTPTACLWQDGVVEWIHLPHISPKVITPYDIFCTQLIIKGRHRSKELFSKDPDYIVVPYTKVQFDLLLQEKEDWPISLLGFLGEVHFHLPKDPLLTFTLQTAIIFPHMTSTTPLEKGIVIFTDGSANGRSVTYIQGREPIIKENTQNTAQQAEIVAVITAFEEVSQPFNLYTDSKYVTGLFPEIETATLSPRTKIYTELKHLQRLIHKRQEKFYIGHIRGHTGLPGPLAQGNAYADSLTRILTAGKRTADGSEFEKRTADGSEFESPKKKAKVE

SEQ ID NO: 3312 - protein, 2022 aa, synthetic construct; identical to SEQ ID NO: 3229

SEQ ID NO: 3313 - protein, 2021 aa, synthetic construct; identical to SEQ ID NO: 3208

SEQ ID NO: 3314 - protein, 2024 aa, synthetic construct
MPAAKRVKLDGGDKKYSIGLDIGTNSVGWAVITDEYKVPSKKFKVLGNTDRHSIKKNLIGALLFDSGETAEATRLKRTARRRYTRRKNRICYLQEIFSNEMAKVDDSFFHRLEESFLVEEDKKHERHPIFGNIVDEVAYHEKYPTIYHLRKKLVDSTDKADLRLIYLALAHMIKFRGHFLIEGDLNPDNSDVDKLFIQLVQTYNQLFEENPINASGVDAKAILSARLSKSRRLENLIAQLPGEKKNGLFGNLIALSLGLTPNFKSNFDLAEDAKLQLSKDTYDDDLDNLLAQIGDQYADLFLAAKNLSDAILLSDILRVNTEITKAPLSASMIKRYDEHHQDLTLLKALVRQQLPEKYKEIFFDQSKNGYAGYIDGGASQEEFYKFIKPILEKMDGTEELLVKLNREDLLRKQRTFDNGSIPHQIHLGELHAILRRQEDFYPFLKDNREKIEKILTFRIPYYVGPLARGNSRFAWMTRKSEETITPWNFEEVVDKGASAQSFIERMTNFDKNLPNEKVLPKHSLLYEYFTVYNELTKVKYVTEGMRKPAFLSGEQKKAIVDLLFKTNRKVTVKQLKEDYFKKIECFDSVEISGVEDRFNASLGTYHDLLKIIKDKDFLDNEENEDILEDIVLTLTLFEDREMIEERLKTYAHLFDDKVMKQLKRRRYTGWGRLSRKLINGIRDKQSGKTILDFLKSDGFANRNFMQLIHDDSLTFKEDIQKAQVSGQGDSLHEHIANLAGSPAIKKGILQTVKVVDELVKVMGRHKPENIVIEMARENQTTQKGQKNSRERMKRIEEGIKELGSQILKEHPVENTQLQNEKLYLYYLQNGRDMYVDQELDINRLSDYDVDHIVPQSFLKDDSIDNKVLTRSDKARGKSDNVPSEEVVKKMKNYWRQLLNAKLITQRKFDNLTKAERGGLSELDKAGFIKRQLVETRQITKHVAQILDSRMNTKYDENDKLIREVKVITLKSKLVSDFRKDFQFYKVREINNYHHAHDAYLNAVVGTALIKKYPKLESEFVYGDYKVYDVRKMIAKSEQEIGKATAKYFFYSNIMNFFKTEITLANGEIRKRPLIETNGETGEIVWDKGRDFATVRKVLSMPQVNIVKKTEVQTGGFSKESILPKRNSDKLIARKKDWDPKKYGGFDSPTVAYSVLVVAKVEKGKSKKLKSVKELLGITIMERSSFEKNPIDFLEAKGYKEVKKDLIIKLPKYSLFELENGRKRMLASAGELQKGNELALPSKYVNFLYLASHYEKLKGSPEDNEQKQLFVEQHKHYLDEIIEQISEFSKRVILADANLDKVLSAYNKHRDKPIREQAENIIHLFTLTNLGAPAAFKYFDTTIDRKRYTSTKEVLDATLIHQSITGLYETRIDLSQLGGDGGGSSGGSEAAAKGGGRDIMKDIKVRLMTDSPDDSQDLMIGAIESNLFADQISWKSDQPVWLNQWPLKQEKLQALQQLVTEQLQLGHLEESNSPWNTPVFVIKKKSGKWRLLQDLRAVNATMHDMGALQPGLPSPVAVPKGWEIIIIDLQDCFFNIKLHPEDCKRFAFSVPSPNFKRPYQRFQWKVLPQGMKNSPTLCQKFVDKAILTVRDKYQDSYIVHYMDDILLAHPSRSIVDEILTSMIQALNKHGLVVSTEKIQKYDNLKYLGTHIQGDSVSYQKLQIRTDKLRTLNDFQKLLGNINWIRPFLKLTTGELKPLFEILNGDSNPISTRKLTPEACKALQLMNERLSTARVKRLDLSQPWSLCILKTEYTPTACLWQDGVVEWIHLPHISPKVITPYDIFCTQLIIKGRHRSKELFSKDPDYIVVPYTKVQFDLLLQEKEDWPISLLGFLGEVHFHLPKDPLLTFTLQTAIIFPHMTSTTPLEKGIVIFTDGSANGRSVTYIQGREPIIKENTQNTAQQAEIVAVITAFEEVSQPFNLYTDSKYVTGLFPEIETATLSPRTKIYTELKHLQRLIHKRQEKFYIGHIRGHTGLPGPLAQGNAYADSLTRILTAGKRTADGSEFEKRTADGSEFESPKKKAKVE

SEQ ID NO: 3315 - protein, 2022 aa, synthetic construct; identical to SEQ ID NO: 3199

SEQ ID NO: 3316 - protein, 2022 aa, synthetic construct
MPAAKRVKLDGGDKKYSIGLDIGTNSVGWAVITDEYKVPSKKFKVLGNTDRHSIKKNLIGALLFDSGETAEATRLKRTARRRYTRRKNRICYLQEIFSNEMAKVDDSFFHRLEESFLVEEDKKHERHPIFGNIVDEVAYHEKYPTIYHLRKKLVDSTDKADLRLIYLALAHMIKFRGHFLIEGDLNPDNSDVDKLFIQLVQTYNQLFEENPINASGVDAKAILSARLSKSRRLENLIAQLPGEKKNGLFGNLIALSLGLTPNFKSNFDLAEDAKLQLSKDTYDDDLDNLLAQIGDQYADLFLAAKNLSDAILLSDILRVNTEITKAPLSASMIKRYDEHHQDLTLLKALVRQQLPEKYKEIFFDQSKNGYAGYIDGGASQEEFYKFIKPILEKMDGTEELLVKLNREDLLRKQRTFDNGSIPHQIHLGELHAILRRQEDFYPFLKDNREKIEKILTFRIPYYVGPLARGNSRFAWMTRKSEETITPWNFEEVVDKGASAQSFIERMTNFDKNLPNEKVLPKHSLLYEYFTVYNELTKVKYVTEGMRKPAFLSGEQKKAIVDLLFKTNRKVTVKQLKEDYFKKIECFDSVEISGVEDRFNASLGTYHDLLKIIKDKDFLDNEENEDILEDIVLTLTLFEDREMIEERLKTYAHLFDDKVMKQLKRRRYTGWGRLSRKLINGIRDKQSGKTILDFLKSDGFANRNFMQLIHDDSLTFKEDIQKAQVSGQGDSLHEHIANLAGSPAIKKGILQTVKVVDELVKVMGRHKPENIVIEMARENQTTQKGQKNSRERMKRIEEGIKELGSQILKEHPVENTQLQNEKLYLYYLQNGRDMYVDQELDINRLSDYDVDHIVPQSFLKDDSIDNKVLTRSDKARGKSDNVPSEEVVKKMKNYWRQLLNAKLITQRKFDNLTKAERGGLSELDKAGFIKRQLVETRQITKHVAQILDSRMNTKYDENDKLIREVKVITLKSKLVSDFRKDFQFYKVREINNYHHAHDAYLNAVVGTALIKKYPKLESEFVYGDYKVYDVRKMIAKSEQEIGKATAKYFFYSNIMNFFKTEITLANGEIRKRPLIETNGETGEIVWDKGRDFATVRKVLSMPQVNIVKKTEVQTGGFSKESILPKRNSDKLIARKKDWDPKKYGGFDSPTVAYSVLVVAKVEKGKSKKLKSVKELLGITIMERSSFEKNPIDFLEAKGYKEVKKDLIIKLPKYSLFELENGRKRMLASAGELQKGNELALPSKYVNFLYLASHYEKLKGSPEDNEQKQLFVEQHKHYLDEIIEQISEFSKRVILADANLDKVLSAYNKHRDKPIREQAENIIHLFTLTNLGAPAAFKYFDTTIDRKRYTSTKEVLDATLIHQSITGLYETRIDLSQLGGDGGGGSGGSGGSGGGRDIMKDIKVRLMTDSPDDSQDLMIGAIESNLFADQISWKSDQPVWLNQWPLKQEKLQALQQLVTEQLQLGHLEESNSPWNTPVFVIKKKSGKWRLLQDLRAVNATMHDMGALQPGLPSPVAVPKGWEIIIIDLQDCFFNIKLHPEDCKRFAFSVPSPNFKRPYQRFQWKVLPQGMKNSPTLCQKFVDKAILTVRDKYQDSYIVHYMDDILLAHPSRSIVDEILTSMIQALNKHGLVVSTEKIQKYDNLKYLGTHIQGDSVSYQKLQIRTDKLRTLNDFQKLLGNINWIRPFLKLTTGELKPLFEILNGDSNPISTRKLTPEACKALQLMNERLSTARVKRLDLSQPWSLCILKTEYTPTACLWQDGVVEWIHLPHISPKVITPYDIFCTQLIIKGRHRSKELFSKDPDYIVVPYTKVQFDLLLQEKEDWPISLLGFLGEVHFHLPKDPLLTFTLQTAIIFPHMTSTTPLEKGIVIFTDGSANGRSVTYIQGREPIIKENTQNTAQQAEIVAVITAFEEVSQPFNLYTDSKYVTGLFPEIETATLSPRTKIYTELKHLQRLIHKRQEKFYIGHIRGHTGLPGPLAQGNAYADSLTRILTAGKRTADGSEFEKRTADGSEFESPKKKAKVE

SEQ ID NO: 3317 - protein, 2025 aa, synthetic construct
MPAAKRVKLDGGDKKYSIGLDIGTNSVGWAVITDEYKVPSKKFKVLGNTDRHSIKKNLIGALLFDSGETAEATRLKRTARRRYTRRKNRICYLQEIFSNEMAKVDDSFFHRLEESFLVEEDKKHERHPIFGNIVDEVAYHEKYPTIYHLRKKLVDSTDKADLRLIYLALAHMIKFRGHFLIEGDLNPDNSDVDKLFIQLVQTYNQLFEENPINASGVDAKAILSARLSKSRRLENLIAQLPGEKKNGLFGNLIALSLGLTPNFKSNFDLAEDAKLQLSKDTYDDDLDNLLAQIGDQYADLFLAAKNLSDAILLSDILRVNTEITKAPLSASMIKRYDEHHQDLTLLKALVRQQLPEKYKEIFFDQSKNGYAGYIDGGASQEEFYKFIKPILEKMDGTEELLVKLNREDLLRKQRTFDNGSIPHQIHLGELHAILRRQEDFYPFLKDNREKIEKILTFRIPYYVGPLARGNSRFAWMTRKSEETITPWNFEEVVDKGASAQSFIERMTNFDKNLPNEKVLPKHSLLYEYFTVYNELTKVKYVTEGMRKPAFLSGEQKKAIVDLLFKTNRKVTVKQLKEDYFKKIECFDSVEISGVEDRFNASLGTYHDLLKIIKDKDFLDNEENEDILEDIVLTLTLFEDREMIEERLKTYAHLFDDKVMKQLKRRRYTGWGRLSRKLINGIRDKQSGKTILDFLKSDGFANRNFMQLIHDDSLTFKEDIQKAQVSGQGDSLHEHIANLAGSPAIKKGILQTVKVVDELVKVMGRHKPENIVIEMARENQTTQKGQKNSRERMKRIEEGIKELGSQILKEHPVENTQLQNEKLYLYYLQNGRDMYVDQELDINRLSDYDVDHIVPQSFLKDDSIDNKVLTRSDKARGKSDNVPSEEVVKKMKNYWRQLLNAKLITQRKFDNLTKAERGGLSELDKAGFIKRQLVETRQITKHVAQILDSRMNTKYDENDKLIREVKVITLKSKLVSDFRKDFQFYKVREINNYHHAHDAYLNAVVGTALIKKYPKLESEFVYGDYKVYDVRKMIAKSEQEIGKATAKYFFYSNIMNFFKTEITLANGEIRKRPLIETNGETGEIVWDKGRDFATVRKVLSMPQVNIVKKTEVQTGGFSKESILPKRNSDKLIARKKDWDPKKYGGFDSPTVAYSVLVVAKVEKGKSKKLKSVKELLGITIMERSSFEKNPIDFLEAKGYKEVKKDLIIKLPKYSLFELENGRKRMLASAGELQKGNELALPSKYVNFLYLASHYEKLKGSPEDNEQKQLFVEQHKHYLDEIIEQISEFSKRVILADANLDKVLSAYNKHRDKPIREQAENIIHLFTLTNLGAPAAFKYFDTTIDRKRYTSTKEVLDATLIHQSITGLYETRIDLSQLGGDGGGGSGGSGGSGGSGGGRDIMKDIKVRLMTDSPDDSQDLMIGAIESNLFADQISWKSDQPVWLNQWPLKQEKLQALQQLVTEQLQLGHLEESNSPWNTPVFVIKKKSGKWRLLQDLRAVNATMHDMGALQPGLPSPVAVPKGWEIIIIDLQDCFFNIKLHPEDCKRFAFSVPSPNFKRPYQRFQWKVLPQGMKNSPTLCQKFVDKAILTVRDKYQDSYIVHYMDDILLAHPSRSIVDEILTSMIQALNKHGLVVSTEKIQKYDNLKYLGTHIQGDSVSYQKLQIRTDKLRTLNDFQKLLGNINWIRPFLKLTTGELKPLFEILNGDSNPISTRKLTPEACKALQLMNERLSTARVKRLDLSQPWSLCILKTEYTPTACLWQDGVVEWIHLPHISPKVITPYDIFCTQLIIKGRHRSKELFSKDPDYIVVPYTKVQFDLLLQEKEDWPISLLGFLGEVHFHLPKDPLLTFTLQTAIIFPHMTSTTPLEKGIVIFTDGSANGRSVTYIQGREPIIKENTQNTAQQAEIVAVITAFEEVSQPFNLYTDSKYVTGLFPEIETATLSPRTKIYTELKHLQRLIHKRQEKFYIGHIRGHTGLPGPLAQGNAYADSLTRILTAGKRTADGSEFEKRTADGSEFESPKKKAKVE

SEQ ID NO: 3318 - protein, 2024 aa, synthetic construct; identical to SEQ ID NO: 3207

SEQ ID NO: 3319 - protein, 2016 aa, synthetic construct; identical to SEQ ID NO: 3210

SEQ ID NO: 3320 - protein, 2024 aa, synthetic construct
MPAAKRVKLDGGDKKYSIGLDIGTNSVGWAVITDEYKVPSKKFKVLGNTDRHSIKKNLIGALLFDSGETAEATRLKRTARRRYTRRKNRICYLQEIFSNEMAKVDDSFFHRLEESFLVEEDKKHERHPIFGNIVDEVAYHEKYPTIYHLRKKLVDSTDKADLRLIYLALAHMIKFRGHFLIEGDLNPDNSDVDKLFIQLVQTYNQLFEENPINASGVDAKAILSARLSKSRRLENLIAQLPGEKKNGLFGNLIALSLGLTPNFKSNFDLAEDAKLQLSKDTYDDDLDNLLAQIGDQYADLFLAAKNLSDAILLSDILRVNTEITKAPLSASMIKRYDEHHQDLTLLKALVRQQLPEKYKEIFFDQSKNGYAGYIDGGASQEEFYKFIKPILEKMDGTEELLVKLNREDLLRKQRTFDNGSIPHQIHLGELHAILRRQEDFYPFLKDNREKIEKILTFRIPYYVGPLARGNSRFAWMTRKSEETITPWNFEEVVDKGASAQSFIERMTNFDKNLPNEKVLPKHSLLYEYFTVYNELTKVKYVTEGMRKPAFLSGEQKKAIVDLLFKTNRKVTVKQLKEDYFKKIECFDSVEISGVEDRFNASLGTYHDLLKIIKDKDFLDNEENEDILEDIVLTLTLFEDREMIEERLKTYAHLFDDKVMKQLKRRRYTGWGRLSRKLINGIRDKQSGKTILDFLKSDGFANRNFMQLIHDDSLTFKEDIQKAQVSGQGDSLHEHIANLAGSPAIKKGILQTVKVVDELVKVMGRHKPENIVIEMARENQTTQKGQKNSRERMKRIEEGIKELGSQILKEHPVENTQLQNEKLYLYYLQNGRDMYVDQELDINRLSDYDVDHIVPQSFLKDDSIDNKVLTRSDKARGKSDNVPSEEVVKKMKNYWRQLLNAKLITQRKFDNLTKAERGGLSELDKAGFIKRQLVETRQITKHVAQILDSRMNTKYDENDKLIREVKVITLKSKLVSDFRKDFQFYKVREINNYHHAHDAYLNAVVGTALIKKYPKLESEFVYGDYKVYDVRKMIAKSEQEIGKATAKYFFYSNIMNFFKTEITLANGEIRKRPLIETNGETGEIVWDKGRDFATVRKVLSMPQVNIVKKTEVQTGGFSKESILPKRNSDKLIARKKDWDPKKYGGFDSPTVAYSVLVVAKVEKGKSKKLKSVKELLGITIMERSSFEKNPIDFLEAKGYKEVKKDLIIKLPKYSLFELENGRKRMLASAGELQKGNELALPSKYVNFLYLASHYEKLKGSPEDNEQKQLFVEQHKHYLDEIIEQISEFSKRVILADANLDKVLSAYNKHRDKPIREQAENIIHLFTLTNLGAPAAFKYFDTTIDRKRYTSTKEVLDATLIHQSITGLYETRIDLSQLGGDGGGGSPAPEAAAKGGGRDIMKDIKVRLMTDSPDDSQDLMIGAIESNLFADQISWKSDQPVWLNQWPLKQEKLQALQQLVTEQLQLGHLEESNSPWNTPVFVIKKKSGKWRLLQDLRAVNATMHDMGALQPGLPSPVAVPKGWEIIIIDLQDCFFNIKLHPEDCKRFAFSVPSPNFKRPYQRFQWKVLPQGMKNSPTLCQKFVDKAILTVRDKYQDSYIVHYMDDILLAHPSRSIVDEILTSMIQALNKHGLVVSTEKIQKYDNLKYLGTHIQGDSVSYQKLQIRTDKLRTLNDFQKLLGNINWIRPFLKLTTGELKPLFEILNGDSNPISTRKLTPEACKALQLMNERLSTARVKRLDLSQPWSLCILKTEYTPTACLWQDGVVEWIHLPHISPKVITPYDIFCTQLIIKGRHRSKELFSKDPDYIVVPYTKVQFDLLLQEKEDWPISLLGFLGEVHFHLPKDPLLTFTLQTAIIFPHMTSTTPLEKGIVIFTDGSANGRSVTYIQGREPIIKENTQNTAQQAEIVAVITAFEEVSQPFNLYTDSKYVTGLFPEIETATLSPRTKIYTELKHLQRLIHKRQEKFYIGHIRGHTGLPGPLAQGNAYADSLTRILTAGKRTADGSEFEKRTADGSEFESPKKKAKVE

SEQ ID NO: 3321 - protein, 2022 aa, synthetic construct; identical to SEQ ID NO: 3215

SEQ ID NO: 3322 - protein, 2024 aa, synthetic construct; identical to SEQ ID NO: 3232

SEQ ID NO: 3323 - protein, 2024 aa, synthetic construct; identical to SEQ ID NO: 3235

SEQ ID NO: 3324 - protein, 2024 aa, synthetic construct; identical to SEQ ID NO: 3236

SEQ ID NO: 3325 - protein, 2024 aa, synthetic construct
MPAAKRVKLDGGDKKYSIGLDIGTNSVGWAVITDEYKVPSKKFKVLGNTDRHSIKKNLIGALLFDSGETAEATRLKRTARRRYTRRKNRICYLQEIFSNEMAKVDDSFFHRLEESFLVEEDKKHERHPIFGNIVDEVAYHEKYPTIYHLRKKLVDSTDKADLRLIYLALAHMIKFRGHFLIEGDLNPDNSDVDKLFIQLVQTYNQLFEENPINASGVDAKAILSARLSKSRRLENLIAQLPGEKKNGLFGNLIALSLGLTPNFKSNFDLAEDAKLQLSKDTYDDDLDNLLAQIGDQYADLFLAAKNLSDAILLSDILRVNTEITKAPLSASMIKRYDEHHQDLTLLKALVRQQLPEKYKEIFFDQSKNGYAGYIDGGASQEEFYKFIKPILEKMDGTEELLVKLNREDLLRKQRTFDNGSIPHQIHLGELHAILRRQEDFYPFLKDNREKIEKILTFRIPYYVGPLARGNSRFAWMTRKSEETITPWNFEEVVDKGASAQSFIERMTNFDKNLPNEKVLPKHSLLYEYFTVYNELTKVKYVTEGMRKPAFLSGEQKKAIVDLLFKTNRKVTVKQLKEDYFKKIECFDSVEISGVEDRFNASLGTYHDLLKIIKDKDFLDNEENEDILEDIVLTLTLFEDREMIEERLKTYAHLFDDKVMKQLKRRRYTGWGRLSRKLINGIRDKQSGKTILDFLKSDGFANRNFMQLIHDDSLTFKEDIQKAQVSGQGDSLHEHIANLAGSPAIKKGILQTVKVVDELVKVMGRHKPENIVIEMARENQTTQKGQKNSRERMKRIEEGIKELGSQILKEHPVENTQLQNEKLYLYYLQNGRDMYVDQELDINRLSDYDVDHIVPQSFLKDDSIDNKVLTRSDKARGKSDNVPSEEVVKKMKNYWRQLLNAKLITQRKFDNLTKAERGGLSELDKAGFIKRQLVETRQITKHVAQILDSRMNTKYDENDKLIREVKVITLKSKLVSDFRKDFQFYKVREINNYHHAHDAYLNAVVGTALIKKYPKLESEFVYGDYKVYDVRKMIAKSEQEIGKATAKYFFYSNIMNFFKTEITLANGEIRKRPLIETNGETGEIVWDKGRDFATVRKVLSMPQVNIVKKTEVQTGGFSKESILPKRNSDKLIARKKDWDPKKYGGFDSPTVAYSVLVVAKVEKGKSKKLKSVKELLGITIMERSSFEKNPIDFLEAKGYKEVKKDLIIKLPKYSLFELENGRKRMLASAGELQKGNELALPSKYVNFLYLASHYEKLKGSPEDNEQKQLFVEQHKHYLDEIIEQISEFSKRVILADANLDKVLSAYNKHRDKPIREQAENIIHLFTLTNLGAPAAFKYFDTTIDRKRYTSTKEVLDATLIHQSITGLYETRIDLSQLGGDGGGGGGGSEAAAKGGGRDIMKDIKVRLMTDSPDDSQDLMIGAIESNLFADQISWKSDQPVWLNQWPLKQEKLQALQQLVTEQLQLGHLEESNSPWNTPVFVIKKKSGKWRLLQDLRAVNATMHDMGALQPGLPSPVAVPKGWEIIIIDLQDCFFNIKLHPEDCKRFAFSVPSPNFKRPYQRFQWKVLPQGMKNSPTLCQKFVDKAILTVRDKYQDSYIVHYMDDILLAHPSRSIVDEILTSMIQALNKHGLVVSTEKIQKYDNLKYLGTHIQGDSVSYQKLQIRTDKLRTLNDFQKLLGNINWIRPFLKLTTGELKPLFEILNGDSNPISTRKLTPEACKALQLMNERLSTARVKRLDLSQPWSLCILKTEYTPTACLWQDGVVEWIHLPHISPKVITPYDIFCTQLIIKGRHRSKELFSKDPDYIVVPYTKVQFDLLLQEKEDWPISLLGFLGEVHFHLPKDPLLTFTLQTAIIFPHMTSTTPLEKGIVIFTDGSANGRSVTYIQGREPIIKENTQNTAQQAEIVAVITAFEEVSQPFNLYTDSKYVTGLFPEIETATLSPRTKIYTELKHLQRLIHKRQEKFYIGHIRGHTGLPGPLAQGNAYADSLTRILTAGKRTADGSEFEKRTADGSEFESPKKKAKVE

SEQ ID NO: 3326 - protein, 2024 aa, synthetic construct
MPAAKRVKLDGGDKKYSIGLDIGTNSVGWAVITDEYKVPSKKFKVLGNTDRHSIKKNLIGALLFDSGETAEATRLKRTARRRYTRRKNRICYLQEIFSNEMAKVDDSFFHRLEESFLVEEDKKHERHPIFGNIVDEVAYHEKYPTIYHLRKKLVDSTDKADLRLIYLALAHMIKFRGHFLIEGDLNPDNSDVDKLFIQLVQTYNQLFEENPINASGVDAKAILSARLSKSRRLENLIAQLPGEKKNGLFGNLIALSLGLTPNFKSNFDLAEDAKLQLSKDTYDDDLDNLLAQIGDQYADLFLAAKNLSDAILLSDILRVNTEITKAPLSASMIKRYDEHHQDLTLLKALVRQQLPEKYKEIFFDQSKNGYAGYIDGGASQEEFYKFIKPILEKMDGTEELLVKLNREDLLRKQRTFDNGSIPHQIHLGELHAILRRQEDFYPFLKDNREKIEKILTFRIPYYVGPLARGNSRFAWMTRKSEETITPWNFEEVVDKGASAQSFIERMTNFDKNLPNEKVLPKHSLLYEYFTVYNELTKVKYVTEGMRKPAFLSGEQKKAIVDLLFKTNRKVTVKQLKEDYFKKIECFDSVEISGVEDRFNASLGTYHDLLKIIKDKDFLDNEENEDILEDIVLTLTLFEDREMIEERLKTYAHLFDDKVMKQLKRRRYTGWGRLSRKLINGIRDKQSGKTILDFLKSDGFANRNFMQLIHDDSLTFKEDIQKAQVSGQGDSLHEHIANLAGSPAIKKGILQTVKVVDELVKVMGRHKPENIVIEMARENQTTQKGQKNSRERMKRIEEGIKELGSQILKEHPVENTQLQNEKLYLYYLQNGRDMYVDQELDINRLSDYDVDHIVPQSFLKDDSIDNKVLTRSDKARGKSDNVPSEEVVKKMKNYWRQLLNAKLITQRKFDNLTKAERGGLSELDKAGFIKRQLVETRQITKHVAQILDSRMNTKYDENDKLIREVKVITLKSKLVSDFRKDFQFYKVREINNYHHAHDAYLNAVVGTALIKKYPKLESEFVYGDYKVYDVRKMIAKSEQEIGKATAKYFFYSNIMNFFKTEITLANGEIRKRPLIETNGETGEIVWDKGRDFATVRKVLSMPQVNIVKKTEVQTGGFSKESILPKRNSDKLIARKKDWDPKKYGGFDSPTVAYSVLVVAKVEKGKSKKLKSVKELLGITIMERSSFEKNPIDFLEAKGYKEVKKDLIIKLPKYSLFELENGRKRMLASAGELQKGNELALPSKYVNFLYLASHYEKLKGSPEDNEQKQLFVEQHKHYLDEIIEQISEFSKRVILADANLDKVLSAYNKHRDKPIREQAENIIHLFTLTNLGAPAAFKYFDTTIDRKRYTSTKEVLDATLIHQSITGLYETRIDLSQLGGDGGGGSEAAAKGSSGGGRDIMKDIKVRLMTDSPDDSQDLMIGAIESNLFADQISWKSDQPVWLNQWPLKQEKLQALQQLVTEQLQLGHLEESNSPWNTPVFVIKKKSGKWRLLQDLRAVNATMHDMGALQPGLPSPVAVPKGWEIIIIDLQDCFFNIKLHPEDCKRFAFSVPSPNFKRPYQRFQWKVLPQGMKNSPTLCQKFVDKAILTVRDKYQDSYIVHYMDDILLAHPSRSIVDEILTSMIQALNKHGLVVSTEKIQKYDNLKYLGTHIQGDSVSYQKLQIRTDKLRTLNDFQKLLGNINWIRPFLKLTTGELKPLFEILNGDSNPISTRKLTPEACKALQLMNERLSTARVKRLDLSQPWSLCILKTEYTPTACLWQDGVVEWIHLPHISPKVITPYDIFCTQLIIKGRHRSKELFSKDPDYIVVPYTKVQFDLLLQEKEDWPISLLGFLGEVHFHLPKDPLLTFTLQTAIIFPHMTSTTPLEKGIVIFTDGSANGRSVTYIQGREPIIKENTQNTAQQAEIVAVITAFEEVSQPFNLYTDSKYVTGLFPEIETATLSPRTKIYTELKHLQRLIHKRQEKFYIGHIRGHTGLPGPLAQGNAYADSLTRILTAGKRTADGSEFEKRTADGSEFESPKKKAKVE

SEQ ID NO: 3327 - protein, 2018 aa, synthetic construct
MPAAKRVKLDGGDKKYSIGLDIGTNSVGWAVITDEYKVPSKKFKVLGNTDRHSIKKNLIGALLFDSGETAEATRLKRTARRRYTRRKNRICYLQEIFSNEMAKVDDSFFHRLEESFLVEEDKKHERHPIFGNIVDEVAYHEKYPTIYHLRKKLVDSTDKADLRLIYLALAHMIKFRGHFLIEGDLNPDNSDVDKLFIQLVQTYNQLFEENPINASGVDAKAILSARLSKSRRLENLIAQLPGEKKNGLFGNLIALSLGLTPNFKSNFDLAEDAKLQLSKDTYDDDLDNLLAQIGDQYADLFLAAKNLSDAILLSDILRVNTEITKAPLSASMIKRYDEHHQDLTLLKALVRQQLPEKYKEIFFDQSKNGYAGYIDGGASQEEFYKFIKPILEKMDGTEELLVKLNREDLLRKQRTFDNGSIPHQIHLGELHAILRRQEDFYPFLKDNREKIEKILTFRIPYYVGPLARGNSRFAWMTRKSEETITPWNFEEVVDKGASAQSFIERMTNFDKNLPNEKVLPKHSLLYEYFTVYNELTKVKYVTEGMRKPAFLSGEQKKAIVDLLFKTNRKVTVKQLKEDYFKKIECFDSVEISGVEDRFNASLGTYHDLLKIIKDKDFLDNEENEDILEDIVLTLTLFEDREMIEERLKTYAHLFDDKVMKQLKRRRYTGWGRLSRKLINGIRDKQSGKTILDFLKSDGFANRNFMQLIHDDSLTFKEDIQKAQVSGQGDSLHEHIANLAGSPAIKKGILQTVKVVDELVKVMGRHKPENIVIEMARENQTTQKGQKNSRERMKRIEEGIKELGSQILKEHPVENTQLQNEKLYLYYLQNGRDMYVDQELDINRLSDYDVDHIVPQSFLKDDSIDNKVLTRSDKARGKSDNVPSEEVVKKMKNYWRQLLNAKLITQRKFDNLTKAERGGLSELDKAGFIKRQLVETRQITKHVAQILDSRMNTKYDENDKLIREVKVITLKSKLVSDFRKDFQFYKVREINNYHHAHDAYLNAVVGTALIKKYPKLESEFVYGDYKVYDVRKMIAKSEQEIGKATAKYFFYSNIMNFFKTEITLANGEIRKRPLIETNGETGEIVWDKGRDFATVRKVLSMPQVNIVKKTEVQTGGFSKESILPKRNSDKLIARKKDWDPKKYGGFDSPTVAYSVLVVAKVEKGKSKKLKSVKELLGITIMERSSFEKNPIDFLEAKGYKEVKKDLIIKLPKYSLFELENGRKRMLASAGELQKGNELALPSKYVNFLYLASHYEKLKGSPEDNEQKQLFVEQHKHYLDEIIEQISEFSKRVILADANLDKVLSAYNKHRDKPIREQAENIIHLFTLTNLGAPAAFKYFDTTIDRKRYTSTKEVLDATLIHQSITGLYETRIDLSQLGGDGGPAPAPGGGRDIMKDIKVRLMTDSPDDSQDLMIGAIESNLFADQISWKSDQPVWLNQWPLKQEKLQALQQLVTEQLQLGHLEESNSPWNTPVFVIKKKSGKWRLLQDLRAVNATMHDMGALQPGLPSPVAVPKGWEIIIIDLQDCFFNIKLHPEDCKRFAFSVPSPNFKRPYQRFQWKVLPQGMKNSPTLCQKFVDKAILTVRDKYQDSYIVHYMDDILLAHPSRSIVDEILTSMIQALNKHGLVVSTEKIQKYDNLKYLGTHIQGDSVSYQKLQIRTDKLRTLNDFQKLLGNINWIRPFLKLTTGELKPLFEILNPDSNPISTRKLTPEACKALQLMNERLSTARVKRLDLSQPWSLCILKTEYTPTACLWQDGVVEWIHLPHISPKVITPYDIFCTQLIIKGRHRSKELFSKDPDYIVVPYTKVQFDLLLQEKEDWPISLLGFLGEVHFHLPKDPLLTFTLQTAIIFPHMTSTTPLEKGIVIFTDGSANGRSVTYIQGREPIIKENTQNTAQQAEIVAVITAFEEVSQPFNLYTDSKYVTGLFPEIETATLSPRTKIYTELKHLQRLIHKRQEKFYIGHIRGHTGLPGPLAQGNAYADSLTRILTAGKRTADGSEFEKRTADGSEFESPKKKAKVE

SEQ ID NO: 3328 - protein, 2028 aa, synthetic construct
MPAAKRVKLDGGDKKYSIGLDIGTNSVGWAVITDEYKVPSKKFKVLGNTDRHSIKKNLIGALLFDSGETAEATRLKRTARRRYTRRKNRICYLQEIFSNEMAKVDDSFFHRLEESFLVEEDKKHERHPIFGNIVDEVAYHEKYPTIYHLRKKLVDSTDKADLRLIYLALAHMIKFRGHFLIEGDLNPDNSDVDKLFIQLVQTYNQLFEENPINASGVDAKAILSARLSKSRRLENLIAQLPGEKKNGLFGNLIALSLGLTPNFKSNFDLAEDAKLQLSKDTYDDDLDNLLAQIGDQYADLFLAAKNLSDAILLSDILRVNTEITKAPLSASMIKRYDEHHQDLTLLKALVRQQLPEKYKEIFFDQSKNGYAGYIDGGASQEEFYKFIKPILEKMDGTEELLVKLNREDLLRKQRTFDNGSIPHQIHLGELHAILRRQEDFYPFLKDNREKIEKILTFRIPYYVGPLARGNSRFAWMTRKSEETITPWNFEEVVDKGASAQSFIERMTNFDKNLPNEKVLPKHSLLYEYFTVYNELTKVKYVTEGMRKPAFLSGEQKKAIVDLLFKTNRKVTVKQLKEDYFKKIECFDSVEISGVEDRFNASLGTYHDLLKIIKDKDFLDNEENEDILEDIVLTLTLFEDREMIEERLKTYAHLFDDKVMKQLKRRRYTGWGRLSRKLINGIRDKQSGKTILDFLKSDGFANRNFMQLIHDDSLTFKEDIQKAQVSGQGDSLHEHIANLAGSPAIKKGILQTVKVVDELVKVMGRHKPENIVIEMARENQTTQKGQKNSRERMKRIEEGIKELGSQILKEHPVENTQLQNEKLYLYYLQNGRDMYVDQELDINRLSDYDVDHIVPQSFLKDDSIDNKVLTRSDKARGKSDNVPSEEVVKKMKNYWRQLLNAKLITQRKFDNLTKAERGGLSELDKAGFIKRQLVETRQITKHVAQILDSRMNTKYDENDKLIREVKVITLKSKLVSDFRKDFQFYKVREINNYHHAHDAYLNAVVGTALIKKYPKLESEFVYGDYKVYDVRKMIAKSEQEIGKATAKYFFYSNIMNFFKTEITLANGEIRKRPLIETNGETGEIVWDKGRDFATVRKVLSMPQVNIVKKTEVQTGGFSKESILPKRNSDKLIARKKDWDPKKYGGFDSPTVAYSVLVVAKVEKGKSKKLKSVKELLGITIMERSSFEKNPIDFLEAKGYKEVKKDLIIKLPKYSLFELENGRKRMLASAGELQKGNELALPSKYVNFLYLASHYEKLKGSPEDNEQKQLFVEQHKHYLDEIIEQISEFSKRVILADANLDKVLSAYNKHRDKPIREQAENIIHLFTLTNLGAPAAFKYFDTTIDRKRYTSTKEVLDATLIHQSITGLYETRIDLSQLGGDGGGGGGSEAAAKGGGGSGGGRDIMKDIKVRLMTDSPDDSQDLMIGAIESNLFADQISWKSDQPVWLNQWPLKQEKLQALQQLVTEQLQLGHLEESNSPWNTPVFVIKKKSGKWRLLQDLRAVNATMHDMGALQPGLPSPVAVPKGWEIIIIDLQDCFFNIKLHPEDCKRFAFSVPSPNFKRPYQRFQWKVLPQGMKNSPTLCQKFVDKAILTVRDKYQDSYIVHYMDDILLAHPSRSIVDEILTSMIQALNKHGLVVSTEKIQKYDNLKYLGTHIQGDSVSYQKLQIRTDKLRTLNDFQKLLGNINWIRPFLKLTTGELKPLFEILNPDSNPISTRKLTPEACKALQLMNERLSTARVKRLDLSQPWSLCILKTEYTPTACLWQDGVVEWIHLPHISPKVITPYDIFCTQLIIKGRHRSKELFSKDPDYIVVPYTKVQFDLLLQEKEDWPISLLGFLGEVHFHLPKDPLLTFTLQTAIIFPHMTSTTPLEKGIVIFTDGSANGRSVTYIQGREPIIKENTQNTAQQAEIVAVITAFEEVSQPFNLYTDSKYVTGLFPEIETATLSPRTKIYTELKHLQRLIHKRQEKFYIGHIRGHTGLPGPLAQGNAYADSLTRILTAGKRTADGSEFEKRTADGSEFESPKKKAKVE

SEQ ID NO: 3329 - protein, 2022 aa, synthetic construct
MPAAKRVKLDGGDKKYSIGLDIGTNSVGWAVITDEYKVPSKKFKVLGNTDRHSIKKNLIGALLFDSGETAEATRLKRTARRRYTRRKNRICYLQEIFSNEMAKVDDSFFHRLEESFLVEEDKKHERHPIFGNIVDEVAYHEKYPTIYHLRKKLVDSTDKADLRLIYLALAHMIKFRGHFLIEGDLNPDNSDVDKLFIQLVQTYNQLFEENPINASGVDAKAILSARLSKSRRLENLIAQLPGEKKNGLFGNLIALSLGLTPNFKSNFDLAEDAKLQLSKDTYDDDLDNLLAQIGDQYADLFLAAKNLSDAILLSDILRVNTEITKAPLSASMIKRYDEHHQDLTLLKALVRQQLPEKYKEIFFDQSKNGYAGYIDGGASQEEFYKFIKPILEKMDGTEELLVKLNREDLLRKQRTFDNGSIPHQIHLGELHAILRRQEDFYPFLKDNREKIEKILTFRIPYYVGPLARGNSRFAWMTRKSEETITPWNFEEVVDKGASAQSFIERMTNFDKNLPNEKVLPKHSLLYEYFTVYNELTKVKYVTEGMRKPAFLSGEQKKAIVDLLFKTNRKVTVKQLKEDYFKKIECFDSVEISGVEDRFNASLGTYHDLLKIIKDKDFLDNEENEDILEDIVLTLTLFEDREMIEERLKTYAHLFDDKVMKQLKRRRYTGWGRLSRKLINGIRDKQSGKTILDFLKSDGFANRNFMQLIHDDSLTFKEDIQKAQVSGQGDSLHEHIANLAGSPAIKKGILQTVKVVDELVKVMGRHKPENIVIEMARENQTTQKGQKNSRERMKRIEEGIKELGSQILKEHPVENTQLQNEKLYLYYLQNGRDMYVDQELDINRLSDYDVDHIVPQSFLKDDSIDNKVLTRSDKARGKSDNVPSEEVVKKMKNYWRQLLNAKLITQRKFDNLTKAERGGLSELDKAGFIKRQLVETRQITKHVAQILDSRMNTKYDENDKLIREVKVITLKSKLVSDFRKDFQFYKVREINNYHHAHDAYLNAVVGTALIKKYPKLESEFVYGDYKVYDVRKMIAKSEQEIGKATAKYFFYSNIMNFFKTEITLANGEIRKRPLIETNGETGEIVWDKGRDFATVRKVLSMPQVNIVKKTEVQTGGFSKESILPKRNSDKLIARKKDWDPKKYGGFDSPTVAYSVLVVAKVEKGKSKKLKSVKELLGITIMERSSFEKNPIDFLEAKGYKEVKKDLIIKLPKYSLFELENGRKRMLASAGELQKGNELALPSKYVNFLYLASHYEKLKGSPEDNEQKQLFVEQHKHYLDEIIEQISEFSKRVILADANLDKVLSAYNKHRDKPIREQAENIIHLFTLTNLGAPAAFKYFDTTIDRKRYTSTKEVLDATLIHQSITGLYETRIDLSQLGGDGGGGSGGGGSSGGGRDIMKDIKVRLMTDSPDDSQDLMIGAIESNLFADQISWKSDQPVWLNQWPLKQEKLQALQQLVTEQLQLGHLEESNSPWNTPVFVIKKKSGKWRLLQDLRAVNATMHDMGALQPGLPSPVAVPKGWEIIIIDLQDCFFNIKLHPEDCKRFAFSVPSPNFKRPYQRFQWKVLPQGMKNSPTLCQKFVDKAILTVRDKYQDSYIVHYMDDILLAHPSRSIVDEILTSMIQALNKHGLVVSTEKIQKYDNLKYLGTHIQGDSVSYQKLQIRTDKLRTLNDFQKLLGNINWIRPFLKLTTGELKPLFEILNPDSNPISTRKLTPEACKALQLMNERLSTARVKRLDLSQPWSLCILKTEYTPTACLWQDGVVEWIHLPHISPKVITPYDIFCTQLIIKGRHRSKELFSKDPDYIVVPYTKVQFDLLLQEKEDWPISLLGFLGEVHFHLPKDPLLTFTLQTAIIFPHMTSTTPLEKGIVIFTDGSANGRSVTYIQGREPIIKENTQNTAQQAEIVAVITAFEEVSQPFNLYTDSKYVTGLFPEIETATLSPRTKIYTELKHLQRLIHKRQEKFYIGHIRGHTGLPGPLAQGNAYADSLTRILTAGKRTADGSEFEKRTADGSEFESPKKKAKVE

SEQ ID NO: 3330 - protein, 2033 aa, synthetic construct
MPAAKRVKLDGGDKKYSIGLDIGTNSVGWAVITDEYKVPSKKFKVLGNTDRHSIKKNLIGALLFDSGETAEATRLKRTARRRYTRRKNRICYLQEIFSNEMAKVDDSFFHRLEESFLVEEDKKHERHPIFGNIVDEVAYHEKYPTIYHLRKKLVDSTDKADLRLIYLALAHMIKFRGHFLIEGDLNPDNSDVDKLFIQLVQTYNQLFEENPINASGVDAKAILSARLSKSRRLENLIAQLPGEKKNGLFGNLIALSLGLTPNFKSNFDLAEDAKLQLSKDTYDDDLDNLLAQIGDQYADLFLAAKNLSDAILLSDILRVNTEITKAPLSASMIKRYDEHHQDLTLLKALVRQQLPEKYKEIFFDQSKNGYAGYIDGGASQEEFYKFIKPILEKMDGTEELLVKLNREDLLRKQRTFDNGSIPHQIHLGELHAILRRQEDFYPFLKDNREKIEKILTFRIPYYVGPLARGNSRFAWMTRKSEETITPWNFEEVVDKGASAQSFIERMTNFDKNLPNEKVLPKHSLLYEYFTVYNELTKVKYVTEGMRKPAFLSGEQKKAIVDLLFKTNRKVTVKQLKEDYFKKIECFDSVEISGVEDRFNASLGTYHDLLKIIKDKDFLDNEENEDILEDIVLTLTLFEDREMIEERLKTYAHLFDDKVMKQLKRRRYTGWGRLSRKLINGIRDKQSGKTILDFLKSDGFANRNFMQLIHDDSLTFKEDIQKAQVSGQGDSLHEHIANLAGSPAIKKGILQTVKVVDELVKVMGRHKPENIVIEMARENQTTQKGQKNSRERMKRIEEGIKELGSQILKEHPVENTQLQNEKLYLYYLQNGRDMYVDQELDINRLSDYDVDHIVPQSFLKDDSIDNKVLTRSDKARGKSDNVPSEEVVKKMKNYWRQLLNAKLITQRKFDNLTKAERGGLSELDKAGFIKRQLVETRQITKHVAQILDSRMNTKYDENDKLIREVKVITLKSKLVSDFRKDFQFYKVREINNYHHAHDAYLNAVVGTALIKKYPKLESEFVYGDYKVYDVRKMIAKSEQEIGKATAKYFFYSNIMNFFKTEITLANGEIRKRPLIETNGETGEIVWDKGRDFATVRKVLSMPQVNIVKKTEVQTGGFSKESILPKRNSDKLIARKKDWDPKKYGGFDSPTVAYSVLVVAKVEKGKSKKLKSVKELLGITIMERSSFEKNPIDFLEAKGYKEVKKDLIIKLPKYSLFELENGRKRMLASAGELQKGNELALPSKYVNFLYLASHYEKLKGSPEDNEQKQLFVEQHKHYLDEIIEQISEFSKRVILADANLDKVLSAYNKHRDKPIREQAENIIHLFTLTNLGAPAAFKYFDTTIDRKRYTSTKEVLDATLIHQSITGLYETRIDLSQLGGDGGEAAAKEAAAKEAAAKEAAAKGGGRDIMKDIKVRLMTDSPDDSQDLMIGAIESNLFADQISWKSDQPVWLNQWPLKQEKLQALQQLVTEQLQLGHLEESNSPWNTPVFVIKKKSGKWRLLQDLRAVNATMHDMGALQPGLPSPVAPPKGWEIIIIDLQDCFFNIKLHPEDCKRFAFSVPSPNFKRPYQRFQWKVLPQGMKNSPTLCQKFVDKAILTVRDKYQDSYIVHYMDDILLAHPSRSIVDEILTSMIQALNKHGLVVSTEKIQKYDNLKYLGTHIQGDSVSYQKLQIRTDKLRTLNDFQKLLGNINWIRPFLKLTTGELKPLFEILNPDSNPISTRKLTPEACKALQLMNERLSTARVKRLDLSQPWSLCILKTEYTPTACLWQDGVVEWIHLPHISPKVITPYDIFCTQLIIKGRHRSKELFSKDPDYIVVPYTKVQFDLLLQEKEDWPISLLGFLGEVHFHLPKDPLLTFTLQTAIIFPHMTSTTPLEKGIVIFTDGSANGRSVTYIQGREPIIKENTQNTAQQAEIVAVITAFEEVSQPFNLYTDSKYVTGLFPEIETATLSPRTKIYTELKHLQRLIHKRQEKFYIGHIRGHTGLPGPLAQGNAYADSLTRILTAGKRTADGSEFEKRTADGSEFESPKKKAKVE

SEQ ID NO: 3331 - protein, 2022 aa, synthetic construct
MPAAKRVKLDGGDKKYSIGLDIGTNSVGWAVITDEYKVPSKKFKVLGNTDRHSIKKNLIGALLFDSGETAEATRLKRTARRRYTRRKNRICYLQEIFSNEMAKVDDSFFHRLEESFLVEEDKKHERHPIFGNIVDEVAYHEKYPTIYHLRKKLVDSTDKADLRLIYLALAHMIKFRGHFLIEGDLNPDNSDVDKLFIQLVQTYNQLFEENPINASGVDAKAILSARLSKSRRLENLIAQLPGEKKNGLFGNLIALSLGLTPNFKSNFDLAEDAKLQLSKDTYDDDLDNLLAQIGDQYADLFLAAKNLSDAILLSDILRVNTEITKAPLSASMIKRYDEHHQDLTLLKALVRQQLPEKYKEIFFDQSKNGYAGYIDGGASQEEFYKFIKPILEKMDGTEELLVKLNREDLLRKQRTFDNGSIPHQIHLGELHAILRRQEDFYPFLKDNREKIEKILTFRIPYYVGPLARGNSRFAWMTRKSEETITPWNFEEVVDKGASAQSFIERMTNFDKNLPNEKVLPKHSLLYEYFTVYNELTKVKYVTEGMRKPAFLSGEQKKAIVDLLFKTNRKVTVKQLKEDYFKKIECFDSVEISGVEDRFNASLGTYHDLLKIIKDKDFLDNEENEDILEDIVLTLTLFEDREMIEERLKTYAHLFDDKVMKQLKRRRYTGWGRLSRKLINGIRDKQSGKTILDFLKSDGFANRNFMQLIHDDSLTFKEDIQKAQVSGQGDSLHEHIANLAGSPAIKKGILQTVKVVDELVKVMGRHKPENIVIEMARENQTTQKGQKNSRERMKRIEEGIKELGSQILKEHPVENTQLQNEKLYLYYLQNGRDMYVDQELDINRLSDYDVDHIVPQSFLKDDSIDNKVLTRSDKARGKSDNVPSEEVVKKMKNYWRQLLNAKLITQRKFDNLTKAERGGLSELDKAGFIKRQLVETRQITKHVAQILDSRMNTKYDENDKLIREVKVITLKSKLVSDFRKDFQFYKVREINNYHHAHDAYLNAVVGTALIKKYPKLESEFVYGDYKVYDVRKMIAKSEQEIGKATAKYFFYSNIMNFFKTEITLANGEIRKRPLIETNGETGEIVWDKGRDFATVRKVLSMPQVNIVKKTEVQTGGFSKESILPKRNSDKLIARKKDWDPKKYGGFDSPTVAYSVLVVAKVEKGKSKKLKSVKELLGITIMERSSFEKNPIDFLEAKGYKEVKKDLIIKLPKYSLFELENGRKRMLASAGELQKGNELALPSKYVNFLYLASHYEKLKGSPEDNEQKQLFVEQHKHYLDEIIEQISEFSKRVILADANLDKVLSAYNKHRDKPIREQAENIIHLFTLTNLGAPAAFKYFDTTIDRKRYTSTKEVLDATLIHQSITGLYETRIDLSQLGGDGGGGGGGSPAPGGGRDIMKDIKVRLMTDSPDDSQDLMIGAIESNLFADQISWKSDQPVWLNQWPLKQEKLQALQQLVTEQLQLGHLEESNSPWNTPVFVIKKKSGKWRLLQDLRAVNATMHDMGALQPGLPSPVAPPKGWEIIIIDLQDCFFNIKLHPEDCKRFAFSVPSPNFKRPYQRFQWKVLPQGMKNSPTLCQKFVDKAILTVRDKYQDSYIVHYMDDILLAHPSRSIVDEILTSMIQALNKHGLVVSTEKIQKYDNLKYLGTHIQGDSVSYQKLQIRTDKLRTLNDFQKLLGNINWIRPFLKLTTGELKPLFEILNPDSNPISTRKLTPEACKALQLMNERLSTARVKRLDLSQPWSLCILKTEYTPTACLWQDGVVEWIHLPHISPKVITPYDIFCTQLIIKGRHRSKELFSKDPDYIVVPYTKVQFDLLLQEKEDWPISLLGFLGEVHFHLPKDPLLTFTLQTAIIFPHMTSTTPLEKGIVIFTDGSANGRSVTYIQGREPIIKENTQNTAQQAEIVAVITAFEEVSQPFNLYTDSKYVTGLFPEIETATLSPRTKIYTELKHLQRLIHKRQEKFYIGHIRGHTGLPGPLAQGNAYADSLTRILTAGKRTADGSEFEKRTADGSEFESPKKKAKVE

SEQ ID NO: 3332 - protein, 2024 aa, synthetic construct
MPAAKRVKLDGGDKKYSIGLDIGTNSVGWAVITDEYKVPSKKFKVLGNTDRHSIKKNLIGALLFDSGETAEATRLKRTARRRYTRRKNRICYLQEIFSNEMAKVDDSFFHRLEESFLVEEDKKHERHPIFGNIVDEVAYHEKYPTIYHLRKKLVDSTDKADLRLIYLALAHMIKFRGHFLIEGDLNPDNSDVDKLFIQLVQTYNQLFEENPINASGVDAKAILSARLSKSRRLENLIAQLPGEKKNGLFGNLIALSLGLTPNFKSNFDLAEDAKLQLSKDTYDDDLDNLLAQIGDQYADLFLAAKNLSDAILLSDILRVNTEITKAPLSASMIKRYDEHHQDLTLLKALVRQQLPEKYKEIFFDQSKNGYAGYIDGGASQEEFYKFIKPILEKMDGTEELLVKLNREDLLRKQRTFDNGSIPHQIHLGELHAILRRQEDFYPFLKDNREKIEKILTFRIPYYVGPLARGNSRFAWMTRKSEETITPWNFEEVVDKGASAQSFIERMTNFDKNLPNEKVLPKHSLLYEYFTVYNELTKVKYVTEGMRKPAFLSGEQKKAIVDLLFKTNRKVTVKQLKEDYFKKIECFDSVEISGVEDRFNASLGTYHDLLKIIKDKDFLDNEENEDILEDIVLTLTLFEDREMIEERLKTYAHLFDDKVMKQLKRRRYTGWGRLSRKLINGIRDKQSGKTILDFLKSDGFANRNFMQLIHDDSLTFKEDIQKAQVSGQGDSLHEHIANLAGSPAIKKGILQTVKVVDELVKVMGRHKPENIVIEMARENQTTQKGQKNSRERMKRIEEGIKELGSQILKEHPVENTQLQNEKLYLYYLQNGRDMYVDQELDINRLSDYDVDHIVPQSFLKDDSIDNKVLTRSDKARGKSDNVPSEEVVKKMKNYWRQLLNAKLITQRKFDNLTKAERGGLSELDKAGFIKRQLVETRQITKHVAQILDSRMNTKYDENDKLIREVKVITLKSKLVSDFRKDFQFYKVREINNYHHAHDAYLNAVVGTALIKKYPKLESEFVYGDYKVYDVRKMIAKSEQEIGKATAKYFFYSNIMNFFKTEITLANGEIRKRPLIETNGETGEIVWDKGRDFATVRKVLSMPQVNIVKKTEVQTGGFSKESILPKRNSDKLIARKKDWDPKKYGGFDSPTVAYSVLVVAKVEKGKSKKLKSVKELLGITIMERSSFEKNPIDFLEAKGYKEVKKDLIIKLPKYSLFELENGRKRMLASAGELQKGNELALPSKYVNFLYLASHYEKLKGSPEDNEQKQLFVEQHKHYLDEIIEQISEFSKRVILADANLDKVLSAYNKHRDKPIREQAENIIHLFTLTNLGAPAAFKYFDTTIDRKRYTSTKEVLDATLIHQSITGLYETRIDLSQLGGDGGGSSEAAAKPAPGGGRDIMKDIKVRLMTDSPDDSQDLMIGAIESNLFADQISWKSDQPVWLNQWPLKQEKLQALQQLVTEQLQLGHLEESNSPWNTPVFVIKKKSGKWRLLQDLRAVNATMHDMGALQPGLPSPVAPPKGWEIIIIDLQDCFFNIKLHPEDCKRFAFSVPSPNFKRPYQRFQWKVLPQGMKNSPTLCQKFVDKAILTVRDKYQDSYIVHYMDDILLAHPSRSIVDEILTSMIQALNKHGLVVSTEKIQKYDNLKYLGTHIQGDSVSYQKLQIRTDKLRTLNDFQKLLGNINWIRPFLKLTTGELKPLFEILNPDSNPISTRKLTPEACKALQLMNERLSTARVKRLDLSQPWSLCILKTEYTPTACLWQDGVVEWIHLPHISPKVITPYDIFCTQLIIKGRHRSKELFSKDPDYIVVPYTKVQFDLLLQEKEDWPISLLGFLGEVHFHLPKDPLLTFTLQTAIIFPHMTSTTPLEKGIVIFTDGSANGRSVTYIQGREPIIKENTQNTAQQAEIVAVITAFEEVSQPFNLYTDSKYVTGLFPEIETATLSPRTKIYTELKHLQRLIHKRQEKFYIGHIRGHTGLPGPLAQGNAYADSLTRILTAGKRTADGSEFEKRTADGSEFESPKKKAKVE

SEQ ID NO: 3333-3999 - skipped (667 entries)

SEQ ID NO: 4000 - protein, 1381 aa, synthetic construct
MPAAKRVKLDGGDKKYSIGLDIGTNSVGWAVITDEYKVPSKKFKVLGNTDRHSIKKNLIGALLFDSGETAEATRLKRTARRRYTRRKNRICYLQEIFSNEMAKVDDSFFHRLEESFLVEEDKKHERHPIFGNIVDEVAYHEKYPTIYHLRKKLVDSTDKADLRLIYLALAHMIKFRGHFLIEGDLNPDNSDVDKLFIQLVQTYNQLFEENPINASGVDAKAILSARLSKSRRLENLIAQLPGEKKNGLFGNLIALSLGLTPNFKSNFDLAEDAKLQLSKDTYDDDLDNLLAQIGDQYADLFLAAKNLSDAILLSDILRVNTEITKAPLSASMIKRYDEHHQDLTLLKALVRQQLPEKYKEIFFDQSKNGYAGYIDGGASQEEFYKFIKPILEKMDGTEELLVKLNREDLLRKQRTFDNGSIPHQIHLGELHAILRRQEDFYPFLKDNREKIEKILTFRIPYYVGPLARGNSRFAWMTRKSEETITPWNFEEVVDKGASAQSFIERMTNFDKNLPNEKVLPKHSLLYEYFTVYNELTKVKYVTEGMRKPAFLSGEQKKAIVDLLFKTNRKVTVKQLKEDYFKKIECFDSVEISGVEDRFNASLGTYHDLLKIIKDKDFLDNEENEDILEDIVLTLTLFEDREMIEERLKTYAHLFDDKVMKQLKRRRYTGWGRLSRKLINGIRDKQSGKTILDFLKSDGFANRNFMQLIHDDSLTFKEDIQKAQVSGQGDSLHEHIANLAGSPAIKKGILQTVKVVDELVKVMGRHKPENIVIEMARENQTTQKGQKNSRERMKRIEEGIKELGSQILKEHPVENTQLQNEKLYLYYLQNGRDMYVDQELDINRLSDYDVDHIVPQSFLKDDSIDNKVLTRSDKARGKSDNVPSEEVVKKMKNYWRQLLNAKLITQRKFDNLTKAERGGLSELDKAGFIKRQLVETRQITKHVAQILDSRMNTKYDENDKLIREVKVITLKSKLVSDFRKDFQFYKVREINNYHHAHDAYLNAVVGTALIKKYPKLESEFVYGDYKVYDVRKMIAKSEQEIGKATAKYFFYSNIMNFFKTEITLANGEIRKRPLIETNGETGEIVWDKGRDFATVRKVLSMPQVNIVKKTEVQTGGFSKESILPKRNSDKLIARKKDWDPKKYGGFDSPTVAYSVLVVAKVEKGKSKKLKSVKELLGITIMERSSFEKNPIDFLEAKGYKEVKKDLIIKLPKYSLFELENGRKRMLASAGELQKGNELALPSKYVNFLYLASHYEKLKGSPEDNEQKQLFVEQHKHYLDEIIEQISEFSKRVILADANLDKVLSAYNKHRDKPIREQAENIIHLFTLTNLGAPAAFKYFDTTIDRKRYTSTKEVLDATLIHQSITGLYETRIDLSQLGGDGG

SEQ ID NO: 4001 - protein, 31 aa, synthetic construct
AGKRTADGSEFEKRTADGSEFESPKKKAKVE

SEQ ID NO: 4002 - protein, 2138 aa, synthetic construct; identical to SEQ ID NO: 2892

SEQ ID NO: 4003-4500 - skipped (498 entries)

SEQ ID NO: 4501 - protein, 2096 aa, synthetic construct
MPAAKRVKLDGGDKKYSIGLDIGTNSVGWAVITDEYKVPSKKFKVLGNTDRHSIKKNLIGALLFDSGETAEATRLKRTARRRYTRRKNRICYLQEIFSNEMAKVDDSFFHRLEESFLVEEDKKHERHPIFGNIVDEVAYHEKYPTIYHLRKKLVDSTDKADLRLIYLALAHMIKFRGHFLIEGDLNPDNSDVDKLFIQLVQTYNQLFEENPINASGVDAKAILSARLSKSRRLENLIAQLPGEKKNGLFGNLIALSLGLTPNFKSNFDLAEDAKLQLSKDTYDDDLDNLLAQIGDQYADLFLAAKNLSDAILLSDILRVNTEITKAPLSASMIKRYDEHHQDLTLLKALVRQQLPEKYKEIFFDQSKNGYAGYIDGGASQEEFYKFIKPILEKMDGTEELLVKLNREDLLRKQRTFDNGSIPHQIHLGELHAILRRQEDFYPFLKDNREKIEKILTFRIPYYVGPLARGNSRFAWMTRKSEETITPWNFEEVVDKGASAQSFIERMTNFDKNLPNEKVLPKHSLLYEYFTVYNELTKVKYVTEGMRKPAFLSGEQKKAIVDLLFKTNRKVTVKQLKEDYFKKIECFDSVEISGVEDRFNASLGTYHDLLKIIKDKDFLDNEENEDILEDIVLTLTLFEDREMIEERLKTYAHLFDDKVMKQLKRRRYTGWGRLSRKLINGIRDKQSGKTILDFLKSDGFANRNFMQLIHDDSLTFKEDIQKAQVSGQGDSLHEHIANLAGSPAIKKGILQTVKVVDELVKVMGRHKPENIVIEMARENQTTQKGQKNSRERMKRIEEGIKELGSQILKEHPVENTQLQNEKLYLYYLQNGRDMYVDQELDINRLSDYDVDHIVPQSFLKDDSIDNKVLTRSDKARGKSDNVPSEEVVKKMKNYWRQLLNAKLITQRKFDNLTKAERGGLSELDKAGFIKRQLVETRQITKHVAQILDSRMNTKYDENDKLIREVKVITLKSKLVSDFRKDFQFYKVREINNYHHAHDAYLNAVVGTALIKKYPKLESEFVYGDYKVYDVRKMIAKSEQEIGKATAKYFFYSNIMNFFKTEITLANGEIRKRPLIETNGETGEIVWDKGRDFATVRKVLSMPQVNIVKKTEVQTGGFSKESILPKRNSDKLIARKKDWDPKKYGGFDSPTVAYSVLVVAKVEKGKSKKLKSVKELLGITIMERSSFEKNPIDFLEAKGYKEVKKDLIIKLPKYSLFELENGRKRMLASAGELQKGNELALPSKYVNFLYLASHYEKLKGSPEDNEQKQLFVEQHKHYLDEIIEQISEFSKRVILADANLDKVLSAYNKHRDKPIREQAENIIHLFTLTNLGAPAAFKYFDTTIDRKRYTSTKEVLDATLIHQSITGLYETRIDLSQLGGDGGGGSGGSGGSGGTAPLEEEYRLFLEAPIQNVTLLEQWKREIPKVWAEINPPGLASTQAPIHVQLLSTALPVRVRQYPITLEAKRSLRETIRKFRAAGILRPVHSPWNTPLLPVRKSGTSEYRMVQDLREVNKRVETIHPTVPNPYTLLSLLPPDRIWYSVLDLKDAFFCIPLAPESQLIFAFEWADAEEGESGQLTWTRLPQGFKNSPTLFNEALNRDLQGFRLDHPSVSLLQYVDDLLIAADTQAACLSATRDLLMTLAELGYRVSGKKAQLCQEEVTYLGFKIHKGSRSLSNSRTQAILQIPVPKTKRQVREFLGKIGYCRLFIPGFAELAQPLYAATRPGNDPLVWGEKEEEAFQSLKLALTQPPALALPSLDKPFQLFVEETSGAAKGVLTQALGPWKRPVAYLSKRLDPVAAGWPRCLRAIAAAALLTREASKLTFGQDIEITSSHNLESLLRSPPDKWLTNARITQYQVLLLDPPRVRFKQTAALNPATLLPETDDTLPIHHCLDTLDSLTSTRPDLTDQPLAQAEATLFTDGSSYIRDGKRYAGAAVVTLDSVIWAEPLPIGTSAQKAELIALTKALEWSKDKSVNIYTDSRYAFATLHVHGMIYRERGWLTAGGKAIKNAPEILALLTAVWLPKRVAVMHCKGHQKDDAPTSTGNRRADEVAREVAIRPLSTQATISAGKRTADGSEFEKRTADGSEFESPKKKAKVE

SEQ ID NO: 4502 - protein, 2098 aa, synthetic construct
MPAAKRVKLDGGDKKYSIGLDIGTNSVGWAVITDEYKVPSKKFKVLGNTDRHSIKKNLIGALLFDSGETAEATRLKRTARRRYTRRKNRICYLQEIFSNEMAKVDDSFFHRLEESFLVEEDKKHERHPIFGNIVDEVAYHEKYPTIYHLRKKLVDSTDKADLRLIYLALAHMIKFRGHFLIEGDLNPDNSDVDKLFIQLVQTYNQLFEENPINASGVDAKAILSARLSKSRRLENLIAQLPGEKKNGLFGNLIALSLGLTPNFKSNFDLAEDAKLQLSKDTYDDDLDNLLAQIGDQYADLFLAAKNLSDAILLSDILRVNTEITKAPLSASMIKRYDEHHQDLTLLKALVRQQLPEKYKEIFFDQSKNGYAGYIDGGASQEEFYKFIKPILEKMDGTEELLVKLNREDLLRKQRTFDNGSIPHQIHLGELHAILRRQEDFYPFLKDNREKIEKILTFRIPYYVGPLARGNSRFAWMTRKSEETITPWNFEEVVDKGASAQSFIERMTNFDKNLPNEKVLPKHSLLYEYFTVYNELTKVKYVTEGMRKPAFLSGEQKKAIVDLLFKTNRKVTVKQLKEDYFKKIECFDSVEISGVEDRFNASLGTYHDLLKIIKDKDFLDNEENEDILEDIVLTLTLFEDREMIEERLKTYAHLFDDKVMKQLKRRRYTGWGRLSRKLINGIRDKQSGKTILDFLKSDGFANRNFMQLIHDDSLTFKEDIQKAQVSGQGDSLHEHIANLAGSPAIKKGILQTVKVVDELVKVMGRHKPENIVIEMARENQTTQKGQKNSRERMKRIEEGIKELGSQILKEHPVENTQLQNEKLYLYYLQNGRDMYVDQELDINRLSDYDVDHIVPQSFLKDDSIDNKVLTRSDKARGKSDNVPSEEVVKKMKNYWRQLLNAKLITQRKFDNLTKAERGGLSELDKAGFIKRQLVETRQITKHVAQILDSRMNTKYDENDKLIREVKVITLKSKLVSDFRKDFQFYKVREINNYHHAHDAYLNAVVGTALIKKYPKLESEFVYGDYKVYDVRKMIAKSEQEIGKATAKYFFYSNIMNFFKTEITLANGEIRKRPLIETNGETGEIVWDKGRDFATVRKVLSMPQVNIVKKTEVQTGGFSKESILPKRNSDKLIARKKDWDPKKYGGFDSPTVAYSVLVVAKVEKGKSKKLKSVKELLGITIMERSSFEKNPIDFLEAKGYKEVKKDLIIKLPKYSLFELENGRKRMLASAGELQKGNELALPSKYVNFLYLASHYEKLKGSPEDNEQKQLFVEQHKHYLDEIIEQISEFSKRVILADANLDKVLSAYNKHRDKPIREQAENIIHLFTLTNLGAPAAFKYFDTTIDRKRYTSTKEVLDATLIHQSITGLYETRIDLSQLGGDGGGGSGGSGGSGGSGGSGGVLNLEEEYRLHEKPVPSSIDPSWLQLFPTVWAERAGMGLANQVPPVVVELRSGASPVAVRQYPMSKEAREGIRPHIQRFLDLGVLVPCQSPWNTPLLPVKKPGTNDYRPVQDLREINKRVQDIHPTVPNPYNLLSSLPPSHTWYSVLDLKDAFFCLKLHPNSQPLFAFEWRDPEKGNTGQLTWTRLPQGFKNSPTLFNEALHRDLAPFRALNPQVVLLQYVDDLLVAAPTYRDCKEGTQKLLQELSKLGYRVSAKKAQLCQKEVTYLGYLLKEGKRWLTPARKATVMKIPPPTTPRQVREFLGTAGFCRLWIPGFASLAAPLYPLTKPSIPFIWTEEHQKAFDRIKEALLSAPALALPDLTKPFTLYVDERAGVARGVLTQTLGPWRRPVAYLSKKLDPVASGWPTCLKAVAAVALLLKDADKLTLGQNVTVIASHSLESIVRQPPDRWMTNARMTHYQSLLLNERVSFAPPAVLNPATLLPVESEATPVHRCSEILAEETGTRRDLKDQPLPGVPAWYTDGSSFIAEGKRRAGAAIVDGKRTVWASSLPEGTSAQKAELVALTQALRLAEGKDINIYTDSRYAFATAHIHGAIYKQRGWLTSAGKDIKNKEEILALLEAIHLPKRVAIIHCPGHQKGNDPVATGNRRADEAAKQAALSTRVLAETTKPAGKRTADGSEFEKRTADGSEFESPKKKAKVE

SEQ ID NO: 4503 - protein, 2103 aa, synthetic construct
MPAAKRVKLDGGDKKYSIGLDIGTNSVGWAVITDEYKVPSKKFKVLGNTDRHSIKKNLIGALLFDSGETAEATRLKRTARRRYTRRKNRICYLQEIFSNEMAKVDDSFFHRLEESFLVEEDKKHERHPIFGNIVDEVAYHEKYPTIYHLRKKLVDSTDKADLRLIYLALAHMIKFRGHFLIEGDLNPDNSDVDKLFIQLVQTYNQLFEENPINASGVDAKAILSARLSKSRRLENLIAQLPGEKKNGLFGNLIALSLGLTPNFKSNFDLAEDAKLQLSKDTYDDDLDNLLAQIGDQYADLFLAAKNLSDAILLSDILRVNTEITKAPLSASMIKRYDEHHQDLTLLKALVRQQLPEKYKEIFFDQSKNGYAGYIDGGASQEEFYKFIKPILEKMDGTEELLVKLNREDLLRKQRTFDNGSIPHQIHLGELHAILRRQEDFYPFLKDNREKIEKILTFRIPYYVGPLARGNSRFAWMTRKSEETITPWNFEEVVDKGASAQSFIERMTNFDKNLPNEKVLPKHSLLYEYFTVYNELTKVKYVTEGMRKPAFLSGEQKKAIVDLLFKTNRKVTVKQLKEDYFKKIECFDSVEISGVEDRFNASLGTYHDLLKIIKDKDFLDNEENEDILEDIVLTLTLFEDREMIEERLKTYAHLFDDKVMKQLKRRRYTGWGRLSRKLINGIRDKQSGKTILDFLKSDGFANRNFMQLIHDDSLTFKEDIQKAQVSGQGDSLHEHIANLAGSPAIKKGILQTVKVVDELVKVMGRHKPENIVIEMARENQTTQKGQKNSRERMKRIEEGIKELGSQILKEHPVENTQLQNEKLYLYYLQNGRDMYVDQELDINRLSDYDVDHIVPQSFLKDDSIDNKVLTRSDKARGKSDNVPSEEVVKKMKNYWRQLLNAKLITQRKFDNLTKAERGGLSELDKAGFIKRQLVETRQITKHVAQILDSRMNTKYDENDKLIREVKVITLKSKLVSDFRKDFQFYKVREINNYHHAHDAYLNAVVGTALIKKYPKLESEFVYGDYKVYDVRKMIAKSEQEIGKATAKYFFYSNIMNFFKTEITLANGEIRKRPLIETNGETGEIVWDKGRDFATVRKVLSMPQVNIVKKTEVQTGGFSKESILPKRNSDKLIARKKDWDPKKYGGFDSPTVAYSVLVVAKVEKGKSKKLKSVKELLGITIMERSSFEKNPIDFLEAKGYKEVKKDLIIKLPKYSLFELENGRKRMLASAGELQKGNELALPSKYVNFLYLASHYEKLKGSPEDNEQKQLFVEQHKHYLDEIIEQISEFSKRVILADANLDKVLSAYNKHRDKPIREQAENIIHLFTLTNLGAPAAFKYFDTTIDRKRYTSTKEVLDATLIHQSITGLYETRIDLSQLGGDGGGGSGGSGGSGGSGGSGGSGGLGIEDEYRLHETSTEPDVSLGSTWLSDFPQAWAETGGMGLAVRQAPLIIPLKATSTPVSIQQYPMSHEARLGIKPHIQRLLDQGILVPCQSPWNTPLLPVKKPGTNDYRPVQDLREVNKRVEDIHPTVPNPYNLLSGLPPSHQWYTVLDLKDAFFCLRLHPTSQPLFAFEWRDPGMGISGQLTWTRLPQGFKNSPTLFNEALHRDLADFRIQHPDLILLQYVDDILLAATSELDCQQGTRALLQTLGDLGYRASAKKAQICQKQVKYLGYLLREGQRWLTEARKETVMGQPVPKTPRQLREFLGKAGFCRLFIPGFAEMAAPLYPLTKPGTLFSWGPDQQKAYQEIKQALLTAPALGLPDLTKPFELFVDEKQGYAKGVLTQKLGPWRRPVAYLSKKLDPVAAGWPPCLRMVAAIAVLTKDAGKLTMGQPLVILAPHAVEALVKQPPDRWLSNARMTHYQAMLLDTDRVQFGPVVALNPATLLPLPEEGAPHDCLEILAETHGTRPDLTDQPIPDADHTWYTDGSSFLQEGQRKAGAAVTTETEVIWAGALPAGTSAQRAELIALTQALKMAEGKRLNVYTDSRYAFATAHIHGEIYRRRGWLTSEGREIKNKSEILALLKALFLPKRLSIIHCLGHQKGDSAEARGNRLADQAAREAAIKTPPDTSTLLIAGKRTADGSEFEKRTADGSEFESPKKKAKVE

SEQ ID NO: 4504 - protein, 2110 aa, synthetic construct
MPAAKRVKLDGGDKKYSIGLDIGTNSVGWAVITDEYKVPSKKFKVLGNTDRHSIKKNLIGALLFDSGETAEATRLKRTARRRYTRRKNRICYLQEIFSNEMAKVDDSFFHRLEESFLVEEDKKHERHPIFGNIVDEVAYHEKYPTIYHLRKKLVDSTDKADLRLIYLALAHMIKFRGHFLIEGDLNPDNSDVDKLFIQLVQTYNQLFEENPINASGVDAKAILSARLSKSRRLENLIAQLPGEKKNGLFGNLIALSLGLTPNFKSNFDLAEDAKLQLSKDTYDDDLDNLLAQIGDQYADLFLAAKNLSDAILLSDILRVNTEITKAPLSASMIKRYDEHHQDLTLLKALVRQQLPEKYKEIFFDQSKNGYAGYIDGGASQEEFYKFIKPILEKMDGTEELLVKLNREDLLRKQRTFDNGSIPHQIHLGELHAILRRQEDFYPFLKDNREKIEKILTFRIPYYVGPLARGNSRFAWMTRKSEETITPWNFEEVVDKGASAQSFIERMTNFDKNLPNEKVLPKHSLLYEYFTVYNELTKVKYVTEGMRKPAFLSGEQKKAIVDLLFKTNRKVTVKQLKEDYFKKIECFDSVEISGVEDRFNASLGTYHDLLKIIKDKDFLDNEENEDILEDIVLTLTLFEDREMIEERLKTYAHLFDDKVMKQLKRRRYTGWGRLSRKLINGIRDKQSGKTILDFLKSDGFANRNFMQLIHDDSLTFKEDIQKAQVSGQGDSLHEHIANLAGSPAIKKGILQTVKVVDELVKVMGRHKPENIVIEMARENQTTQKGQKNSRERMKRIEEGIKELGSQILKEHPVENTQLQNEKLYLYYLQNGRDMYVDQELDINRLSDYDVDHIVPQSFLKDDSIDNKVLTRSDKARGKSDNVPSEEVVKKMKNYWRQLLNAKLITQRKFDNLTKAERGGLSELDKAGFIKRQLVETRQITKHVAQILDSRMNTKYDENDKLIREVKVITLKSKLVSDFRKDFQFYKVREINNYHHAHDAYLNAVVGTALIKKYPKLESEFVYGDYKVYDVRKMIAKSEQEIGKATAKYFFYSNIMNFFKTEITLANGEIRKRPLIETNGETGEIVWDKGRDFATVRKVLSMPQVNIVKKTEVQTGGFSKESILPKRNSDKLIARKKDWDPKKYGGFDSPTVAYSVLVVAKVEKGKSKKLKSVKELLGITIMERSSFEKNPIDFLEAKGYKEVKKDLIIKLPKYSLFELENGRKRMLASAGELQKGNELALPSKYVNFLYLASHYEKLKGSPEDNEQKQLFVEQHKHYLDEIIEQISEFSKRVILADANLDKVLSAYNKHRDKPIREQAENIIHLFTLTNLGAPAAFKYFDTTIDRKRYTSTKEVLDATLIHQSITGLYETRIDLSQLGGDGGGGGGSGGGGSGGGGSGGGGSGGGGSGGTLNIEDEHRLHETSKEPDVSLGSTWLSDFPQAWAETGGMGLAVRQAPLIIPLKATSTPVSIKQYPMSQEARLGIKPHIQRLLDQGILVPCQSPWNTPLLPVKKPGTNDYRPVQDLREVNKRVEDIHPTVPNPYNLLSGLPPSHQWYTVLDLKDAFFCLRLHPTSQPLFAFEWRDPEMGISGQLTWTRLPQGFKNSPTLFNEALHRDLADFRIQHPDLILLQYVDDLLLAATSELDCQQGTRALLQTLGNLGYRASAKKAQICQKQVKYLGYLLKEGQRWLTEARKETVMGQPTPKTPRQLREFLGKAGFCRLFIPGFAEMAAPLYPLTKPGTLFNWGPDQQKAYQEIKQALLTAPALGLPDLTKPFELFVDEKQGYAKGVLTQKLGPWRRPVAYLSKKLDPVAAGWPPCLRMVAAIAVLTKDAGKLTMGQPLVILAPHAVEALVKQPPDRWLSNARMTHYQALLLDTDRVQFGPVVALNPATLLPLPEEGLQHNCLDILAEAHGTRPDLTDQPLPDADHTWYTDGSSLLQEGQRKAGAAVTTETEVIWAKALPAGTSAQRAELIALTQALKMAEGKKLNVYTDSRYAFATAHIHGEIYRRRGWLTSEGKEIKNKDEILALLKALFLPKRLSIIHCPGHQKGHSAEARGNRMADQAARKAAITETPDTSTLLAGKRTADGSEFEKRTADGSEFESPKKKAKVE

SEQ ID NO: 4505 - protein, 2094 aa, synthetic construct
MPAAKRVKLDGGDKKYSIGLDIGTNSVGWAVITDEYKVPSKKFKVLGNTDRHSIKKNLIGALLFDSGETAEATRLKRTARRRYTRRKNRICYLQEIFSNEMAKVDDSFFHRLEESFLVEEDKKHERHPIFGNIVDEVAYHEKYPTIYHLRKKLVDSTDKADLRLIYLALAHMIKFRGHFLIEGDLNPDNSDVDKLFIQLVQTYNQLFEENPINASGVDAKAILSARLSKSRRLENLIAQLPGEKKNGLFGNLIALSLGLTPNFKSNFDLAEDAKLQLSKDTYDDDLDNLLAQIGDQYADLFLAAKNLSDAILLSDILRVNTEITKAPLSASMIKRYDEHHQDLTLLKALVRQQLPEKYKEIFFDQSKNGYAGYIDGGASQEEFYKFIKPILEKMDGTEELLVKLNREDLLRKQRTFDNGSIPHQIHLGELHAILRRQEDFYPFLKDNREKIEKILTFRIPYYVGPLARGNSRFAWMTRKSEETITPWNFEEVVDKGASAQSFIERMTNFDKNLPNEKVLPKHSLLYEYFTVYNELTKVKYVTEGMRKPAFLSGEQKKAIVDLLFKTNRKVTVKQLKEDYFKKIECFDSVEISGVEDRFNASLGTYHDLLKIIKDKDFLDNEENEDILEDIVLTLTLFEDREMIEERLKTYAHLFDDKVMKQLKRRRYTGWGRLSRKLINGIRDKQSGKTILDFLKSDGFANRNFMQLIHDDSLTFKEDIQKAQVSGQGDSLHEHIANLAGSPAIKKGILQTVKVVDELVKVMGRHKPENIVIEMARENQTTQKGQKNSRERMKRIEEGIKELGSQILKEHPVENTQLQNEKLYLYYLQNGRDMYVDQELDINRLSDYDVDHIVPQSFLKDDSIDNKVLTRSDKARGKSDNVPSEEVVKKMKNYWRQLLNAKLITQRKFDNLTKAERGGLSELDKAGFIKRQLVETRQITKHVAQILDSRMNTKYDENDKLIREVKVITLKSKLVSDFRKDFQFYKVREINNYHHAHDAYLNAVVGTALIKKYPKLESEFVYGDYKVYDVRKMIAKSEQEIGKATAKYFFYSNIMNFFKTEITLANGEIRKRPLIETNGETGEIVWDKGRDFATVRKVLSMPQVNIVKKTEVQTGGFSKESILPKRNSDKLIARKKDWDPKKYGGFDSPTVAYSVLVVAKVEKGKSKKLKSVKELLGITIMERSSFEKNPIDFLEAKGYKEVKKDLIIKLPKYSLFELENGRKRMLASAGELQKGNELALPSKYVNFLYLASHYEKLKGSPEDNEQKQLFVEQHKHYLDEIIEQISEFSKRVILADANLDKVLSAYNKHRDKPIREQAENIIHLFTLTNLGAPAAFKYFDTTIDRKRYTSTKEVLDATLIHQSITGLYETRIDLSQLGGDGGGSSGSSGSSGGTLNIEDEHRLHETSKEPDVSLGSTWLSDFPQAWAETGGMGLAVRQAPLIIPLKATSTPVSIKQYPMSQEARLGIKPHIQRLLDQGILVPCQSPWNTPLLPVKKPGTNDYRPVQDLREVNKRVEDIHPTVPNPYNLLSGLPPSHQWYTVLDLKDAFFCLRLHPTSQPLFAFEWRDPEMGISGQLTWTRLPQGFKNSPTLFNEALHRDLADFRIQHPDLILLQYVDDLLLAATSELDCQQGTRALLQTLGNLGYRASAKKAQICQKQVKYLGYLLKEGQRWLTEARKETVMGQPTPKTPRQLREFLGTAGFCRLWIPGFAEMAAPLYPLTKPGTLFNWGPDQQKAYQEIKQALLTAPALGLPDLTKPFELFVDEKQGYAKGVLTQKLGPWRRPVAYLSKKLDPVAAGWPPCLRMVAAIAVLTKDAGKLTMGQPLVILAPHAVEALVKQPPDRWLSNARMTHYQALLLDTDRVQFGPVVALNPATLLPLPEEGLQHNCLDILAEAHGTRPDLTDQPLPDADHTWYTDGSSLLQEGQRKAGAAVTTETEVIWAKALPAGTSAQRAELIALTQALKMAEGKKLNVYTDSRYAFATAHIHGEIYRRRGWLTSEGKEIKNKDEILALLKALFLPKRLSIIHCPGHQKGHSAEARGNRMADQAARKAAITETPDTSTLLAGKRTADGSEFEKRTADGSEFESPKKKAKVE

SEQ ID NO: 4506 - protein, 2100 aa, synthetic construct
MPAAKRVKLDGGDKKYSIGLDIGTNSVGWAVITDEYKVPSKKFKVLGNTDRHSIKKNLIGALLFDSGETAEATRLKRTARRRYTRRKNRICYLQEIFSNEMAKVDDSFFHRLEESFLVEEDKKHERHPIFGNIVDEVAYHEKYPTIYHLRKKLVDSTDKADLRLIYLALAHMIKFRGHFLIEGDLNPDNSDVDKLFIQLVQTYNQLFEENPINASGVDAKAILSARLSKSRRLENLIAQLPGEKKNGLFGNLIALSLGLTPNFKSNFDLAEDAKLQLSKDTYDDDLDNLLAQIGDQYADLFLAAKNLSDAILLSDILRVNTEITKAPLSASMIKRYDEHHQDLTLLKALVRQQLPEKYKEIFFDQSKNGYAGYIDGGASQEEFYKFIKPILEKMDGTEELLVKLNREDLLRKQRTFDNGSIPHQIHLGELHAILRRQEDFYPFLKDNREKIEKILTFRIPYYVGPLARGNSRFAWMTRKSEETITPWNFEEVVDKGASAQSFIERMTNFDKNLPNEKVLPKHSLLYEYFTVYNELTKVKYVTEGMRKPAFLSGEQKKAIVDLLFKTNRKVTVKQLKEDYFKKIECFDSVEISGVEDRFNASLGTYHDLLKIIKDKDFLDNEENEDILEDIVLTLTLFEDREMIEERLKTYAHLFDDKVMKQLKRRRYTGWGRLSRKLINGIRDKQSGKTILDFLKSDGFANRNFMQLIHDDSLTFKEDIQKAQVSGQGDSLHEHIANLAGSPAIKKGILQTVKVVDELVKVMGRHKPENIVIEMARENQTTQKGQKNSRERMKRIEEGIKELGSQILKEHPVENTQLQNEKLYLYYLQNGRDMYVDQELDINRLSDYDVDHIVPQSFLKDDSIDNKVLTRSDKARGKSDNVPSEEVVKKMKNYWRQLLNAKLITQRKFDNLTKAERGGLSELDKAGFIKRQLVETRQITKHVAQILDSRMNTKYDENDKLIREVKVITLKSKLVSDFRKDFQFYKVREINNYHHAHDAYLNAVVGTALIKKYPKLESEFVYGDYKVYDVRKMIAKSEQEIGKATAKYFFYSNIMNFFKTEITLANGEIRKRPLIETNGETGEIVWDKGRDFATVRKVLSMPQVNIVKKTEVQTGGFSKESILPKRNSDKLIARKKDWDPKKYGGFDSPTVAYSVLVVAKVEKGKSKKLKSVKELLGITIMERSSFEKNPIDFLEAKGYKEVKKDLIIKLPKYSLFELENGRKRMLASAGELQKGNELALPSKYVNFLYLASHYEKLKGSPEDNEQKQLFVEQHKHYLDEIIEQISEFSKRVILADANLDKVLSAYNKHRDKPIREQAENIIHLFTLTNLGAPAAFKYFDTTIDRKRYTSTKEVLDATLIHQSITGLYETRIDLSQLGGDGGEAAAKEAAAKEAAAKGGTLNIEDEYRLHETSKEPDVPLGSTWLSDFPQAWAETGGMGLAVRQAPLIIPLKATSTPVSIKQYPMSQEARLGIKPHIQRLLDQGILVPCQSPWNTPLLPVKKPGTNDYRPVQDLREVNKRVEDIHPTVPNPYNLLSGLPPSHQWYTVLDLKDAFFCLRLHPTSQPLFAFEWRDPEMGISGQLTWTRLPQGFKNSPTLFNEALHRDLADFRIQHPDLILLQYVDDLLLAATSEQDCQRGTRALLQTLGNLGYRASAKKAQICQKQVKYLGYLLKEGQRWLTEARKETVMGQPTPKTPRQLREFLGKAGFCRLFIPGFAEMAAPLYPLTKPGTLFNWGPDQQKAYQEIKQALLTAPALGLPDLTKPFELFVDEKQGYAKGVLTQKLGPWRRPVAYLSKKLDPVAAGWPPCLRMVAAIAVLTKDAGKLTMGQPLVILAPHAVEALVKQPPDRWLSNARMTHYQAMLLDTDRVQFGPVVALNPATLLPLPEKEAPHDCLEILAETHGTRPDLTDQPIPDADYTWYTDGSSFLQEGQRRAGAAVTTETEVIWARALPAGTSAQRAELIALTQALKMAEGKKLNVYTDSRYAFATAHVHGEIYRRRGWLTSEGREIKNKNEILALLKALFLPKRLSIIHCPGHQKGNSAEARGNRMADQAAREAAMKAVLETSTLLAGKRTADGSEFEKRTADGSEFESPKKKAKVE

SEQ ID NO: 4507 - protein, 2110 aa, synthetic construct
MPAAKRVKLDGGDKKYSIGLDIGTNSVGWAVITDEYKVPSKKFKVLGNTDRHSIKKNLIGALLFDSGETAEATRLKRTARRRYTRRKNRICYLQEIFSNEMAKVDDSFFHRLEESFLVEEDKKHERHPIFGNIVDEVAYHEKYPTIYHLRKKLVDSTDKADLRLIYLALAHMIKFRGHFLIEGDLNPDNSDVDKLFIQLVQTYNQLFEENPINASGVDAKAILSARLSKSRRLENLIAQLPGEKKNGLFGNLIALSLGLTPNFKSNFDLAEDAKLQLSKDTYDDDLDNLLAQIGDQYADLFLAAKNLSDAILLSDILRVNTEITKAPLSASMIKRYDEHHQDLTLLKALVRQQLPEKYKEIFFDQSKNGYAGYIDGGASQEEFYKFIKPILEKMDGTEELLVKLNREDLLRKQRTFDNGSIPHQIHLGELHAILRRQEDFYPFLKDNREKIEKILTFRIPYYVGPLARGNSRFAWMTRKSEETITPWNFEEVVDKGASAQSFIERMTNFDKNLPNEKVLPKHSLLYEYFTVYNELTKVKYVTEGMRKPAFLSGEQKKAIVDLLFKTNRKVTVKQLKEDYFKKIECFDSVEISGVEDRFNASLGTYHDLLKIIKDKDFLDNEENEDILEDIVLTLTLFEDREMIEERLKTYAHLFDDKVMKQLKRRRYTGWGRLSRKLINGIRDKQSGKTILDFLKSDGFANRNFMQLIHDDSLTFKEDIQKAQVSGQGDSLHEHIANLAGSPAIKKGILQTVKVVDELVKVMGRHKPENIVIEMARENQTTQKGQKNSRERMKRIEEGIKELGSQILKEHPVENTQLQNEKLYLYYLQNGRDMYVDQELDINRLSDYDVDHIVPQSFLKDDSIDNKVLTRSDKARGKSDNVPSEEVVKKMKNYWRQLLNAKLITQRKFDNLTKAERGGLSELDKAGFIKRQLVETRQITKHVAQILDSRMNTKYDENDKLIREVKVITLKSKLVSDFRKDFQFYKVREINNYHHAHDAYLNAVVGTALIKKYPKLESEFVYGDYKVYDVRKMIAKSEQEIGKATAKYFFYSNIMNFFKTEITLANGEIRKRPLIETNGETGEIVWDKGRDFATVRKVLSMPQVNIVKKTEVQTGGFSKESILPKRNSDKLIARKKDWDPKKYGGFDSPTVAYSVLVVAKVEKGKSKKLKSVKELLGITIMERSSFEKNPIDFLEAKGYKEVKKDLIIKLPKYSLFELENGRKRMLASAGELQKGNELALPSKYVNFLYLASHYEKLKGSPEDNEQKQLFVEQHKHYLDEIIEQISEFSKRVILADANLDKVLSAYNKHRDKPIREQAENIIHLFTLTNLGAPAAFKYFDTTIDRKRYTSTKEVLDATLIHQSITGLYETRIDLSQLGGDGGEAAAKEAAAKEAAAKEAAAKEAAAKGGTLNIEDEYRLHETSKEPDVSLGSTWLSDFPQAWAETGGMGLAVRQAPLIIPLKATSTPVSIKQYPMSQEARLGIKPHIQRLLDQGILVPCQSPWNTPLLPVKKPGTNDYRPVQDLREVNKRVEDIHPTVPNPYNLLSGLPPSHQWYTVLDLKDAFFCLRLHPTSQPLFAFEWRDPEMGISGQLTWTRLPQGFKNSPTLFNEALHRDLAGFRIQHPDLILLQYVDDLLLAATSELDCQQGTRALLQTLGDLGYRASAKKAQICQKQVKYLGYLLKEGQRWLTEARKETVMGQPIPKTPRQLREFLGTAGFCRLWIPGFAEMAAPLYPLTKPGTLFNWGPDQQKAFQEIKQALLTAPALGLPDLTKPFELFVDEKQGYAKGVLTQKLGPWRRPVAYLSKKLDPVAAGWPPCLRMVAAIAVLTKDAGKLTMGQPLVILAPHAVEALVKQPPDRWLSNARMTHYQALLLDTDRVQFGPVVALNPATLLPLPEEGLQHDCLDILAEAHGTRSDLMDQPLPDADHTWYTDGSSFLQEGQRKAGAAVTTETEVIWARALPAGTSAQRAELIALTQALKMAEGKKLNVYTDSRYAFATAHIHGEIYRRRGWLTSEGKEIKNKDEILALLKALFLPKRLSIIHCPGHQKGNSAEARGNRMADQAAREVATRETPETSTLLAGKRTADGSEFEKRTADGSEFESPKKKAKVE

SEQ ID NO: 4508 - protein, 2112 aa, synthetic construct
MPAAKRVKLDGGDKKYSIGLDIGTNSVGWAVITDEYKVPSKKFKVLGNTDRHSIKKNLIGALLFDSGETAEATRLKRTARRRYTRRKNRICYLQEIFSNEMAKVDDSFFHRLEESFLVEEDKKHERHPIFGNIVDEVAYHEKYPTIYHLRKKLVDSTDKADLRLIYLALAHMIKFRGHFLIEGDLNPDNSDVDKLFIQLVQTYNQLFEENPINASGVDAKAILSARLSKSRRLENLIAQLPGEKKNGLFGNLIALSLGLTPNFKSNFDLAEDAKLQLSKDTYDDDLDNLLAQIGDQYADLFLAAKNLSDAILLSDILRVNTEITKAPLSASMIKRYDEHHQDLTLLKALVRQQLPEKYKEIFFDQSKNGYAGYIDGGASQEEFYKFIKPILEKMDGTEELLVKLNREDLLRKQRTFDNGSIPHQIHLGELHAILRRQEDFYPFLKDNREKIEKILTFRIPYYVGPLARGNSRFAWMTRKSEETITPWNFEEVVDKGASAQSFIERMTNFDKNLPNEKVLPKHSLLYEYFTVYNELTKVKYVTEGMRKPAFLSGEQKKAIVDLLFKTNRKVTVKQLKEDYFKKIECFDSVEISGVEDRFNASLGTYHDLLKIIKDKDFLDNEENEDILEDIVLTLTLFEDREMIEERLKTYAHLFDDKVMKQLKRRRYTGWGRLSRKLINGIRDKQSGKTILDFLKSDGFANRNFMQLIHDDSLTFKEDIQKAQVSGQGDSLHEHIANLAGSPAIKKGILQTVKVVDELVKVMGRHKPENIVIEMARENQTTQKGQKNSRERMKRIEEGIKELGSQILKEHPVENTQLQNEKLYLYYLQNGRDMYVDQELDINRLSDYDVDHIVPQSFLKDDSIDNKVLTRSDKARGKSDNVPSEEVVKKMKNYWRQLLNAKLITQRKFDNLTKAERGGLSELDKAGFIKRQLVETRQITKHVAQILDSRMNTKYDENDKLIREVKVITLKSKLVSDFRKDFQFYKVREINNYHHAHDAYLNAVVGTALIKKYPKLESEFVYGDYKVYDVRKMIAKSEQEIGKATAKYFFYSNIMNFFKTEITLANGEIRKRPLIETNGETGEIVWDKGRDFATVRKVLSMPQVNIVKKTEVQTGGFSKESILPKRNSDKLIARKKDWDPKKYGGFDSPTVAYSVLVVAKVEKGKSKKLKSVKELLGITIMERSSFEKNPIDFLEAKGYKEVKKDLIIKLPKYSLFELENGRKRMLASAGELQKGNELALPSKYVNFLYLASHYEKLKGSPEDNEQKQLFVEQHKHYLDEIIEQISEFSKRVILADANLDKVLSAYNKHRDKPIREQAENIIHLFTLTNLGAPAAFKYFDTTIDRKRYTSTKEVLDATLIHQSITGLYETRIDLSQLGGDGGPAPAPAPGGTLNIEDEYRLHETSKEPDVSLGSTWLSDFPQAWAETGGMGLAVRQAPLIIPLKATSTPVSIKQYPMSQEARLGIKPHIQRLLDQGILVPCQSPWNTPLLPVKKPGTNDYRPVQDLREVNKRVEDIHPTVPNPYNLLSGLPPSHQWYTVLDLKDAFFCLRLHPTSQPLFAFEWRDPEMGISGQLTWTRLPQGFKNSPTLFNEALHRDLADFRIQHPDLILLQYVDDLLLAATSELDCQQGTRALLQTLGNLGYRASAKKAQICQKQVKYLGYLLKEGQRWLTEARKETVMGQPTPKTPRQLREFLGKAGFCRLFIPGFAEMAAPLYPLTKPGTLFNWGPDQQKAYQEIKQALLTAPALGLPDLTKPFELFVDEKQGYAKGVLTQKLGPWRRPVAYLSKKLDPVAAGWPPCLRMVAAIAVLTKDAGKLTMGQPLVILAPHAVEALVKQPPDRWLSNARMTHYQALLLDTDRVQFGPVVALNPATLLPLPEEGLQHNCLDILAEAHGTRPDLTDQPLPDADHTWYTDGSSLLQEGQRKAGAAVTTETEVIWAKALPAGTSAQRAELIALTQALKMAEGKKLNVYTDSRYAFATAHIHGEIYRRRGWLTSEGKEIKNKDEILALLKALFLPKRLSIIHCPGHQKGHSAEARGNRMADQAARKAAITETPDTSTLLIENSSPSGGSKRTADGSEFEAGKRTADGSEFEKRTADGSEFESPKKKAKVE

SEQ ID NO: 4509 - protein, 2096 aa, synthetic construct
MPAAKRVKLDGGDKKYSIGLDIGTNSVGWAVITDEYKVPSKKFKVLGNTDRHSIKKNLIGALLFDSGETAEATRLKRTARRRYTRRKNRICYLQEIFSNEMAKVDDSFFHRLEESFLVEEDKKHERHPIFGNIVDEVAYHEKYPTIYHLRKKLVDSTDKADLRLIYLALAHMIKFRGHFLIEGDLNPDNSDVDKLFIQLVQTYNQLFEENPINASGVDAKAILSARLSKSRRLENLIAQLPGEKKNGLFGNLIALSLGLTPNFKSNFDLAEDAKLQLSKDTYDDDLDNLLAQIGDQYADLFLAAKNLSDAILLSDILRVNTEITKAPLSASMIKRYDEHHQDLTLLKALVRQQLPEKYKEIFFDQSKNGYAGYIDGGASQEEFYKFIKPILEKMDGTEELLVKLNREDLLRKQRTFDNGSIPHQIHLGELHAILRRQEDFYPFLKDNREKIEKILTFRIPYYVGPLARGNSRFAWMTRKSEETITPWNFEEVVDKGASAQSFIERMTNFDKNLPNEKVLPKHSLLYEYFTVYNELTKVKYVTEGMRKPAFLSGEQKKAIVDLLFKTNRKVTVKQLKEDYFKKIECFDSVEISGVEDRFNASLGTYHDLLKIIKDKDFLDNEENEDILEDIVLTLTLFEDREMIEERLKTYAHLFDDKVMKQLKRRRYTGWGRLSRKLINGIRDKQSGKTILDFLKSDGFANRNFMQLIHDDSLTFKEDIQKAQVSGQGDSLHEHIANLAGSPAIKKGILQTVKVVDELVKVMGRHKPENIVIEMARENQTTQKGQKNSRERMKRIEEGIKELGSQILKEHPVENTQLQNEKLYLYYLQNGRDMYVDQELDINRLSDYDVDHIVPQSFLKDDSIDNKVLTRSDKARGKSDNVPSEEVVKKMKNYWRQLLNAKLITQRKFDNLTKAERGGLSELDKAGFIKRQLVETRQITKHVAQILDSRMNTKYDENDKLIREVKVITLKSKLVSDFRKDFQFYKVREINNYHHAHDAYLNAVVGTALIKKYPKLESEFVYGDYKVYDVRKMIAKSEQEIGKATAKYFFYSNIMNFFKTEITLANGEIRKRPLIETNGETGEIVWDKGRDFATVRKVLSMPQVNIVKKTEVQTGGFSKESILPKRNSDKLIARKKDWDPKKYGGFDSPTVAYSVLVVAKVEKGKSKKLKSVKELLGITIMERSSFEKNPIDFLEAKGYKEVKKDLIIKLPKYSLFELENGRKRMLASAGELQKGNELALPSKYVNFLYLASHYEKLKGSPEDNEQKQLFVEQHKHYLDEIIEQISEFSKRVILADANLDKVLSAYNKHRDKPIREQAENIIHLFTLTNLGAPAAFKYFDTTIDRKRYTSTKEVLDATLIHQSITGLYETRIDLSQLGGDGGPAPAPAPAPAPAPGGVLNLEEEYRLHEKPVPSSIDPSWLQLFPTVWAERAGMGLANQVPPVVVELRSGASPVAVRQYPMSKEAREGIRPHIQRFLDLGVLVPCQSPWNTPLLPVKKPGTNDYRPVQDLREINKRVQDIHPTVPNPYNLLSSLPPSHTWYSVLDLKDAFFCLKLHPNSQPLFAFEWRDPEKGNTGQLTWTRLPQGFKNSPTLFNEALHRDLAPFRALNPQVVLLQYVDDLLVAAPTYRDCKEGTQKLLQELSKLGYRVSAKKAQLCQKEVTYLGYLLKEGKRWLTPARKATVMKIPPPTTPRQVREFLGTAGFCRLWIPGFASLAAPLYPLTKPSIPFIWTEEHQKAFDRIKEALLSAPALALPDLTKPFTLYVDERAGVARGVLTQTLGPWRRPVAYLSKKLDPVASGWPTCLKAVAAVALLLKDADKLTLGQNVTVIASHSLESIVRQPPDRWMTNARMTHYQSLLLNERVSFAPPAVLNPATLLPVESEATPVHRCSEILAEETGTRRDLKDQPLPGVPAWYTDGSSFIAEGKRRAGAAIVDGKRTVWASSLPEGTSAQKAELVALTQALRLAEGKDINIYTDSRYAFATAHIHGAIYKQRGWLTSAGKDIKNKEEILALLEAIHLPKRVAIIHCPGHQKGNDPVATGNRRADEAAKQAALSTRVLAETTKPAGKRTADGSEFEKRTADGSEFESPKKKAKVE

SEQ ID NO: 4510 - protein, 2098 aa, synthetic construct
MPAAKRVKLDGGDKKYSIGLDIGTNSVGWAVITDEYKVPSKKFKVLGNTDRHSIKKNLIGALLFDSGETAEATRLKRTARRRYTRRKNRICYLQEIFSNEMAKVDDSFFHRLEESFLVEEDKKHERHPIFGNIVDEVAYHEKYPTIYHLRKKLVDSTDKADLRLIYLALAHMIKFRGHFLIEGDLNPDNSDVDKLFIQLVQTYNQLFEENPINASGVDAKAILSARLSKSRRLENLIAQLPGEKKNGLFGNLIALSLGLTPNFKSNFDLAEDAKLQLSKDTYDDDLDNLLAQIGDQYADLFLAAKNLSDAILLSDILRVNTEITKAPLSASMIKRYDEHHQDLTLLKALVRQQLPEKYKEIFFDQSKNGYAGYIDGGASQEEFYKFIKPILEKMDGTEELLVKLNREDLLRKQRTFDNGSIPHQIHLGELHAILRRQEDFYPFLKDNREKIEKILTFRIPYYVGPLARGNSRFAWMTRKSEETITPWNFEEVVDKGASAQSFIERMTNFDKNLPNEKVLPKHSLLYEYFTVYNELTKVKYVTEGMRKPAFLSGEQKKAIVDLLFKTNRKVTVKQLKEDYFKKIECFDSVEISGVEDRFNASLGTYHDLLKIIKDKDFLDNEENEDILEDIVLTLTLFEDREMIEERLKTYAHLFDDKVMKQLKRRRYTGWGRLSRKLINGIRDKQSGKTILDFLKSDGFANRNFMQLIHDDSLTFKEDIQKAQVSGQGDSLHEHIANLAGSPAIKKGILQTVKVVDELVKVMGRHKPENIVIEMARENQTTQKGQKNSRERMKRIEEGIKELGSQILKEHPVENTQLQNEKLYLYYLQNGRDMYVDQELDINRLSDYDVDHIVPQSFLKDDSIDNKVLTRSDKARGKSDNVPSEEVVKKMKNYWRQLLNAKLITQRKFDNLTKAERGGLSELDKAGFIKRQLVETRQITKHVAQILDSRMNTKYDENDKLIREVKVITLKSKLVSDFRKDFQFYKVREINNYHHAHDAYLNAVVGTALIKKYPKLESEFVYGDYKVYDVRKMIAKSEQEIGKATAKYFFYSNIMNFFKTEITLANGEIRKRPLIETNGETGEIVWDKGRDFATVRKVLSMPQVNIVKKTEVQTGGFSKESILPKRNSDKLIARKKDWDPKKYGGFDSPTVAYSVLVVAKVEKGKSKKLKSVKELLGITIMERSSFEKNPIDFLEAKGYKEVKKDLIIKLPKYSLFELENGRKRMLASAGELQKGNELALPSKYVNFLYLASHYEKLKGSPEDNEQKQLFVEQHKHYLDEIIEQISEFSKRVILADANLDKVLSAYNKHRDKPIREQAENIIHLFTLTNLGAPAAFKYFDTTIDRKRYTSTKEVLDATLIHQSITGLYETRIDLSQLGGDGGPAPAPAPAPAPAPGGTLNIEDEYRLHETSKEPDVPLGSTWLSDFPQAWAETGGMGLAVRQAPLIIPLKATSTPVSIKQYPMSQEARLGIKPHIQRLLDQGILVPCQSPWNTPLLPVKKPGTNDYRPVQDLREVNKRVEDIHPTVPNPYNLLSGLPPSHQWYTVLDLKDAFFCLRLHPTSQPLFAFEWRDPEMGISGQLTWTRLPQGFKNSPTLFNEALHRDLADFRIQHPDLILLQYVDDLLLAATSEQDCQRGTRALLQTLGNLGYRASAKKAQICQKQVKYLGYLLKEGQRWLTEARKETVMGQPTPKTPRQLREFLGTAGFCRLWIPGFAEMAAPLYPLTKPGTLFNWGPDQQKAYQEIKQALLTAPALGLPDLTKPFELFVDEKQGYAKGVLTQKLGPWRRPVAYLSKKLDPVAAGWPPCLRMVAAIAVLTKDAGKLTMGQPLVILAPHAVEALVKQPPDRWLSNARMTHYQAMLLDTDRVQFGPVVALNPATLLPLPEKEAPHDCLEILAETHGTRPDLTDQPIPDADYTWYTDGSSFLQEGQRRAGAAVTTETEVIWARALPAGTSAQRAELIALTQALKMAEGKKLNVYTDSRYAFATAHVHGEIYRRRGWLTSEGREIKNKNEILALLKALFLPKRLSIIHCPGHQKGNSAEARGNRMADQAAREAAMKAVLETSTLLAGKRTADGSEFEKRTADGSEFESPKKKAKVE

SEQ ID NO: 4511 - protein, 2091 aa, synthetic construct
MPAAKRVKLDGGDKKYSIGLDIGTNSVGWAVITDEYKVPSKKFKVLGNTDRHSIKKNLIGALLFDSGETAEATRLKRTARRRYTRRKNRICYLQEIFSNEMAKVDDSFFHRLEESFLVEEDKKHERHPIFGNIVDEVAYHEKYPTIYHLRKKLVDSTDKADLRLIYLALAHMIKFRGHFLIEGDLNPDNSDVDKLFIQLVQTYNQLFEENPINASGVDAKAILSARLSKSRRLENLIAQLPGEKKNGLFGNLIALSLGLTPNFKSNFDLAEDAKLQLSKDTYDDDLDNLLAQIGDQYADLFLAAKNLSDAILLSDILRVNTEITKAPLSASMIKRYDEHHQDLTLLKALVRQQLPEKYKEIFFDQSKNGYAGYIDGGASQEEFYKFIKPILEKMDGTEELLVKLNREDLLRKQRTFDNGSIPHQIHLGELHAILRRQEDFYPFLKDNREKIEKILTFRIPYYVGPLARGNSRFAWMTRKSEETITPWNFEEVVDKGASAQSFIERMTNFDKNLPNEKVLPKHSLLYEYFTVYNELTKVKYVTEGMRKPAFLSGEQKKAIVDLLFKTNRKVTVKQLKEDYFKKIECFDSVEISGVEDRFNASLGTYHDLLKIIKDKDFLDNEENEDILEDIVLTLTLFEDREMIEERLKTYAHLFDDKVMKQLKRRRYTGWGRLSRKLINGIRDKQSGKTILDFLKSDGFANRNFMQLIHDDSLTFKEDIQKAQVSGQGDSLHEHIANLAGSPAIKKGILQTVKVVDELVKVMGRHKPENIVIEMARENQTTQKGQKNSRERMKRIEEGIKELGSQILKEHPVENTQLQNEKLYLYYLQNGRDMYVDQELDINRLSDYDVDHIVPQSFLKDDSIDNKVLTRSDKARGKSDNVPSEEVVKKMKNYWRQLLNAKLITQRKFDNLTKAERGGLSELDKAGFIKRQLVETRQITKHVAQILDSRMNTKYDENDKLIREVKVITLKSKLVSDFRKDFQFYKVREINNYHHAHDAYLNAVVGTALIKKYPKLESEFVYGDYKVYDVRKMIAKSEQEIGKATAKYFFYSNIMNFFKTEITLANGEIRKRPLIETNGETGEIVWDKGRDFATVRKVLSMPQVNIVKKTEVQTGGFSKESILPKRNSDKLIARKKDWDPKKYGGFDSPTVAYSVLVVAKVEKGKSKKLKSVKELLGITIMERSSFEKNPIDFLEAKGYKEVKKDLIIKLPKYSLFELENGRKRMLASAGELQKGNELALPSKYVNFLYLASHYEKLKGSPEDNEQKQLFVEQHKHYLDEIIEQISEFSKRVILADANLDKVLSAYNKHRDKPIREQAENIIHLFTLTNLGAPAAFKYFDTTIDRKRYTSTKEVLDATLIHQSITGLYETRIDLSQLGGDGGGGGGGSGGLGIEDEYRLHETSTEPDVSLGSTWLSDFPQAWAETGGMGLAVRQAPLIIPLKATSTPVSIQQYPMSHEARLGIKPHIQRLLDQGILVPCQSPWNTPLLPVKKPGTNDYRPVQDLREVNKRVEDIHPTVPNPYNLLSGLPPSHQWYTVLDLKDAFFCLRLHPTSQPLFAFEWRDPGMGISGQLTWTRLPQGFKNSPTLFNEALHRDLADFRIQHPDLILLQYVDDILLAATSELDCQQGTRALLQTLGDLGYRASAKKAQICQKQVKYLGYLLREGQRWLTEARKETVMGQPVPKTPRQLREFLGKAGFCRLFIPGFAEMAAPLYPLTKPGTLFSWGPDQQKAYQEIKQALLTAPALGLPDLTKPFELFVDEKQGYAKGVLTQKLGPWRRPVAYLSKKLDPVAAGWPPCLRMVAAIAVLTKDAGKLTMGQPLVILAPHAVEALVKQPPDRWLSNARMTHYQAMLLDTDRVQFGPVVALNPATLLPLPEEGAPHDCLEILAETHGTRPDLTDQPIPDADHTWYTDGSSFLQEGQRKAGAAVTTETEVIWAGALPAGTSAQRAELIALTQALKMAEGKRLNVYTDSRYAFATAHIHGEIYRRRGWLTSEGREIKNKSEILALLKALFLPKRLSIIHCLGHQKGDSAEARGNRLADQAAREAAIKTPPDTSTLLIAGKRTADGSEFEKRTADGSEFESPKKKAKVE

SEQ ID NO: 4512 - protein, 2093 aa, synthetic construct
MPAAKRVKLDGGDKKYSIGLDIGTNSVGWAVITDEYKVPSKKFKVLGNTDRHSIKKNLIGALLFDSGETAEATRLKRTARRRYTRRKNRICYLQEIFSNEMAKVDDSFFHRLEESFLVEEDKKHERHPIFGNIVDEVAYHEKYPTIYHLRKKLVDSTDKADLRLIYLALAHMIKFRGHFLIEGDLNPDNSDVDKLFIQLVQTYNQLFEENPINASGVDAKAILSARLSKSRRLENLIAQLPGEKKNGLFGNLIALSLGLTPNFKSNFDLAEDAKLQLSKDTYDDDLDNLLAQIGDQYADLFLAAKNLSDAILLSDILRVNTEITKAPLSASMIKRYDEHHQDLTLLKALVRQQLPEKYKEIFFDQSKNGYAGYIDGGASQEEFYKFIKPILEKMDGTEELLVKLNREDLLRKQRTFDNGSIPHQIHLGELHAILRRQEDFYPFLKDNREKIEKILTFRIPYYVGPLARGNSRFAWMTRKSEETITPWNFEEVVDKGASAQSFIERMTNFDKNLPNEKVLPKHSLLYEYFTVYNELTKVKYVTEGMRKPAFLSGEQKKAIVDLLFKTNRKVTVKQLKEDYFKKIECFDSVEISGVEDRFNASLGTYHDLLKIIKDKDFLDNEENEDILEDIVLTLTLFEDREMIEERLKTYAHLFDDKVMKQLKRRRYTGWGRLSRKLINGIRDKQSGKTILDFLKSDGFANRNFMQLIHDDSLTFKEDIQKAQVSGQGDSLHEHIANLAGSPAIKKGILQTVKVVDELVKVMGRHKPENIVIEMARENQTTQKGQKNSRERMKRIEEGIKELGSQILKEHPVENTQLQNEKLYLYYLQNGRDMYVDQELDINRLSDYDVDHIVPQSFLKDDSIDNKVLTRSDKARGKSDNVPSEEVVKKMKNYWRQLLNAKLITQRKFDNLTKAERGGLSELDKAGFIKRQLVETRQITKHVAQILDSRMNTKYDENDKLIREVKVITLKSKLVSDFRKDFQFYKVREINNYHHAHDAYLNAVVGTALIKKYPKLESEFVYGDYKVYDVRKMIAKSEQEIGKATAKYFFYSNIMNFFKTEITLANGEIRKRPLIETNGETGEIVWDKGRDFATVRKVLSMPQVNIVKKTEVQTGGFSKESILPKRNSDKLIARKKDWDPKKYGGFDSPTVAYSVLVVAKVEKGKSKKLKSVKELLGITIMERSSFEKNPIDFLEAKGYKEVKKDLIIKLPKYSLFELENGRKRMLASAGELQKGNELALPSKYVNFLYLASHYEKLKGSPEDNEQKQLFVEQHKHYLDEIIEQISEFSKRVILADANLDKVLSAYNKHRDKPIREQAENIIHLFTLTNLGAPAAFKYFDTTIDRKRYTSTKEVLDATLIHQSITGLYETRIDLSQLGGDGGEAAAKGSSGGLGIEDEYRLHETSTEPDVSLGSTWLSDFPQAWAETGGMGLAVRQAPLIIPLKATSTPVSIQQYPMSHEARLGIKPHIQRLLDQGILVPCQSPWNTPLLPVKKPGTNDYRPVQDLREVNKRVEDIHPTVPNPYNLLSGLPPSHQWYTVLDLKDAFFCLRLHPTSQPLFAFEWRDPGMGISGQLTWTRLPQGFKNSPTLFNEALHRDLADFRIQHPDLILLQYVDDILLAATSELDCQQGTRALLQTLGDLGYRASAKKAQICQKQVKYLGYLLREGQRWLTEARKETVMGQPVPKTPRQLREFLGKAGFCRLFIPGFAEMAAPLYPLTKPGTLFSWGPDQQKAYQEIKQALLTAPALGLPDLTKPFELFVDEKQGYAKGVLTQKLGPWRRPVAYLSKKLDPVAAGWPPCLRMVAAIAVLTKDAGKLTMGQPLVILAPHAVEALVKQPPDRWLSNARMTHYQAMLLDTDRVQFGPVVALNPATLLPLPEEGAPHDCLEILAETHGTRPDLTDQPIPDADHTWYTDGSSFLQEGQRKAGAAVTTETEVIWAGALPAGTSAQRAELIALTQALKMAEGKRLNVYTDSRYAFATAHIHGEIYRRRGWLTSEGREIKNKSEILALLKALFLPKRLSIIHCLGHQKGDSAEARGNRLADQAAREAAIKTPPDTSTLLIAGKRTADGSEFEKRTADGSEFESPKKKAKVE

SEQ ID NO: 4513 - protein, 2091 aa, synthetic construct
MPAAKRVKLDGGDKKYSIGLDIGTNSVGWAVITDEYKVPSKKFKVLGNTDRHSIKKNLIGALLFDSGETAEATRLKRTARRRYTRRKNRICYLQEIFSNEMAKVDDSFFHRLEESFLVEEDKKHERHPIFGNIVDEVAYHEKYPTIYHLRKKLVDSTDKADLRLIYLALAHMIKFRGHFLIEGDLNPDNSDVDKLFIQLVQTYNQLFEENPINASGVDAKAILSARLSKSRRLENLIAQLPGEKKNGLFGNLIALSLGLTPNFKSNFDLAEDAKLQLSKDTYDDDLDNLLAQIGDQYADLFLAAKNLSDAILLSDILRVNTEITKAPLSASMIKRYDEHHQDLTLLKALVRQQLPEKYKEIFFDQSKNGYAGYIDGGASQEEFYKFIKPILEKMDGTEELLVKLNREDLLRKQRTFDNGSIPHQIHLGELHAILRRQEDFYPFLKDNREKIEKILTFRIPYYVGPLARGNSRFAWMTRKSEETITPWNFEEVVDKGASAQSFIERMTNFDKNLPNEKVLPKHSLLYEYFTVYNELTKVKYVTEGMRKPAFLSGEQKKAIVDLLFKTNRKVTVKQLKEDYFKKIECFDSVEISGVEDRFNASLGTYHDLLKIIKDKDFLDNEENEDILEDIVLTLTLFEDREMIEERLKTYAHLFDDKVMKQLKRRRYTGWGRLSRKLINGIRDKQSGKTILDFLKSDGFANRNFMQLIHDDSLTFKEDIQKAQVSGQGDSLHEHIANLAGSPAIKKGILQTVKVVDELVKVMGRHKPENIVIEMARENQTTQKGQKNSRERMKRIEEGIKELGSQILKEHPVENTQLQNEKLYLYYLQNGRDMYVDQELDINRLSDYDVDHIVPQSFLKDDSIDNKVLTRSDKARGKSDNVPSEEVVKKMKNYWRQLLNAKLITQRKFDNLTKAERGGLSELDKAGFIKRQLVETRQITKHVAQILDSRMNTKYDENDKLIREVKVITLKSKLVSDFRKDFQFYKVREINNYHHAHDAYLNAVVGTALIKKYPKLESEFVYGDYKVYDVRKMIAKSEQEIGKATAKYFFYSNIMNFFKTEITLANGEIRKRPLIETNGETGEIVWDKGRDFATVRKVLSMPQVNIVKKTEVQTGGFSKESILPKRNSDKLIARKKDWDPKKYGGFDSPTVAYSVLVVAKVEKGKSKKLKSVKELLGITIMERSSFEKNPIDFLEAKGYKEVKKDLIIKLPKYSLFELENGRKRMLASAGELQKGNELALPSKYVNFLYLASHYEKLKGSPEDNEQKQLFVEQHKHYLDEIIEQISEFSKRVILADANLDKVLSAYNKHRDKPIREQAENIIHLFTLTNLGAPAAFKYFDTTIDRKRYTSTKEVLDATLIHQSITGLYETRIDLSQLGGDGGPAPGSSGGTLNIEDEHRLHETSKEPDVSLGSTWLSDFPQAWAETGGMGLAVRQAPLIIPLKATSTPVSIKQYPMSQEARLGIKPHIQRLLDQGILVPCQSPWNTPLLPVKKPGTNDYRPVQDLREVNKRVEDIHPTVPNPYNLLSGLPPSHQWYTVLDLKDAFFCLRLHPTSQPLFAFEWRDPEMGISGQLTWTRLPQGFKNSPTLFNEALHRDLADFRIQHPDLILLQYVDDLLLAATSELDCQQGTRALLQTLGNLGYRASAKKAQICQKQVKYLGYLLKEGQRWLTEARKETVMGQPTPKTPRQLREFLGKAGFCRLFIPGFAEMAAPLYPLTKPGTLFNWGPDQQKAYQEIKQALLTAPALGLPDLTKPFELFVDEKQGYAKGVLTQKLGPWRRPVAYLSKKLDPVAAGWPPCLRMVAAIAVLTKDAGKLTMGQPLVILAPHAVEALVKQPPDRWLSNARMTHYQALLLDTDRVQFGPVVALNPATLLPLPEEGLQHNCLDILAEAHGTRPDLTDQPLPDADHTWYTDGSSLLQEGQRKAGAAVTTETEVIWAKALPAGTSAQRAELIALTQALKMAEGKKLNVYTDSRYAFATAHIHGEIYRRRGWLTSEGKEIKNKDEILALLKALFLPKRLSIIHCPGHQKGHSAEARGNRMADQAARKAAITETPDTSTLLAGKRTADGSEFEKRTADGSEFESPKKKAKVE

SEQ ID NO: 4514 - protein, 2091 aa, synthetic construct; identical to SEQ ID NO: 4513

SEQ ID NO: 4515 - protein, 2091 aa, synthetic construct
MPAAKRVKLDGGDKKYSIGLDIGTNSVGWAVITDEYKVPSKKFKVLGNTDRHSIKKNLIGALLFDSGETAEATRLKRTARRRYTRRKNRICYLQEIFSNEMAKVDDSFFHRLEESFLVEEDKKHERHPIFGNIVDEVAYHEKYPTIYHLRKKLVDSTDKADLRLIYLALAHMIKFRGHFLIEGDLNPDNSDVDKLFIQLVQTYNQLFEENPINASGVDAKAILSARLSKSRRLENLIAQLPGEKKNGLFGNLIALSLGLTPNFKSNFDLAEDAKLQLSKDTYDDDLDNLLAQIGDQYADLFLAAKNLSDAILLSDILRVNTEITKAPLSASMIKRYDEHHQDLTLLKALVRQQLPEKYKEIFFDQSKNGYAGYIDGGASQEEFYKFIKPILEKMDGTEELLVKLNREDLLRKQRTFDNGSIPHQIHLGELHAILRRQEDFYPFLKDNREKIEKILTFRIPYYVGPLARGNSRFAWMTRKSEETITPWNFEEVVDKGASAQSFIERMTNFDKNLPNEKVLPKHSLLYEYFTVYNELTKVKYVTEGMRKPAFLSGEQKKAIVDLLFKTNRKVTVKQLKEDYFKKIECFDSVEISGVEDRFNASLGTYHDLLKIIKDKDFLDNEENEDILEDIVLTLTLFEDREMIEERLKTYAHLFDDKVMKQLKRRRYTGWGRLSRKLINGIRDKQSGKTILDFLKSDGFANRNFMQLIHDDSLTFKEDIQKAQVSGQGDSLHEHIANLAGSPAIKKGILQTVKVVDELVKVMGRHKPENIVIEMARENQTTQKGQKNSRERMKRIEEGIKELGSQILKEHPVENTQLQNEKLYLYYLQNGRDMYVDQELDINRLSDYDVDHIVPQSFLKDDSIDNKVLTRSDKARGKSDNVPSEEVVKKMKNYWRQLLNAKLITQRKFDNLTKAERGGLSELDKAGFIKRQLVETRQITKHVAQILDSRMNTKYDENDKLIREVKVITLKSKLVSDFRKDFQFYKVREINNYHHAHDAYLNAVVGTALIKKYPKLESEFVYGDYKVYDVRKMIAKSEQEIGKATAKYFFYSNIMNFFKTEITLANGEIRKRPLIETNGETGEIVWDKGRDFATVRKVLSMPQVNIVKKTEVQTGGFSKESILPKRNSDKLIARKKDWDPKKYGGFDSPTVAYSVLVVAKVEKGKSKKLKSVKELLGITIMERSSFEKNPIDFLEAKGYKEVKKDLIIKLPKYSLFELENGRKRMLASAGELQKGNELALPSKYVNFLYLASHYEKLKGSPEDNEQKQLFVEQHKHYLDEIIEQISEFSKRVILADANLDKVLSAYNKHRDKPIREQAENIIHLFTLTNLGAPAAFKYFDTTIDRKRYTSTKEVLDATLIHQSITGLYETRIDLSQLGGDGGEAAAKPAPGGVLNLEEEYRLHEKPVPSSIDPSWLQLFPTVWAERAGMGLANQVPPVVVELRSGASPVAVRQYPMSKEAREGIRPHIQRFLDLGVLVPCQSPWNTPLLPVKKPGTNDYRPVQDLREINKRVQDIHPTVPNPYNLLSSLPPSHTWYSVLDLKDAFFCLKLHPNSQPLFAFEWRDPEKGNTGQLTWTRLPQGFKNSPTLFNEALHRDLAPFRALNPQVVLLQYVDDLLVAAPTYRDCKEGTQKLLQELSKLGYRVSAKKAQLCQKEVTYLGYLLKEGKRWLTPARKATVMKIPPPTTPRQVREFLGKAGFCRLFIPGFASLAAPLYPLTKPSIPFIWTEEHQKAFDRIKEALLSAPALALPDLTKPFTLYVDERAGVARGVLTQTLGPWRRPVAYLSKKLDPVASGWPTCLKAVAAVALLLKDADKLTLGQNVTVIASHSLESIVRQPPDRWMTNARMTHYQSLLLNERVSFAPPAVLNPATLLPVESEATPVHRCSEILAEETGTRRDLKDQPLPGVPAWYTDGSSFIAEGKRRAGAAIVDGKRTVWASSLPEGTSAQKAELVALTQALRLAEGKDINIYTDSRYAFATAHIHGAIYKQRGWLTSAGKDIKNKEEILALLEAIHLPKRVAIIHCPGHQKGNDPVATGNRRADEAAKQAALSTRVLAETTKPAGKRTADGSEFEKRTADGSEFESPKKKAKVE

SEQ ID NO: 4516 - protein, 2093 aa, synthetic construct
MPAAKRVKLDGGDKKYSIGLDIGTNSVGWAVITDEYKVPSKKFKVLGNTDRHSIKKNLIGALLFDSGETAEATRLKRTARRRYTRRKNRICYLQEIFSNEMAKVDDSFFHRLEESFLVEEDKKHERHPIFGNIVDEVAYHEKYPTIYHLRKKLVDSTDKADLRLIYLALAHMIKFRGHFLIEGDLNPDNSDVDKLFIQLVQTYNQLFEENPINASGVDAKAILSARLSKSRRLENLIAQLPGEKKNGLFGNLIALSLGLTPNFKSNFDLAEDAKLQLSKDTYDDDLDNLLAQIGDQYADLFLAAKNLSDAILLSDILRVNTEITKAPLSASMIKRYDEHHQDLTLLKALVRQQLPEKYKEIFFDQSKNGYAGYIDGGASQEEFYKFIKPILEKMDGTEELLVKLNREDLLRKQRTFDNGSIPHQIHLGELHAILRRQEDFYPFLKDNREKIEKILTFRIPYYVGPLARGNSRFAWMTRKSEETITPWNFEEVVDKGASAQSFIERMTNFDKNLPNEKVLPKHSLLYEYFTVYNELTKVKYVTEGMRKPAFLSGEQKKAIVDLLFKTNRKVTVKQLKEDYFKKIECFDSVEISGVEDRFNASLGTYHDLLKIIKDKDFLDNEENEDILEDIVLTLTLFEDREMIEERLKTYAHLFDDKVMKQLKRRRYTGWGRLSRKLINGIRDKQSGKTILDFLKSDGFANRNFMQLIHDDSLTFKEDIQKAQVSGQGDSLHEHIANLAGSPAIKKGILQTVKVVDELVKVMGRHKPENIVIEMARENQTTQKGQKNSRERMKRIEEGIKELGSQILKEHPVENTQLQNEKLYLYYLQNGRDMYVDQELDINRLSDYDVDHIVPQSFLKDDSIDNKVLTRSDKARGKSDNVPSEEVVKKMKNYWRQLLNAKLITQRKFDNLTKAERGGLSELDKAGFIKRQLVETRQITKHVAQILDSRMNTKYDENDKLIREVKVITLKSKLVSDFRKDFQFYKVREINNYHHAHDAYLNAVVGTALIKKYPKLESEFVYGDYKVYDVRKMIAKSEQEIGKATAKYFFYSNIMNFFKTEITLANGEIRKRPLIETNGETGEIVWDKGRDFATVRKVLSMPQVNIVKKTEVQTGGFSKESILPKRNSDKLIARKKDWDPKKYGGFDSPTVAYSVLVVAKVEKGKSKKLKSVKELLGITIMERSSFEKNPIDFLEAKGYKEVKKDLIIKLPKYSLFELENGRKRMLASAGELQKGNELALPSKYVNFLYLASHYEKLKGSPEDNEQKQLFVEQHKHYLDEIIEQISEFSKRVILADANLDKVLSAYNKHRDKPIREQAENIIHLFTLTNLGAPAAFKYFDTTIDRKRYTSTKEVLDATLIHQSITGLYETRIDLSQLGGDGGPAPEAAAKGGLGIEDEYRLHETSTEPDVSLGSTWLSDFPQAWAETGGMGLAVRQAPLIIPLKATSTPVSIQQYPMSHEARLGIKPHIQRLLDQGILVPCQSPWNTPLLPVKKPGTNDYRPVQDLREVNKRVEDIHPTVPNPYNLLSGLPPSHQWYTVLDLKDAFFCLRLHPTSQPLFAFEWRDPGMGISGQLTWTRLPQGFKNSPTLFNEALHRDLADFRIQHPDLILLQYVDDILLAATSELDCQQGTRALLQTLGDLGYRASAKKAQICQKQVKYLGYLLREGQRWLTEARKETVMGQPVPKTPRQLREFLGKAGFCRLFIPGFAEMAAPLYPLTKPGTLFSWGPDQQKAYQEIKQALLTAPALGLPDLTKPFELFVDEKQGYAKGVLTQKLGPWRRPVAYLSKKLDPVAAGWPPCLRMVAAIAVLTKDAGKLTMGQPLVILAPHAVEALVKQPPDRWLSNARMTHYQAMLLDTDRVQFGPVVALNPATLLPLPEEGAPHDCLEILAETHGTRPDLTDQPIPDADHTWYTDGSSFLQEGQRKAGAAVTTETEVIWAGALPAGTSAQRAELIALTQALKMAEGKRLNVYTDSRYAFATAHIHGEIYRRRGWLTSEGREIKNKSEILALLKALFLPKRLSIIHCLGHQKGDSAEARGNRLADQAAREAAIKTPPDTSTLLIAGKRTADGSEFEKRTADGSEFESPKKKAKVE

SEQ ID NO: 4517 - protein, 2094 aa, synthetic construct
MPAAKRVKLDGGDKKYSIGLDIGTNSVGWAVITDEYKVPSKKFKVLGNTDRHSIKKNLIGALLFDSGETAEATRLKRTARRRYTRRKNRICYLQEIFSNEMAKVDDSFFHRLEESFLVEEDKKHERHPIFGNIVDEVAYHEKYPTIYHLRKKLVDSTDKADLRLIYLALAHMIKFRGHFLIEGDLNPDNSDVDKLFIQLVQTYNQLFEENPINASGVDAKAILSARLSKSRRLENLIAQLPGEKKNGLFGNLIALSLGLTPNFKSNFDLAEDAKLQLSKDTYDDDLDNLLAQIGDQYADLFLAAKNLSDAILLSDILRVNTEITKAPLSASMIKRYDEHHQDLTLLKALVRQQLPEKYKEIFFDQSKNGYAGYIDGGASQEEFYKFIKPILEKMDGTEELLVKLNREDLLRKQRTFDNGSIPHQIHLGELHAILRRQEDFYPFLKDNREKIEKILTFRIPYYVGPLARGNSRFAWMTRKSEETITPWNFEEVVDKGASAQSFIERMTNFDKNLPNEKVLPKHSLLYEYFTVYNELTKVKYVTEGMRKPAFLSGEQKKAIVDLLFKTNRKVTVKQLKEDYFKKIECFDSVEISGVEDRFNASLGTYHDLLKIIKDKDFLDNEENEDILEDIVLTLTLFEDREMIEERLKTYAHLFDDKVMKQLKRRRYTGWGRLSRKLINGIRDKQSGKTILDFLKSDGFANRNFMQLIHDDSLTFKEDIQKAQVSGQGDSLHEHIANLAGSPAIKKGILQTVKVVDELVKVMGRHKPENIVIEMARENQTTQKGQKNSRERMKRIEEGIKELGSQILKEHPVENTQLQNEKLYLYYLQNGRDMYVDQELDINRLSDYDVDHIVPQSFLKDDSIDNKVLTRSDKARGKSDNVPSEEVVKKMKNYWRQLLNAKLITQRKFDNLTKAERGGLSELDKAGFIKRQLVETRQITKHVAQILDSRMNTKYDENDKLIREVKVITLKSKLVSDFRKDFQFYKVREINNYHHAHDAYLNAVVGTALIKKYPKLESEFVYGDYKVYDVRKMIAKSEQEIGKATAKYFFYSNIMNFFKTEITLANGEIRKRPLIETNGETGEIVWDKGRDFATVRKVLSMPQVNIVKKTEVQTGGFSKESILPKRNSDKLIARKKDWDPKKYGGFDSPTVAYSVLVVAKVEKGKSKKLKSVKELLGITIMERSSFEKNPIDFLEAKGYKEVKKDLIIKLPKYSLFELENGRKRMLASAGELQKGNELALPSKYVNFLYLASHYEKLKGSPEDNEQKQLFVEQHKHYLDEIIEQISEFSKRVILADANLDKVLSAYNKHRDKPIREQAENIIHLFTLTNLGAPAAFKYFDTTIDRKRYTSTKEVLDATLIHQSITGLYETRIDLSQLGGDGGGSSGGGGGSGGLGIEDEYRLHETSTEPDVSLGSTWLSDFPQAWAETGGMGLAVRQAPLIIPLKATSTPVSIQQYPMSHEARLGIKPHIQRLLDQGILVPCQSPWNTPLLPVKKPGTNDYRPVQDLREVNKRVEDIHPTVPNPYNLLSGLPPSHQWYTVLDLKDAFFCLRLHPTSQPLFAFEWRDPGMGISGQLTWTRLPQGFKNSPTLFNEALHRDLADFRIQHPDLILLQYVDDILLAATSELDCQQGTRALLQTLGDLGYRASAKKAQICQKQVKYLGYLLREGQRWLTEARKETVMGQPVPKTPRQLREFLGKAGFCRLFIPGFAEMAAPLYPLTKPGTLFSWGPDQQKAYQEIKQALLTAPALGLPDLTKPFELFVDEKQGYAKGVLTQKLGPWRRPVAYLSKKLDPVAAGWPPCLRMVAAIAVLTKDAGKLTMGQPLVILAPHAVEALVKQPPDRWLSNARMTHYQAMLLDTDRVQFGPVVALNPATLLPLPEEGAPHDCLEILAETHGTRPDLTDQPIPDADHTWYTDGSSFLQEGQRKAGAAVTTETEVIWAGALPAGTSAQRAELIALTQALKMAEGKRLNVYTDSRYAFATAHIHGEIYRRRGWLTSEGREIKNKSEILALLKALFLPKRLSIIHCLGHQKGDSAEARGNRLADQAAREAAIKTPPDTSTLLIAGKRTADGSEFEKRTADGSEFESPKKKAKVE

SEQ ID NO: 4518 - protein, 2094 aa, synthetic construct
MPAAKRVKLDGGDKKYSIGLDIGTNSVGWAVITDEYKVPSKKFKVLGNTDRHSIKKNLIGALLFDSGETAEATRLKRTARRRYTRRKNRICYLQEIFSNEMAKVDDSFFHRLEESFLVEEDKKHERHPIFGNIVDEVAYHEKYPTIYHLRKKLVDSTDKADLRLIYLALAHMIKFRGHFLIEGDLNPDNSDVDKLFIQLVQTYNQLFEENPINASGVDAKAILSARLSKSRRLENLIAQLPGEKKNGLFGNLIALSLGLTPNFKSNFDLAEDAKLQLSKDTYDDDLDNLLAQIGDQYADLFLAAKNLSDAILLSDILRVNTEITKAPLSASMIKRYDEHHQDLTLLKALVRQQLPEKYKEIFFDQSKNGYAGYIDGGASQEEFYKFIKPILEKMDGTEELLVKLNREDLLRKQRTFDNGSIPHQIHLGELHAILRRQEDFYPFLKDNREKIEKILTFRIPYYVGPLARGNSRFAWMTRKSEETITPWNFEEVVDKGASAQSFIERMTNFDKNLPNEKVLPKHSLLYEYFTVYNELTKVKYVTEGMRKPAFLSGEQKKAIVDLLFKTNRKVTVKQLKEDYFKKIECFDSVEISGVEDRFNASLGTYHDLLKIIKDKDFLDNEENEDILEDIVLTLTLFEDREMIEERLKTYAHLFDDKVMKQLKRRRYTGWGRLSRKLINGIRDKQSGKTILDFLKSDGFANRNFMQLIHDDSLTFKEDIQKAQVSGQGDSLHEHIANLAGSPAIKKGILQTVKVVDELVKVMGRHKPENIVIEMARENQTTQKGQKNSRERMKRIEEGIKELGSQILKEHPVENTQLQNEKLYLYYLQNGRDMYVDQELDINRLSDYDVDHIVPQSFLKDDSIDNKVLTRSDKARGKSDNVPSEEVVKKMKNYWRQLLNAKLITQRKFDNLTKAERGGLSELDKAGFIKRQLVETRQITKHVAQILDSRMNTKYDENDKLIREVKVITLKSKLVSDFRKDFQFYKVREINNYHHAHDAYLNAVVGTALIKKYPKLESEFVYGDYKVYDVRKMIAKSEQEIGKATAKYFFYSNIMNFFKTEITLANGEIRKRPLIETNGETGEIVWDKGRDFATVRKVLSMPQVNIVKKTEVQTGGFSKESILPKRNSDKLIARKKDWDPKKYGGFDSPTVAYSVLVVAKVEKGKSKKLKSVKELLGITIMERSSFEKNPIDFLEAKGYKEVKKDLIIKLPKYSLFELENGRKRMLASAGELQKGNELALPSKYVNFLYLASHYEKLKGSPEDNEQKQLFVEQHKHYLDEIIEQISEFSKRVILADANLDKVLSAYNKHRDKPIREQAENIIHLFTLTNLGAPAAFKYFDTTIDRKRYTSTKEVLDATLIHQSITGLYETRIDLSQLGGDGGGSSGGGGGSGGTLNIEDEYRLHETSKEPDVPLGSTWLSDFPQAWAETGGMGLAVRQAPLIIPLKATSTPVSIKQYPMSQEARLGIKPHIQRLLDQGILVPCQSPWNTPLLPVKKPGTNDYRPVQDLREVNKRVEDIHPTVPNPYNLLSGLPPSHQWYTVLDLKDAFFCLRLHPTSQPLFAFEWRDPEMGISGQLTWTRLPQGFKNSPTLFNEALHRDLADFRIQHPDLILLQYVDDLLLAATSEQDCQRGTRALLQTLGNLGYRASAKKAQICQKQVKYLGYLLKEGQRWLTEARKETVMGQPTPKTPRQLREFLGKAGFCRLFIPGFAEMAAPLYPLTKPGTLFNWGPDQQKAYQEIKQALLTAPALGLPDLTKPFELFVDEKQGYAKGVLTQKLGPWRRPVAYLSKKLDPVAAGWPPCLRMVAAIAVLTKDAGKLTMGQPLVILAPHAVEALVKQPPDRWLSNARMTHYQAMLLDTDRVQFGPVVALNPATLLPLPEKEAPHDCLEILAETHGTRPDLTDQPIPDADYTWYTDGSSFLQEGQRRAGAAVTTETEVIWARALPAGTSAQRAELIALTQALKMAEGKKLNVYTDSRYAFATAHVHGEIYRRRGWLTSEGREIKNKNEILALLKALFLPKRLSIIHCPGHQKGNSAEARGNRMADQAAREAAMKAVLETSTLLAGKRTADGSEFEKRTADGSEFESPKKKAKVE

SEQ ID NO: 4519 - protein, 2096 aa, synthetic construct
MPAAKRVKLDGGDKKYSIGLDIGTNSVGWAVITDEYKVPSKKFKVLGNTDRHSIKKNLIGALLFDSGETAEATRLKRTARRRYTRRKNRICYLQEIFSNEMAKVDDSFFHRLEESFLVEEDKKHERHPIFGNIVDEVAYHEKYPTIYHLRKKLVDSTDKADLRLIYLALAHMIKFRGHFLIEGDLNPDNSDVDKLFIQLVQTYNQLFEENPINASGVDAKAILSARLSKSRRLENLIAQLPGEKKNGLFGNLIALSLGLTPNFKSNFDLAEDAKLQLSKDTYDDDLDNLLAQIGDQYADLFLAAKNLSDAILLSDILRVNTEITKAPLSASMIKRYDEHHQDLTLLKALVRQQLPEKYKEIFFDQSKNGYAGYIDGGASQEEFYKFIKPILEKMDGTEELLVKLNREDLLRKQRTFDNGSIPHQIHLGELHAILRRQEDFYPFLKDNREKIEKILTFRIPYYVGPLARGNSRFAWMTRKSEETITPWNFEEVVDKGASAQSFIERMTNFDKNLPNEKVLPKHSLLYEYFTVYNELTKVKYVTEGMRKPAFLSGEQKKAIVDLLFKTNRKVTVKQLKEDYFKKIECFDSVEISGVEDRFNASLGTYHDLLKIIKDKDFLDNEENEDILEDIVLTLTLFEDREMIEERLKTYAHLFDDKVMKQLKRRRYTGWGRLSRKLINGIRDKQSGKTILDFLKSDGFANRNFMQLIHDDSLTFKEDIQKAQVSGQGDSLHEHIANLAGSPAIKKGILQTVKVVDELVKVMGRHKPENIVIEMARENQTTQKGQKNSRERMKRIEEGIKELGSQILKEHPVENTQLQNEKLYLYYLQNGRDMYVDQELDINRLSDYDVDHIVPQSFLKDDSIDNKVLTRSDKARGKSDNVPSEEVVKKMKNYWRQLLNAKLITQRKFDNLTKAERGGLSELDKAGFIKRQLVETRQITKHVAQILDSRMNTKYDENDKLIREVKVITLKSKLVSDFRKDFQFYKVREINNYHHAHDAYLNAVVGTALIKKYPKLESEFVYGDYKVYDVRKMIAKSEQEIGKATAKYFFYSNIMNFFKTEITLANGEIRKRPLIETNGETGEIVWDKGRDFATVRKVLSMPQVNIVKKTEVQTGGFSKESILPKRNSDKLIARKKDWDPKKYGGFDSPTVAYSVLVVAKVEKGKSKKLKSVKELLGITIMERSSFEKNPIDFLEAKGYKEVKKDLIIKLPKYSLFELENGRKRMLASAGELQKGNELALPSKYVNFLYLASHYEKLKGSPEDNEQKQLFVEQHKHYLDEIIEQISEFSKRVILADANLDKVLSAYNKHRDKPIREQAENIIHLFTLTNLGAPAAFKYFDTTIDRKRYTSTKEVLDATLIHQSITGLYETRIDLSQLGGDGGGGGGGSEAAAKGGTLNIEDEYRLHETSKEPDVPLGSTWLSDFPQAWAETGGMGLAVRQAPLIIPLKATSTPVSIKQYPMSQEARLGIKPHIQRLLDQGILVPCQSPWNTPLLPVKKPGTNDYRPVQDLREVNKRVEDIHPTVPNPYNLLSGLPPSHQWYTVLDLKDAFFCLRLHPTSQPLFAFEWRDPEMGISGQLTWTRLPQGFKNSPTLFNEALHRDLADFRIQHPDLILLQYVDDLLLAATSEQDCQRGTRALLQTLGNLGYRASAKKAQICQKQVKYLGYLLKEGQRWLTEARKETVMGQPTPKTPRQLREFLGKAGFCRLFIPGFAEMAAPLYPLTKPGTLFNWGPDQQKAYQEIKQALLTAPALGLPDLTKPFELFVDEKQGYAKGVLTQKLGPWRRPVAYLSKKLDPVAAGWPPCLRMVAAIAVLTKDAGKLTMGQPLVILAPHAVEALVKQPPDRWLSNARMTHYQAMLLDTDRVQFGPVVALNPATLLPLPEKEAPHDCLEILAETHGTRPDLTDQPIPDADYTWYTDGSSFLQEGQRRAGAAVTTETEVIWARALPAGTSAQRAELIALTQALKMAEGKKLNVYTDSRYAFATAHVHGEIYRRRGWLTSEGREIKNKNEILALLKALFLPKRLSIIHCPGHQKGNSAEARGNRMADQAAREAAMKAVLETSTLLAGKRTADGSEFEKRTADGSEFESPKKKAKVE

SEQ ID NO: 4520 - protein, 2094 aa, synthetic construct
MPAAKRVKLDGGDKKYSIGLDIGTNSVGWAVITDEYKVPSKKFKVLGNTDRHSIKKNLIGALLFDSGETAEATRLKRTARRRYTRRKNRICYLQEIFSNEMAKVDDSFFHRLEESFLVEEDKKHERHPIFGNIVDEVAYHEKYPTIYHLRKKLVDSTDKADLRLIYLALAHMIKFRGHFLIEGDLNPDNSDVDKLFIQLVQTYNQLFEENPINASGVDAKAILSARLSKSRRLENLIAQLPGEKKNGLFGNLIALSLGLTPNFKSNFDLAEDAKLQLSKDTYDDDLDNLLAQIGDQYADLFLAAKNLSDAILLSDILRVNTEITKAPLSASMIKRYDEHHQDLTLLKALVRQQLPEKYKEIFFDQSKNGYAGYIDGGASQEEFYKFIKPILEKMDGTEELLVKLNREDLLRKQRTFDNGSIPHQIHLGELHAILRRQEDFYPFLKDNREKIEKILTFRIPYYVGPLARGNSRFAWMTRKSEETITPWNFEEVVDKGASAQSFIERMTNFDKNLPNEKVLPKHSLLYEYFTVYNELTKVKYVTEGMRKPAFLSGEQKKAIVDLLFKTNRKVTVKQLKEDYFKKIECFDSVEISGVEDRFNASLGTYHDLLKIIKDKDFLDNEENEDILEDIVLTLTLFEDREMIEERLKTYAHLFDDKVMKQLKRRRYTGWGRLSRKLINGIRDKQSGKTILDFLKSDGFANRNFMQLIHDDSLTFKEDIQKAQVSGQGDSLHEHIANLAGSPAIKKGILQTVKVVDELVKVMGRHKPENIVIEMARENQTTQKGQKNSRERMKRIEEGIKELGSQILKEHPVENTQLQNEKLYLYYLQNGRDMYVDQELDINRLSDYDVDHIVPQSFLKDDSIDNKVLTRSDKARGKSDNVPSEEVVKKMKNYWRQLLNAKLITQRKFDNLTKAERGGLSELDKAGFIKRQLVETRQITKHVAQILDSRMNTKYDENDKLIREVKVITLKSKLVSDFRKDFQFYKVREINNYHHAHDAYLNAVVGTALIKKYPKLESEFVYGDYKVYDVRKMIAKSEQEIGKATAKYFFYSNIMNFFKTEITLANGEIRKRPLIETNGETGEIVWDKGRDFATVRKVLSMPQVNIVKKTEVQTGGFSKESILPKRNSDKLIARKKDWDPKKYGGFDSPTVAYSVLVVAKVEKGKSKKLKSVKELLGITIMERSSFEKNPIDFLEAKGYKEVKKDLIIKLPKYSLFELENGRKRMLASAGELQKGNELALPSKYVNFLYLASHYEKLKGSPEDNEQKQLFVEQHKHYLDEIIEQISEFSKRVILADANLDKVLSAYNKHRDKPIREQAENIIHLFTLTNLGAPAAFKYFDTTIDRKRYTSTKEVLDATLIHQSITGLYETRIDLSQLGGDGGGGGGGSPAPGGTLNLEDEYRLYETSAEPEVSPGSTWLSDFPQAWAETGGMGLAVRQAPLIIPLKATSTPVSIKQYPMSQEAKLGIKPHIQRLLDQGILVPCQSPWNTPLLPVKKPGTNDYRPVQDLREVNKRVEDIHPTVPNPYNLLSGLPPSHRWYTVLDLKDAFFCLRLHPTSQPLFAFEWRDPGMGISGQLTWTRLPQGFKNSPTLFNEALHRDLADFRIQHPDLILLQYVDDILLAATSELDCQQGTRALLLTLGNLGYRASAKKAQLCQKQVKYLGYLLKEGQRWLTEARKETVMGQPTPKTPRQLREFLGKAGFCRLFIPGFAEMAAPLYPLTKPGTLFNWGPDQQKAYQEIKQALLTAPALGLPDLTKPFELFVDEKQGYAKGVLTQKLGPWRRPVAYLSKKLDPVAAGWPPCLRMVAAIAVLRKDAGKLTMGQPLVILAPHAVEALVKQPPDRWLSNARMTHYQAMLLDTDRVQFGPVVALNPATLLPLPEEGAPHDCLEILAETHGTRPDLTDQPIPDADHTWYTDGSSFLQEGQRKAGAAVTTETEVIWARALPAGTSAQRAELIALTQALKMAEGKRLNVYTDSRYAFATAHIHGEIYRRRGWLTSEGREIKNKSEILALLKALFLPKRLSIIHCLGHQKGDSAEARGNRLADQAAREAAIKTPPDTSTLLAGKRTADGSEFEKRTADGSEFESPKKKAKVE

SEQ ID NO: 4521 - protein, 2094 aa, synthetic construct
MPAAKRVKLDGGDKKYSIGLDIGTNSVGWAVITDEYKVPSKKFKVLGNTDRHSIKKNLIGALLFDSGETAEATRLKRTARRRYTRRKNRICYLQEIFSNEMAKVDDSFFHRLEESFLVEEDKKHERHPIFGNIVDEVAYHEKYPTIYHLRKKLVDSTDKADLRLIYLALAHMIKFRGHFLIEGDLNPDNSDVDKLFIQLVQTYNQLFEENPINASGVDAKAILSARLSKSRRLENLIAQLPGEKKNGLFGNLIALSLGLTPNFKSNFDLAEDAKLQLSKDTYDDDLDNLLAQIGDQYADLFLAAKNLSDAILLSDILRVNTEITKAPLSASMIKRYDEHHQDLTLLKALVRQQLPEKYKEIFFDQSKNGYAGYIDGGASQEEFYKFIKPILEKMDGTEELLVKLNREDLLRKQRTFDNGSIPHQIHLGELHAILRRQEDFYPFLKDNREKIEKILTFRIPYYVGPLARGNSRFAWMTRKSEETITPWNFEEVVDKGASAQSFIERMTNFDKNLPNEKVLPKHSLLYEYFTVYNELTKVKYVTEGMRKPAFLSGEQKKAIVDLLFKTNRKVTVKQLKEDYFKKIECFDSVEISGVEDRFNASLGTYHDLLKIIKDKDFLDNEENEDILEDIVLTLTLFEDREMIEERLKTYAHLFDDKVMKQLKRRRYTGWGRLSRKLINGIRDKQSGKTILDFLKSDGFANRNFMQLIHDDSLTFKEDIQKAQVSGQGDSLHEHIANLAGSPAIKKGILQTVKVVDELVKVMGRHKPENIVIEMARENQTTQKGQKNSRERMKRIEEGIKELGSQILKEHPVENTQLQNEKLYLYYLQNGRDMYVDQELDINRLSDYDVDHIVPQSFLKDDSIDNKVLTRSDKARGKSDNVPSEEVVKKMKNYWRQLLNAKLITQRKFDNLTKAERGGLSELDKAGFIKRQLVETRQITKHVAQILDSRMNTKYDENDKLIREVKVITLKSKLVSDFRKDFQFYKVREINNYHHAHDAYLNAVVGTALIKKYPKLESEFVYGDYKVYDVRKMIAKSEQEIGKATAKYFFYSNIMNFFKTEITLANGEIRKRPLIETNGETGEIVWDKGRDFATVRKVLSMPQVNIVKKTEVQTGGFSKESILPKRNSDKLIARKKDWDPKKYGGFDSPTVAYSVLVVAKVEKGKSKKLKSVKELLGITIMERSSFEKNPIDFLEAKGYKEVKKDLIIKLPKYSLFELENGRKRMLASAGELQKGNELALPSKYVNFLYLASHYEKLKGSPEDNEQKQLFVEQHKHYLDEIIEQISEFSKRVILADANLDKVLSAYNKHRDKPIREQAENIIHLFTLTNLGAPAAFKYFDTTIDRKRYTSTKEVLDATLIHQSITGLYETRIDLSQLGGDGGPAPGGGGGSGGTLNIEDEHRLHETSKEPDVSLGSTWLSDFPQAWAETGGMGLAVRQAPLIIPLKATSTPVSIKQYPMSQEARLGIKPHIQRLLDQGILVPCQSPWNTPLLPVKKPGTNDYRPVQDLREVNKRVEDIHPTVPNPYNLLSGLPPSHQWYTVLDLKDAFFCLRLHPTSQPLFAFEWRDPEMGISGQLTWTRLPQGFKNSPTLFNEALHRDLADFRIQHPDLILLQYVDDLLLAATSELDCQQGTRALLQTLGNLGYRASAKKAQICQKQVKYLGYLLKEGQRWLTEARKETVMGQPTPKTPRQLREFLGKAGFCRLFIPGFAEMAAPLYPLTKPGTLFNWGPDQQKAYQEIKQALLTAPALGLPDLTKPFELFVDEKQGYAKGVLTQKLGPWRRPVAYLSKKLDPVAAGWPPCLRMVAAIAVLTKDAGKLTMGQPLVILAPHAVEALVKQPPDRWLSNARMTHYQALLLDTDRVQFGPVVALNPATLLPLPEEGLQHNCLDILAEAHGTRPDLTDQPLPDADHTWYTDGSSLLQEGQRKAGAAVTTETEVIWAKALPAGTSAQRAELIALTQALKMAEGKKLNVYTDSRYAFATAHIHGEIYRRRGWLTSEGKEIKNKDEILALLKALFLPKRLSIIHCPGHQKGHSAEARGNRMADQAARKAAITETPDTSTLLAGKRTADGSEFEKRTADGSEFESPKKKAKVE

SEQ ID NO: 4522 - protein, 2096 aa, synthetic construct
MPAAKRVKLDGGDKKYSIGLDIGTNSVGWAVITDEYKVPSKKFKVLGNTDRHSIKKNLIGALLFDSGETAEATRLKRTARRRYTRRKNRICYLQEIFSNEMAKVDDSFFHRLEESFLVEEDKKHERHPIFGNIVDEVAYHEKYPTIYHLRKKLVDSTDKADLRLIYLALAHMIKFRGHFLIEGDLNPDNSDVDKLFIQLVQTYNQLFEENPINASGVDAKAILSARLSKSRRLENLIAQLPGEKKNGLFGNLIALSLGLTPNFKSNFDLAEDAKLQLSKDTYDDDLDNLLAQIGDQYADLFLAAKNLSDAILLSDILRVNTEITKAPLSASMIKRYDEHHQDLTLLKALVRQQLPEKYKEIFFDQSKNGYAGYIDGGASQEEFYKFIKPILEKMDGTEELLVKLNREDLLRKQRTFDNGSIPHQIHLGELHAILRRQEDFYPFLKDNREKIEKILTFRIPYYVGPLARGNSRFAWMTRKSEETITPWNFEEVVDKGASAQSFIERMTNFDKNLPNEKVLPKHSLLYEYFTVYNELTKVKYVTEGMRKPAFLSGEQKKAIVDLLFKTNRKVTVKQLKEDYFKKIECFDSVEISGVEDRFNASLGTYHDLLKIIKDKDFLDNEENEDILEDIVLTLTLFEDREMIEERLKTYAHLFDDKVMKQLKRRRYTGWGRLSRKLINGIRDKQSGKTILDFLKSDGFANRNFMQLIHDDSLTFKEDIQKAQVSGQGDSLHEHIANLAGSPAIKKGILQTVKVVDELVKVMGRHKPENIVIEMARENQTTQKGQKNSRERMKRIEEGIKELGSQILKEHPVENTQLQNEKLYLYYLQNGRDMYVDQELDINRLSDYDVDHIVPQSFLKDDSIDNKVLTRSDKARGKSDNVPSEEVVKKMKNYWRQLLNAKLITQRKFDNLTKAERGGLSELDKAGFIKRQLVETRQITKHVAQILDSRMNTKYDENDKLIREVKVITLKSKLVSDFRKDFQFYKVREINNYHHAHDAYLNAVVGTALIKKYPKLESEFVYGDYKVYDVRKMIAKSEQEIGKATAKYFFYSNIMNFFKTEITLANGEIRKRPLIETNGETGEIVWDKGRDFATVRKVLSMPQVNIVKKTEVQTGGFSKESILPKRNSDKLIARKKDWDPKKYGGFDSPTVAYSVLVVAKVEKGKSKKLKSVKELLGITIMERSSFEKNPIDFLEAKGYKEVKKDLIIKLPKYSLFELENGRKRMLASAGELQKGNELALPSKYVNFLYLASHYEKLKGSPEDNEQKQLFVEQHKHYLDEIIEQISEFSKRVILADANLDKVLSAYNKHRDKPIREQAENIIHLFTLTNLGAPAAFKYFDTTIDRKRYTSTKEVLDATLIHQSITGLYETRIDLSQLGGDGGGGSEAAAKGSSGGTLNIEDEYRLHETSKEPDVPLGSTWLSDFPQAWAETGGMGLAVRQAPLIIPLKATSTPVSIKQYPMSQEARLGIKPHIQRLLDQGILVPCQSPWNTPLLPVKKPGTNDYRPVQDLREVNKRVEDIHPTVPNPYNLLSGLPPSHQWYTVLDLKDAFFCLRLHPTSQPLFAFEWRDPEMGISGQLTWTRLPQGFKNSPTLFNEALHRDLADFRIQHPDLILLQYVDDLLLAATSEQDCQRGTRALLQTLGNLGYRASAKKAQICQKQVKYLGYLLKEGQRWLTEARKETVMGQPTPKTPRQLREFLGKAGFCRLFIPGFAEMAAPLYPLTKPGTLFNWGPDQQKAYQEIKQALLTAPALGLPDLTKPFELFVDEKQGYAKGVLTQKLGPWRRPVAYLSKKLDPVAAGWPPCLRMVAAIAVLTKDAGKLTMGQPLVILAPHAVEALVKQPPDRWLSNARMTHYQAMLLDTDRVQFGPVVALNPATLLPLPEKEAPHDCLEILAETHGTRPDLTDQPIPDADYTWYTDGSSFLQEGQRRAGAAVTTETEVIWARALPAGTSAQRAELIALTQALKMAEGKKLNVYTDSRYAFATAHVHGEIYRRRGWLTSEGREIKNKNEILALLKALFLPKRLSIIHCPGHQKGNSAEARGNRMADQAAREAAMKAVLETSTLLAGKRTADGSEFEKRTADGSEFESPKKKAKVE

SEQ ID NO: 4523 - protein, 2096 aa, synthetic construct
MPAAKRVKLDGGDKKYSIGLDIGTNSVGWAVITDEYKVPSKKFKVLGNTDRHSIKKNLIGALLFDSGETAEATRLKRTARRRYTRRKNRICYLQEIFSNEMAKVDDSFFHRLEESFLVEEDKKHERHPIFGNIVDEVAYHEKYPTIYHLRKKLVDSTDKADLRLIYLALAHMIKFRGHFLIEGDLNPDNSDVDKLFIQLVQTYNQLFEENPINASGVDAKAILSARLSKSRRLENLIAQLPGEKKNGLFGNLIALSLGLTPNFKSNFDLAEDAKLQLSKDTYDDDLDNLLAQIGDQYADLFLAAKNLSDAILLSDILRVNTEITKAPLSASMIKRYDEHHQDLTLLKALVRQQLPEKYKEIFFDQSKNGYAGYIDGGASQEEFYKFIKPILEKMDGTEELLVKLNREDLLRKQRTFDNGSIPHQIHLGELHAILRRQEDFYPFLKDNREKIEKILTFRIPYYVGPLARGNSRFAWMTRKSEETITPWNFEEVVDKGASAQSFIERMTNFDKNLPNEKVLPKHSLLYEYFTVYNELTKVKYVTEGMRKPAFLSGEQKKAIVDLLFKTNRKVTVKQLKEDYFKKIECFDSVEISGVEDRFNASLGTYHDLLKIIKDKDFLDNEENEDILEDIVLTLTLFEDREMIEERLKTYAHLFDDKVMKQLKRRRYTGWGRLSRKLINGIRDKQSGKTILDFLKSDGFANRNFMQLIHDDSLTFKEDIQKAQVSGQGDSLHEHIANLAGSPAIKKGILQTVKVVDELVKVMGRHKPENIVIEMARENQTTQKGQKNSRERMKRIEEGIKELGSQILKEHPVENTQLQNEKLYLYYLQNGRDMYVDQELDINRLSDYDVDHIVPQSFLKDDSIDNKVLTRSDKARGKSDNVPSEEVVKKMKNYWRQLLNAKLITQRKFDNLTKAERGGLSELDKAGFIKRQLVETRQITKHVAQILDSRMNTKYDENDKLIREVKVITLKSKLVSDFRKDFQFYKVREINNYHHAHDAYLNAVVGTALIKKYPKLESEFVYGDYKVYDVRKMIAKSEQEIGKATAKYFFYSNIMNFFKTEITLANGEIRKRPLIETNGETGEIVWDKGRDFATVRKVLSMPQVNIVKKTEVQTGGFSKESILPKRNSDKLIARKKDWDPKKYGGFDSPTVAYSVLVVAKVEKGKSKKLKSVKELLGITIMERSSFEKNPIDFLEAKGYKEVKKDLIIKLPKYSLFELENGRKRMLASAGELQKGNELALPSKYVNFLYLASHYEKLKGSPEDNEQKQLFVEQHKHYLDEIIEQISEFSKRVILADANLDKVLSAYNKHRDKPIREQAENIIHLFTLTNLGAPAAFKYFDTTIDRKRYTSTKEVLDATLIHQSITGLYETRIDLSQLGGDGGEAAAKGGSGSSGGTLNIEDEYRLHETSKEPDVPLGSTWLSDFPQAWAETGGMGLAVRQAPLIIPLKATSTPVSIKQYPMSQEARLGIKPHIQRLLDQGILVPCQSPWNTPLLPVKKPGTNDYRPVQDLREVNKRVEDIHPTVPNPYNLLSGLPPSHQWYTVLDLKDAFFCLRLHPTSQPLFAFEWRDPEMGISGQLTWTRLPQGFKNSPTLFNEALHRDLADFRIQHPDLILLQYVDDLLLAATSEQDCQRGTRALLQTLGNLGYRASAKKAQICQKQVKYLGYLLKEGQRWLTEARKETVMGQPTPKTPRQLREFLGTAGFCRLWIPGFAEMAAPLYPLTKPGTLFNWGPDQQKAYQEIKQALLTAPALGLPDLTKPFELFVDEKQGYAKGVLTQKLGPWRRPVAYLSKKLDPVAAGWPPCLRMVAAIAVLTKDAGKLTMGQPLVILAPHAVEALVKQPPDRWLSNARMTHYQAMLLDTDRVQFGPVVALNPATLLPLPEKEAPHDCLEILAETHGTRPDLTDQPIPDADYTWYTDGSSFLQEGQRRAGAAVTTETEVIWARALPAGTSAQRAELIALTQALKMAEGKKLNVYTDSRYAFATAHVHGEIYRRRGWLTSEGREIKNKNEILALLKALFLPKRLSIIHCPGHQKGNSAEARGNRMADQAAREAAMKAVLETSTLLAGKRTADGSEFEKRTADGSEFESPKKKAKVE

SEQ ID NO: 4524 - protein, 2096 aa, synthetic construct
MPAAKRVKLDGGDKKYSIGLDIGTNSVGWAVITDEYKVPSKKFKVLGNTDRHSIKKNLIGALLFDSGETAEATRLKRTARRRYTRRKNRICYLQEIFSNEMAKVDDSFFHRLEESFLVEEDKKHERHPIFGNIVDEVAYHEKYPTIYHLRKKLVDSTDKADLRLIYLALAHMIKFRGHFLIEGDLNPDNSDVDKLFIQLVQTYNQLFEENPINASGVDAKAILSARLSKSRRLENLIAQLPGEKKNGLFGNLIALSLGLTPNFKSNFDLAEDAKLQLSKDTYDDDLDNLLAQIGDQYADLFLAAKNLSDAILLSDILRVNTEITKAPLSASMIKRYDEHHQDLTLLKALVRQQLPEKYKEIFFDQSKNGYAGYIDGGASQEEFYKFIKPILEKMDGTEELLVKLNREDLLRKQRTFDNGSIPHQIHLGELHAILRRQEDFYPFLKDNREKIEKILTFRIPYYVGPLARGNSRFAWMTRKSEETITPWNFEEVVDKGASAQSFIERMTNFDKNLPNEKVLPKHSLLYEYFTVYNELTKVKYVTEGMRKPAFLSGEQKKAIVDLLFKTNRKVTVKQLKEDYFKKIECFDSVEISGVEDRFNASLGTYHDLLKIIKDKDFLDNEENEDILEDIVLTLTLFEDREMIEERLKTYAHLFDDKVMKQLKRRRYTGWGRLSRKLINGIRDKQSGKTILDFLKSDGFANRNFMQLIHDDSLTFKEDIQKAQVSGQGDSLHEHIANLAGSPAIKKGILQTVKVVDELVKVMGRHKPENIVIEMARENQTTQKGQKNSRERMKRIEEGIKELGSQILKEHPVENTQLQNEKLYLYYLQNGRDMYVDQELDINRLSDYDVDHIVPQSFLKDDSIDNKVLTRSDKARGKSDNVPSEEVVKKMKNYWRQLLNAKLITQRKFDNLTKAERGGLSELDKAGFIKRQLVETRQITKHVAQILDSRMNTKYDENDKLIREVKVITLKSKLVSDFRKDFQFYKVREINNYHHAHDAYLNAVVGTALIKKYPKLESEFVYGDYKVYDVRKMIAKSEQEIGKATAKYFFYSNIMNFFKTEITLANGEIRKRPLIETNGETGEIVWDKGRDFATVRKVLSMPQVNIVKKTEVQTGGFSKESILPKRNSDKLIARKKDWDPKKYGGFDSPTVAYSVLVVAKVEKGKSKKLKSVKELLGITIMERSSFEKNPIDFLEAKGYKEVKKDLIIKLPKYSLFELENGRKRMLASAGELQKGNELALPSKYVNFLYLASHYEKLKGSPEDNEQKQLFVEQHKHYLDEIIEQISEFSKRVILADANLDKVLSAYNKHRDKPIREQAENIIHLFTLTNLGAPAAFKYFDTTIDRKRYTSTKEVLDATLIHQSITGLYETRIDLSQLGGDGGEAAAKGSSGGSGGTLNIEDEYRLHETSKEPDVPLGSTWLSDFPQAWAETGGMGLAVRQAPLIIPLKATSTPVSIKQYPMSQEARLGIKPHIQRLLDQGILVPCQSPWNTPLLPVKKPGTNDYRPVQDLREVNKRVEDIHPTVPNPYNLLSGLPPSHQWYTVLDLKDAFFCLRLHPTSQPLFAFEWRDPEMGISGQLTWTRLPQGFKNSPTLFNEALHRDLADFRIQHPDLILLQYVDDLLLAATSEQDCQRGTRALLQTLGNLGYRASAKKAQICQKQVKYLGYLLKEGQRWLTEARKETVMGQPTPKTPRQLREFLGTAGFCRLWIPGFAEMAAPLYPLTKPGTLFNWGPDQQKAYQEIKQALLTAPALGLPDLTKPFELFVDEKQGYAKGVLTQKLGPWRRPVAYLSKKLDPVAAGWPPCLRMVAAIAVLTKDAGKLTMGQPLVILAPHAVEALVKQPPDRWLSNARMTHYQAMLLDTDRVQFGPVVALNPATLLPLPEKEAPHDCLEILAETHGTRPDLTDQPIPDADYTWYTDGSSFLQEGQRRAGAAVTTETEVIWARALPAGTSAQRAELIALTQALKMAEGKKLNVYTDSRYAFATAHVHGEIYRRRGWLTSEGREIKNKNEILALLKALFLPKRLSIIHCPGHQKGNSAEARGNRMADQAAREAAMKAVLETSTLLAGKRTADGSEFEKRTADGSEFESPKKKAKVE

SEQ ID NO: 4525 - protein, 2094 aa, synthetic construct
MPAAKRVKLDGGDKKYSIGLDIGTNSVGWAVITDEYKVPSKKFKVLGNTDRHSIKKNLIGALLFDSGETAEATRLKRTARRRYTRRKNRICYLQEIFSNEMAKVDDSFFHRLEESFLVEEDKKHERHPIFGNIVDEVAYHEKYPTIYHLRKKLVDSTDKADLRLIYLALAHMIKFRGHFLIEGDLNPDNSDVDKLFIQLVQTYNQLFEENPINASGVDAKAILSARLSKSRRLENLIAQLPGEKKNGLFGNLIALSLGLTPNFKSNFDLAEDAKLQLSKDTYDDDLDNLLAQIGDQYADLFLAAKNLSDAILLSDILRVNTEITKAPLSASMIKRYDEHHQDLTLLKALVRQQLPEKYKEIFFDQSKNGYAGYIDGGASQEEFYKFIKPILEKMDGTEELLVKLNREDLLRKQRTFDNGSIPHQIHLGELHAILRRQEDFYPFLKDNREKIEKILTFRIPYYVGPLARGNSRFAWMTRKSEETITPWNFEEVVDKGASAQSFIERMTNFDKNLPNEKVLPKHSLLYEYFTVYNELTKVKYVTEGMRKPAFLSGEQKKAIVDLLFKTNRKVTVKQLKEDYFKKIECFDSVEISGVEDRFNASLGTYHDLLKIIKDKDFLDNEENEDILEDIVLTLTLFEDREMIEERLKTYAHLFDDKVMKQLKRRRYTGWGRLSRKLINGIRDKQSGKTILDFLKSDGFANRNFMQLIHDDSLTFKEDIQKAQVSGQGDSLHEHIANLAGSPAIKKGILQTVKVVDELVKVMGRHKPENIVIEMARENQTTQKGQKNSRERMKRIEEGIKELGSQILKEHPVENTQLQNEKLYLYYLQNGRDMYVDQELDINRLSDYDVDHIVPQSFLKDDSIDNKVLTRSDKARGKSDNVPSEEVVKKMKNYWRQLLNAKLITQRKFDNLTKAERGGLSELDKAGFIKRQLVETRQITKHVAQILDSRMNTKYDENDKLIREVKVITLKSKLVSDFRKDFQFYKVREINNYHHAHDAYLNAVVGTALIKKYPKLESEFVYGDYKVYDVRKMIAKSEQEIGKATAKYFFYSNIMNFFKTEITLANGEIRKRPLIETNGETGEIVWDKGRDFATVRKVLSMPQVNIVKKTEVQTGGFSKESILPKRNSDKLIARKKDWDPKKYGGFDSPTVAYSVLVVAKVEKGKSKKLKSVKELLGITIMERSSFEKNPIDFLEAKGYKEVKKDLIIKLPKYSLFELENGRKRMLASAGELQKGNELALPSKYVNFLYLASHYEKLKGSPEDNEQKQLFVEQHKHYLDEIIEQISEFSKRVILADANLDKVLSAYNKHRDKPIREQAENIIHLFTLTNLGAPAAFKYFDTTIDRKRYTSTKEVLDATLIHQSITGLYETRIDLSQLGGDGGGGSPAPGSSGGTLNIEDEYRLHETSKEPDVPLGSTWLSDFPQAWAETGGMGLAVRQAPLIIPLKATSTPVSIKQYPMSQEARLGIKPHIQRLLDQGILVPCQSPWNTPLLPVKKPGTNDYRPVQDLREVNKRVEDIHPTVPNPYNLLSGLPPSHQWYTVLDLKDAFFCLRLHPTSQPLFAFEWRDPEMGISGQLTWTRLPQGFKNSPTLFNEALHRDLADFRIQHPDLILLQYVDDLLLAATSEQDCQRGTRALLQTLGNLGYRASAKKAQICQKQVKYLGYLLKEGQRWLTEARKETVMGQPTPKTPRQLREFLGKAGFCRLFIPGFAEMAAPLYPLTKPGTLFNWGPDQQKAYQEIKQALLTAPALGLPDLTKPFELFVDEKQGYAKGVLTQKLGPWRRPVAYLSKKLDPVAAGWPPCLRMVAAIAVLTKDAGKLTMGQPLVILAPHAVEALVKQPPDRWLSNARMTHYQAMLLDTDRVQFGPVVALNPATLLPLPEKEAPHDCLEILAETHGTRPDLTDQPIPDADYTWYTDGSSFLQEGQRRAGAAVTTETEVIWARALPAGTSAQRAELIALTQALKMAEGKKLNVYTDSRYAFATAHVHGEIYRRRGWLTSEGREIKNKNEILALLKALFLPKRLSIIHCPGHQKGNSAEARGNRMADQAAREAAMKAVLETSTLLAGKRTADGSEFEKRTADGSEFESPKKKAKVE

SEQ ID NO: 4526 - protein, 2125 aa, synthetic construct
MPAAKRVKLDGGDKKYSIGLDIGTNSVGWAVITDEYKVPSKKFKVLGNTDRHSIKKNLIGALLFDSGETAEATRLKRTARRRYTRRKNRICYLQEIFSNEMAKVDDSFFHRLEESFLVEEDKKHERHPIFGNIVDEVAYHEKYPTIYHLRKKLVDSTDKADLRLIYLALAHMIKFRGHFLIEGDLNPDNSDVDKLFIQLVQTYNQLFEENPINASGVDAKAILSARLSKSRRLENLIAQLPGEKKNGLFGNLIALSLGLTPNFKSNFDLAEDAKLQLSKDTYDDDLDNLLAQIGDQYADLFLAAKNLSDAILLSDILRVNTEITKAPLSASMIKRYDEHHQDLTLLKALVRQQLPEKYKEIFFDQSKNGYAGYIDGGASQEEFYKFIKPILEKMDGTEELLVKLNREDLLRKQRTFDNGSIPHQIHLGELHAILRRQEDFYPFLKDNREKIEKILTFRIPYYVGPLARGNSRFAWMTRKSEETITPWNFEEVVDKGASAQSFIERMTNFDKNLPNEKVLPKHSLLYEYFTVYNELTKVKYVTEGMRKPAFLSGEQKKAIVDLLFKTNRKVTVKQLKEDYFKKIECFDSVEISGVEDRFNASLGTYHDLLKIIKDKDFLDNEENEDILEDIVLTLTLFEDREMIEERLKTYAHLFDDKVMKQLKRRRYTGWGRLSRKLINGIRDKQSGKTILDFLKSDGFANRNFMQLIHDDSLTFKEDIQKAQVSGQGDSLHEHIANLAGSPAIKKGILQTVKVVDELVKVMGRHKPENIVIEMARENQTTQKGQKNSRERMKRIEEGIKELGSQILKEHPVENTQLQNEKLYLYYLQNGRDMYVDQELDINRLSDYDVDHIVPQSFLKDDSIDNKVLTRSDKARGKSDNVPSEEVVKKMKNYWRQLLNAKLITQRKFDNLTKAERGGLSELDKAGFIKRQLVETRQITKHVAQILDSRMNTKYDENDKLIREVKVITLKSKLVSDFRKDFQFYKVREINNYHHAHDAYLNAVVGTALIKKYPKLESEFVYGDYKVYDVRKMIAKSEQEIGKATAKYFFYSNIMNFFKTEITLANGEIRKRPLIETNGETGEIVWDKGRDFATVRKVLSMPQVNIVKKTEVQTGGFSKESILPKRNSDKLIARKKDWDPKKYGGFDSPTVAYSVLVVAKVEKGKSKKLKSVKELLGITIMERSSFEKNPIDFLEAKGYKEVKKDLIIKLPKYSLFELENGRKRMLASAGELQKGNELALPSKYVNFLYLASHYEKLKGSPEDNEQKQLFVEQHKHYLDEIIEQISEFSKRVILADANLDKVLSAYNKHRDKPIREQAENIIHLFTLTNLGAPAAFKYFDTTIDRKRYTSTKEVLDATLIHQSITGLYETRIDLSQLGGDGGGSSPAPGGSGGLLGRDLLTKLKAQIQFSTEGPQVTWEDRPAMCLVLNLEEEYRLHEKPVPPSIDPSWLQLFPMVWAEKAGMGLANQVPPVVVELKSDASPVAVRQYPMSKEAREGIRPHIQRFLDLGILVPCQSPWNTPLLPVKKPGTNDYRPVQDLREVNKRVQDIHPTVPNPYNLLSSLPPSHTWYSVLDLKDAFFCLKLHPNSQPLFAFEWRDPEKGNTGQLTWTRLPQGFKNSPTLFNEALHRDLASFRALNPQVVMLQYVDDLLVAAPTYRDCKEGTRRLLQELSKLGYRVSAKKAQLCREEVTYLGYLLKGGKRWLTPARKATVMKIPTPTTPRQVREFLGTAGFCRLWIPGFASLAAPLYPLTRPKVPFTWTEAHQEAFGRIKEALLSAPALALPDLTKPFALYVDEKEGVARGVLTQTLGPWRRPVAYLSKKLDPVASGWPTCLKAIAAVALLLKDADKLTLGQNVLVIAPHNLESIVRQPPDRWMTNARMTHYQSLLLNERVSFAPPAILNPATLLPVESDDTPIHICSEILAEETGTRPDLRDQPLPGVPAWYTDGSSFIMDGRRQAGAAIVDNKRTVWASNLPEGTSAQKAELIALTQALRLAEGKSINIYTDSRYAFATAHVHGAIYKQRGWLTSAGKDIKNKEEILALLEAIHLPKRVAIIHCPGHQRGTDPVATGNRKADEAAKQAAQSTRILTETTKNAGKRTADGSEFEKRTADGSEFESPKKKAKVE

SEQ ID NO: 4527 - protein, 2096 aa, synthetic construct
MPAAKRVKLDGGDKKYSIGLDIGTNSVGWAVITDEYKVPSKKFKVLGNTDRHSIKKNLIGALLFDSGETAEATRLKRTARRRYTRRKNRICYLQEIFSNEMAKVDDSFFHRLEESFLVEEDKKHERHPIFGNIVDEVAYHEKYPTIYHLRKKLVDSTDKADLRLIYLALAHMIKFRGHFLIEGDLNPDNSDVDKLFIQLVQTYNQLFEENPINASGVDAKAILSARLSKSRRLENLIAQLPGEKKNGLFGNLIALSLGLTPNFKSNFDLAEDAKLQLSKDTYDDDLDNLLAQIGDQYADLFLAAKNLSDAILLSDILRVNTEITKAPLSASMIKRYDEHHQDLTLLKALVRQQLPEKYKEIFFDQSKNGYAGYIDGGASQEEFYKFIKPILEKMDGTEELLVKLNREDLLRKQRTFDNGSIPHQIHLGELHAILRRQEDFYPFLKDNREKIEKILTFRIPYYVGPLARGNSRFAWMTRKSEETITPWNFEEVVDKGASAQSFIERMTNFDKNLPNEKVLPKHSLLYEYFTVYNELTKVKYVTEGMRKPAFLSGEQKKAIVDLLFKTNRKVTVKQLKEDYFKKIECFDSVEISGVEDRFNASLGTYHDLLKIIKDKDFLDNEENEDILEDIVLTLTLFEDREMIEERLKTYAHLFDDKVMKQLKRRRYTGWGRLSRKLINGIRDKQSGKTILDFLKSDGFANRNFMQLIHDDSLTFKEDIQKAQVSGQGDSLHEHIANLAGSPAIKKGILQTVKVVDELVKVMGRHKPENIVIEMARENQTTQKGQKNSRERMKRIEEGIKELGSQILKEHPVENTQLQNEKLYLYYLQNGRDMYVDQELDINRLSDYDVDHIVPQSFLKDDSIDNKVLTRSDKARGKSDNVPSEEVVKKMKNYWRQLLNAKLITQRKFDNLTKAERGGLSELDKAGFIKRQLVETRQITKHVAQILDSRMNTKYDENDKLIREVKVITLKSKLVSDFRKDFQFYKVREINNYHHAHDAYLNAVVGTALIKKYPKLESEFVYGDYKVYDVRKMIAKSEQEIGKATAKYFFYSNIMNFFKTEITLANGEIRKRPLIETNGETGEIVWDKGRDFATVRKVLSMPQVNIVKKTEVQTGGFSKESILPKRNSDKLIARKKDWDPKKYGGFDSPTVAYSVLVVAKVEKGKSKKLKSVKELLGITIMERSSFEKNPIDFLEAKGYKEVKKDLIIKLPKYSLFELENGRKRMLASAGELQKGNELALPSKYVNFLYLASHYEKLKGSPEDNEQKQLFVEQHKHYLDEIIEQISEFSKRVILADANLDKVLSAYNKHRDKPIREQAENIIHLFTLTNLGAPAAFKYFDTTIDRKRYTSTKEVLDATLIHQSITGLYETRIDLSQLGGDGGEAAAKPAPGGSGGTLNIEDEYRLHETSKEPDVPLGSTWLSDFPQAWAETGGMGLAVRQAPLIIPLKATSTPVSIKQYPMSQEARLGIKPHIQRLLDQGILVPCQSPWNTPLLPVKKPGTNDYRPVQDLREVNKRVEDIHPTVPNPYNLLSGLPPSHQWYTVLDLKDAFFCLRLHPTSQPLFAFEWRDPEMGISGQLTWTRLPQGFKNSPTLFNEALHRDLADFRIQHPDLILLQYVDDLLLAATSEQDCQRGTRALLQTLGNLGYRASAKKAQICQKQVKYLGYLLKEGQRWLTEARKETVMGQPTPKTPRQLREFLGKAGFCRLFIPGFAEMAAPLYPLTKPGTLFNWGPDQQKAYQEIKQALLTAPALGLPDLTKPFELFVDEKQGYAKGVLTQKLGPWRRPVAYLSKKLDPVAAGWPPCLRMVAAIAVLTKDAGKLTMGQPLVILAPHAVEALVKQPPDRWLSNARMTHYQAMLLDTDRVQFGPVVALNPATLLPLPEKEAPHDCLEILAETHGTRPDLTDQPIPDADYTWYTDGSSFLQEGQRRAGAAVTTETEVIWARALPAGTSAQRAELIALTQALKMAEGKKLNVYTDSRYAFATAHVHGEIYRRRGWLTSEGREIKNKNEILALLKALFLPKRLSIIHCPGHQKGNSAEARGNRMADQAAREAAMKAVLETSTLLAGKRTADGSEFEKRTADGSEFESPKKKAKVE

SEQ ID NO: 4528 - protein, 2096 aa, synthetic construct
MPAAKRVKLDGGDKKYSIGLDIGTNSVGWAVITDEYKVPSKKFKVLGNTDRHSIKKNLIGALLFDSGETAEATRLKRTARRRYTRRKNRICYLQEIFSNEMAKVDDSFFHRLEESFLVEEDKKHERHPIFGNIVDEVAYHEKYPTIYHLRKKLVDSTDKADLRLIYLALAHMIKFRGHFLIEGDLNPDNSDVDKLFIQLVQTYNQLFEENPINASGVDAKAILSARLSKSRRLENLIAQLPGEKKNGLFGNLIALSLGLTPNFKSNFDLAEDAKLQLSKDTYDDDLDNLLAQIGDQYADLFLAAKNLSDAILLSDILRVNTEITKAPLSASMIKRYDEHHQDLTLLKALVRQQLPEKYKEIFFDQSKNGYAGYIDGGASQEEFYKFIKPILEKMDGTEELLVKLNREDLLRKQRTFDNGSIPHQIHLGELHAILRRQEDFYPFLKDNREKIEKILTFRIPYYVGPLARGNSRFAWMTRKSEETITPWNFEEVVDKGASAQSFIERMTNFDKNLPNEKVLPKHSLLYEYFTVYNELTKVKYVTEGMRKPAFLSGEQKKAIVDLLFKTNRKVTVKQLKEDYFKKIECFDSVEISGVEDRFNASLGTYHDLLKIIKDKDFLDNEENEDILEDIVLTLTLFEDREMIEERLKTYAHLFDDKVMKQLKRRRYTGWGRLSRKLINGIRDKQSGKTILDFLKSDGFANRNFMQLIHDDSLTFKEDIQKAQVSGQGDSLHEHIANLAGSPAIKKGILQTVKVVDELVKVMGRHKPENIVIEMARENQTTQKGQKNSRERMKRIEEGIKELGSQILKEHPVENTQLQNEKLYLYYLQNGRDMYVDQELDINRLSDYDVDHIVPQSFLKDDSIDNKVLTRSDKARGKSDNVPSEEVVKKMKNYWRQLLNAKLITQRKFDNLTKAERGGLSELDKAGFIKRQLVETRQITKHVAQILDSRMNTKYDENDKLIREVKVITLKSKLVSDFRKDFQFYKVREINNYHHAHDAYLNAVVGTALIKKYPKLESEFVYGDYKVYDVRKMIAKSEQEIGKATAKYFFYSNIMNFFKTEITLANGEIRKRPLIETNGETGEIVWDKGRDFATVRKVLSMPQVNIVKKTEVQTGGFSKESILPKRNSDKLIARKKDWDPKKYGGFDSPTVAYSVLVVAKVEKGKSKKLKSVKELLGITIMERSSFEKNPIDFLEAKGYKEVKKDLIIKLPKYSLFELENGRKRMLASAGELQKGNELALPSKYVNFLYLASHYEKLKGSPEDNEQKQLFVEQHKHYLDEIIEQISEFSKRVILADANLDKVLSAYNKHRDKPIREQAENIIHLFTLTNLGAPAAFKYFDTTIDRKRYTSTKEVLDATLIHQSITGLYETRIDLSQLGGDGGPAPEAAAKGGSGGTLNLEDEYRLYETSAEPEVSPGSTWLSDFPQAWAETGGMGLAVRQAPLIIPLKATSTPVSIKQYPMSQEAKLGIKPHIQRLLDQGILVPCQSPWNTPLLPVKKPGTNDYRPVQDLREVNKRVEDIHPTVPNPYNLLSGLPPSHRWYTVLDLKDAFFCLRLHPTSQPLFAFEWRDPGMGISGQLTWTRLPQGFKNSPTLFNEALHRDLADFRIQHPDLILLQYVDDILLAATSELDCQQGTRALLLTLGNLGYRASAKKAQLCQKQVKYLGYLLKEGQRWLTEARKETVMGQPTPKTPRQLREFLGKAGFCRLFIPGFAEMAAPLYPLTKPGTLFNWGPDQQKAYQEIKQALLTAPALGLPDLTKPFELFVDEKQGYAKGVLTQKLGPWRRPVAYLSKKLDPVAAGWPPCLRMVAAIAVLRKDAGKLTMGQPLVILAPHAVEALVKQPPDRWLSNARMTHYQAMLLDTDRVQFGPVVALNPATLLPLPEEGAPHDCLEILAETHGTRPDLTDQPIPDADHTWYTDGSSFLQEGQRKAGAAVTTETEVIWARALPAGTSAQRAELIALTQALKMAEGKRLNVYTDSRYAFATAHIHGEIYRRRGWLTSEGREIKNKSEILALLKALFLPKRLSIIHCLGHQKGDSAEARGNRLADQAAREAAIKTPPDTSTLLAGKRTADGSEFEKRTADGSEFESPKKKAKVE

SEQ ID NO: 4529 - protein, 2088 aa, synthetic construct
MPAAKRVKLDGGDKKYSIGLDIGTNSVGWAVITDEYKVPSKKFKVLGNTDRHSIKKNLIGALLFDSGETAEATRLKRTARRRYTRRKNRICYLQEIFSNEMAKVDDSFFHRLEESFLVEEDKKHERHPIFGNIVDEVAYHEKYPTIYHLRKKLVDSTDKADLRLIYLALAHMIKFRGHFLIEGDLNPDNSDVDKLFIQLVQTYNQLFEENPINASGVDAKAILSARLSKSRRLENLIAQLPGEKKNGLFGNLIALSLGLTPNFKSNFDLAEDAKLQLSKDTYDDDLDNLLAQIGDQYADLFLAAKNLSDAILLSDILRVNTEITKAPLSASMIKRYDEHHQDLTLLKALVRQQLPEKYKEIFFDQSKNGYAGYIDGGASQEEFYKFIKPILEKMDGTEELLVKLNREDLLRKQRTFDNGSIPHQIHLGELHAILRRQEDFYPFLKDNREKIEKILTFRIPYYVGPLARGNSRFAWMTRKSEETITPWNFEEVVDKGASAQSFIERMTNFDKNLPNEKVLPKHSLLYEYFTVYNELTKVKYVTEGMRKPAFLSGEQKKAIVDLLFKTNRKVTVKQLKEDYFKKIECFDSVEISGVEDRFNASLGTYHDLLKIIKDKDFLDNEENEDILEDIVLTLTLFEDREMIEERLKTYAHLFDDKVMKQLKRRRYTGWGRLSRKLINGIRDKQSGKTILDFLKSDGFANRNFMQLIHDDSLTFKEDIQKAQVSGQGDSLHEHIANLAGSPAIKKGILQTVKVVDELVKVMGRHKPENIVIEMARENQTTQKGQKNSRERMKRIEEGIKELGSQILKEHPVENTQLQNEKLYLYYLQNGRDMYVDQELDINRLSDYDVDHIVPQSFLKDDSIDNKVLTRSDKARGKSDNVPSEEVVKKMKNYWRQLLNAKLITQRKFDNLTKAERGGLSELDKAGFIKRQLVETRQITKHVAQILDSRMNTKYDENDKLIREVKVITLKSKLVSDFRKDFQFYKVREINNYHHAHDAYLNAVVGTALIKKYPKLESEFVYGDYKVYDVRKMIAKSEQEIGKATAKYFFYSNIMNFFKTEITLANGEIRKRPLIETNGETGEIVWDKGRDFATVRKVLSMPQVNIVKKTEVQTGGFSKESILPKRNSDKLIARKKDWDPKKYGGFDSPTVAYSVLVVAKVEKGKSKKLKSVKELLGITIMERSSFEKNPIDFLEAKGYKEVKKDLIIKLPKYSLFELENGRKRMLASAGELQKGNELALPSKYVNFLYLASHYEKLKGSPEDNEQKQLFVEQHKHYLDEIIEQISEFSKRVILADANLDKVLSAYNKHRDKPIREQAENIIHLFTLTNLGAPAAFKYFDTTIDRKRYTSTKEVLDATLIHQSITGLYETRIDLSQLGGDGGPAPEAAAKGGSGGLDDEYRLYSPLVKPDQNIQFWLEQFPQAWAETAGMGLAKQVPPQVIQLKASATPVSVRQYPLSKEAQEGIRPHVQRLIQQGILVPVQSPWNTPLLPVRKPGTNDYRPVQDLREVNKRVQDIHPTVPNPYNLLCALPPQRSWYTVLDLKDAFFCLRLHPTSQPLFAFEWRDPGTGRTGQLTWTRLPQGFKNSPTIFNEALHRDLANFRIQHPQVTLLQYVDDLLLAGATKQDCLEGTKALLLELSDLGYRASAKKAQICRREVTYLGYSLRDGQRWLTEARKKTVVQIPAPTTAKQVREFLGKAGFCRLFIPGFATLAAPLYPLTKPKGEFSWAPEHQKAFDAIKKALLSAPALALPDVTKPFTLYVDERKGVARGVLTQTLGPWRRPVAYLSKKLDPVASGWPVCLKAIAAVAILVKDADKLTLGQNITVIAPHALENIVRQPPDRWMTNARMTHYQSLLLTERVTFAPPAALNPATLLPEETDEPVTHDCHQLLIEETGVRKDLTDIPLTGEVLTWFTDGSSYVVEGKRMAGAAVVDGTRTIWASSLPEGTSAQKAELMALTQALRLAEGKSINIYTDSRYAFATAHVHGAIYKQRGWLTSAGREIKNKEEILSLLEALHLPKRLAIIHCPGHQKAKDPISRGNQMADRVAKQAAQGVNLLPAGKRTADGSEFEKRTADGSEFESPKKKAKVE

SEQ ID NO: 4530 - protein, 2096 aa, synthetic construct
MPAAKRVKLDGGDKKYSIGLDIGTNSVGWAVITDEYKVPSKKFKVLGNTDRHSIKKNLIGALLFDSGETAEATRLKRTARRRYTRRKNRICYLQEIFSNEMAKVDDSFFHRLEESFLVEEDKKHERHPIFGNIVDEVAYHEKYPTIYHLRKKLVDSTDKADLRLIYLALAHMIKFRGHFLIEGDLNPDNSDVDKLFIQLVQTYNQLFEENPINASGVDAKAILSARLSKSRRLENLIAQLPGEKKNGLFGNLIALSLGLTPNFKSNFDLAEDAKLQLSKDTYDDDLDNLLAQIGDQYADLFLAAKNLSDAILLSDILRVNTEITKAPLSASMIKRYDEHHQDLTLLKALVRQQLPEKYKEIFFDQSKNGYAGYIDGGASQEEFYKFIKPILEKMDGTEELLVKLNREDLLRKQRTFDNGSIPHQIHLGELHAILRRQEDFYPFLKDNREKIEKILTFRIPYYVGPLARGNSRFAWMTRKSEETITPWNFEEVVDKGASAQSFIERMTNFDKNLPNEKVLPKHSLLYEYFTVYNELTKVKYVTEGMRKPAFLSGEQKKAIVDLLFKTNRKVTVKQLKEDYFKKIECFDSVEISGVEDRFNASLGTYHDLLKIIKDKDFLDNEENEDILEDIVLTLTLFEDREMIEERLKTYAHLFDDKVMKQLKRRRYTGWGRLSRKLINGIRDKQSGKTILDFLKSDGFANRNFMQLIHDDSLTFKEDIQKAQVSGQGDSLHEHIANLAGSPAIKKGILQTVKVVDELVKVMGRHKPENIVIEMARENQTTQKGQKNSRERMKRIEEGIKELGSQILKEHPVENTQLQNEKLYLYYLQNGRDMYVDQELDINRLSDYDVDHIVPQSFLKDDSIDNKVLTRSDKARGKSDNVPSEEVVKKMKNYWRQLLNAKLITQRKFDNLTKAERGGLSELDKAGFIKRQLVETRQITKHVAQILDSRMNTKYDENDKLIREVKVITLKSKLVSDFRKDFQFYKVREINNYHHAHDAYLNAVVGTALIKKYPKLESEFVYGDYKVYDVRKMIAKSEQEIGKATAKYFFYSNIMNFFKTEITLANGEIRKRPLIETNGETGEIVWDKGRDFATVRKVLSMPQVNIVKKTEVQTGGFSKESILPKRNSDKLIARKKDWDPKKYGGFDSPTVAYSVLVVAKVEKGKSKKLKSVKELLGITIMERSSFEKNPIDFLEAKGYKEVKKDLIIKLPKYSLFELENGRKRMLASAGELQKGNELALPSKYVNFLYLASHYEKLKGSPEDNEQKQLFVEQHKHYLDEIIEQISEFSKRVILADANLDKVLSAYNKHRDKPIREQAENIIHLFTLTNLGAPAAFKYFDTTIDRKRYTSTKEVLDATLIHQSITGLYETRIDLSQLGGDGGGGGEAAAKGSSGGTLNIEDEHRLHETSKEPDVSLGSTWLSDFPQAWAETGGMGLAVRQAPLIIPLKATSTPVSIKQYPMSQEARLGIKPHIQRLLDQGILVPCQSPWNTPLLPVKKPGTNDYRPVQDLREVNKRVEDIHPTVPNPYNLLSGLPPSHQWYTVLDLKDAFFCLRLHPTSQPLFAFEWRDPEMGISGQLTWTRLPQGFKNSPTLFNEALHRDLADFRIQHPDLILLQYVDDLLLAATSELDCQQGTRALLQTLGNLGYRASAKKAQICQKQVKYLGYLLKEGQRWLTEARKETVMGQPTPKTPRQLREFLGTAGFCRLWIPGFAEMAAPLYPLTKPGTLFNWGPDQQKAYQEIKQALLTAPALGLPDLTKPFELFVDEKQGYAKGVLTQKLGPWRRPVAYLSKKLDPVAAGWPPCLRMVAAIAVLTKDAGKLTMGQPLVILAPHAVEALVKQPPDRWLSNARMTHYQALLLDTDRVQFGPVVALNPATLLPLPEEGLQHNCLDILAEAHGTRPDLTDQPLPDADHTWYTDGSSLLQEGQRKAGAAVTTETEVIWAKALPAGTSAQRAELIALTQALKMAEGKKLNVYTDSRYAFATAHIHGEIYRRRGWLTSEGKEIKNKDEILALLKALFLPKRLSIIHCPGHQKGHSAEARGNRMADQAARKAAITETPDTSTLLAGKRTADGSEFEKRTADGSEFESPKKKAKVE

SEQ ID NO: 4531 - protein, 2094 aa, synthetic construct
MPAAKRVKLDGGDKKYSIGLDIGTNSVGWAVITDEYKVPSKKFKVLGNTDRHSIKKNLIGALLFDSGETAEATRLKRTARRRYTRRKNRICYLQEIFSNEMAKVDDSFFHRLEESFLVEEDKKHERHPIFGNIVDEVAYHEKYPTIYHLRKKLVDSTDKADLRLIYLALAHMIKFRGHFLIEGDLNPDNSDVDKLFIQLVQTYNQLFEENPINASGVDAKAILSARLSKSRRLENLIAQLPGEKKNGLFGNLIALSLGLTPNFKSNFDLAEDAKLQLSKDTYDDDLDNLLAQIGDQYADLFLAAKNLSDAILLSDILRVNTEITKAPLSASMIKRYDEHHQDLTLLKALVRQQLPEKYKEIFFDQSKNGYAGYIDGGASQEEFYKFIKPILEKMDGTEELLVKLNREDLLRKQRTFDNGSIPHQIHLGELHAILRRQEDFYPFLKDNREKIEKILTFRIPYYVGPLARGNSRFAWMTRKSEETITPWNFEEVVDKGASAQSFIERMTNFDKNLPNEKVLPKHSLLYEYFTVYNELTKVKYVTEGMRKPAFLSGEQKKAIVDLLFKTNRKVTVKQLKEDYFKKIECFDSVEISGVEDRFNASLGTYHDLLKIIKDKDFLDNEENEDILEDIVLTLTLFEDREMIEERLKTYAHLFDDKVMKQLKRRRYTGWGRLSRKLINGIRDKQSGKTILDFLKSDGFANRNFMQLIHDDSLTFKEDIQKAQVSGQGDSLHEHIANLAGSPAIKKGILQTVKVVDELVKVMGRHKPENIVIEMARENQTTQKGQKNSRERMKRIEEGIKELGSQILKEHPVENTQLQNEKLYLYYLQNGRDMYVDQELDINRLSDYDVDHIVPQSFLKDDSIDNKVLTRSDKARGKSDNVPSEEVVKKMKNYWRQLLNAKLITQRKFDNLTKAERGGLSELDKAGFIKRQLVETRQITKHVAQILDSRMNTKYDENDKLIREVKVITLKSKLVSDFRKDFQFYKVREINNYHHAHDAYLNAVVGTALIKKYPKLESEFVYGDYKVYDVRKMIAKSEQEIGKATAKYFFYSNIMNFFKTEITLANGEIRKRPLIETNGETGEIVWDKGRDFATVRKVLSMPQVNIVKKTEVQTGGFSKESILPKRNSDKLIARKKDWDPKKYGGFDSPTVAYSVLVVAKVEKGKSKKLKSVKELLGITIMERSSFEKNPIDFLEAKGYKEVKKDLIIKLPKYSLFELENGRKRMLASAGELQKGNELALPSKYVNFLYLASHYEKLKGSPEDNEQKQLFVEQHKHYLDEIIEQISEFSKRVILADANLDKVLSAYNKHRDKPIREQAENIIHLFTLTNLGAPAAFKYFDTTIDRKRYTSTKEVLDATLIHQSITGLYETRIDLSQLGGDGGEAAAKGGGGSSGGVLNLEEEYRLHEKPVPSSIDPSWLQLFPTVWAERAGMGLANQVPPVVVELRSGASPVAVRQYPMSKEAREGIRPHIQRFLDLGVLVPCQSPWNTPLLPVKKPGTNDYRPVQDLREINKRVQDIHPTVPNPYNLLSSLPPSHTWYSVLDLKDAFFCLKLHPNSQPLFAFEWRDPEKGNTGQLTWTRLPQGFKNSPTLFNEALHRDLAPFRALNPQVVLLQYVDDLLVAAPTYRDCKEGTQKLLQELSKLGYRVSAKKAQLCQKEVTYLGYLLKEGKRWLTPARKATVMKIPPPTTPRQVREFLGKAGFCRLFIPGFASLAAPLYPLTKPSIPFIWTEEHQKAFDRIKEALLSAPALALPDLTKPFTLYVDERAGVARGVLTQTLGPWRRPVAYLSKKLDPVASGWPTCLKAVAAVALLLKDADKLTLGQNVTVIASHSLESIVRQPPDRWMTNARMTHYQSLLLNERVSFAPPAVLNPATLLPVESEATPVHRCSEILAEETGTRRDLKDQPLPGVPAWYTDGSSFIAEGKRRAGAAIVDGKRTVWASSLPEGTSAQKAELVALTQALRLAEGKDINIYTDSRYAFATAHIHGAIYKQRGWLTSAGKDIKNKEEILALLEAIHLPKRVAIIHCPGHQKGNDPVATGNRRADEAAKQAALSTRVLAETTKPAGKRTADGSEFEKRTADGSEFESPKKKAKVE

SEQ ID NO: 4532 - protein, 2088 aa, synthetic construct
MPAAKRVKLDGGDKKYSIGLDIGTNSVGWAVITDEYKVPSKKFKVLGNTDRHSIKKNLIGALLFDSGETAEATRLKRTARRRYTRRKNRICYLQEIFSNEMAKVDDSFFHRLEESFLVEEDKKHERHPIFGNIVDEVAYHEKYPTIYHLRKKLVDSTDKADLRLIYLALAHMIKFRGHFLIEGDLNPDNSDVDKLFIQLVQTYNQLFEENPINASGVDAKAILSARLSKSRRLENLIAQLPGEKKNGLFGNLIALSLGLTPNFKSNFDLAEDAKLQLSKDTYDDDLDNLLAQIGDQYADLFLAAKNLSDAILLSDILRVNTEITKAPLSASMIKRYDEHHQDLTLLKALVRQQLPEKYKEIFFDQSKNGYAGYIDGGASQEEFYKFIKPILEKMDGTEELLVKLNREDLLRKQRTFDNGSIPHQIHLGELHAILRRQEDFYPFLKDNREKIEKILTFRIPYYVGPLARGNSRFAWMTRKSEETITPWNFEEVVDKGASAQSFIERMTNFDKNLPNEKVLPKHSLLYEYFTVYNELTKVKYVTEGMRKPAFLSGEQKKAIVDLLFKTNRKVTVKQLKEDYFKKIECFDSVEISGVEDRFNASLGTYHDLLKIIKDKDFLDNEENEDILEDIVLTLTLFEDREMIEERLKTYAHLFDDKVMKQLKRRRYTGWGRLSRKLINGIRDKQSGKTILDFLKSDGFANRNFMQLIHDDSLTFKEDIQKAQVSGQGDSLHEHIANLAGSPAIKKGILQTVKVVDELVKVMGRHKPENIVIEMARENQTTQKGQKNSRERMKRIEEGIKELGSQILKEHPVENTQLQNEKLYLYYLQNGRDMYVDQELDINRLSDYDVDHIVPQSFLKDDSIDNKVLTRSDKARGKSDNVPSEEVVKKMKNYWRQLLNAKLITQRKFDNLTKAERGGLSELDKAGFIKRQLVETRQITKHVAQILDSRMNTKYDENDKLIREVKVITLKSKLVSDFRKDFQFYKVREINNYHHAHDAYLNAVVGTALIKKYPKLESEFVYGDYKVYDVRKMIAKSEQEIGKATAKYFFYSNIMNFFKTEITLANGEIRKRPLIETNGETGEIVWDKGRDFATVRKVLSMPQVNIVKKTEVQTGGFSKESILPKRNSDKLIARKKDWDPKKYGGFDSPTVAYSVLVVAKVEKGKSKKLKSVKELLGITIMERSSFEKNPIDFLEAKGYKEVKKDLIIKLPKYSLFELENGRKRMLASAGELQKGNELALPSKYVNFLYLASHYEKLKGSPEDNEQKQLFVEQHKHYLDEIIEQISEFSKRVILADANLDKVLSAYNKHRDKPIREQAENIIHLFTLTNLGAPAAFKYFDTTIDRKRYTSTKEVLDATLIHQSITGLYETRIDLSQLGGDGGGSSGGGPAPGGTLQLDDEYRLYSPLVKPDQNIQFWLEQFPQAWAETAGMGLAKQVPPQVIQLKASATPVSVRQYPLSKEAQEGIRPHVQRLIQQGILVPVQSPWNTPLLPVRKPGTNDYRPVQDLREVNKRVQDIHPTVPNPYNLLCALPPQRSWYTVLDLKDAFFCLRLHPTSQPLFAFEWRDPGTGRTGQLTWTRLPQGFKNSPTIFNEALHRDLANFRIQHPQVTLLQYVDDLLLAGATKQDCLEGTKALLLELSDLGYRASAKKAQICRREVTYLGYSLRDGQRWLTEARKKTVVQIPAPTTAKQVREFLGTAGFCRLWIPGFATLAAPLYPLTKPKGEFSWAPEHQKAFDAIKKALLSAPALALPDVTKPFTLYVDERKGVARGVLTQTLGPWRRPVAYLSKKLDPVASGWPVCLKAIAAVAILVKDADKLTLGQNITVIAPHALENIVRQPPDRWMTNARMTHYQSLLLTERVTFAPPAALNPATLLPEETDEPVTHDCHQLLIEETGVRKDLTDIPLTGEVLTWFTDGSSYVVEGKRMAGAAVVDGTRTIWASSLPEGTSAQKAELMALTQALRLAEGKSINIYTDSRYAFATAHVHGAIYKQRGWLTSAGREIKNKEEILSLLEALHLPKRLAIIHCPGHQKAKDPISRGNQMADRVAKQAAQGVNLLAGKRTADGSEFEKRTADGSEFESPKKKAKVE

SEQ ID NO: 4533 - protein, 2094 aa, synthetic construct
MPAAKRVKLDGGDKKYSIGLDIGTNSVGWAVITDEYKVPSKKFKVLGNTDRHSIKKNLIGALLFDSGETAEATRLKRTARRRYTRRKNRICYLQEIFSNEMAKVDDSFFHRLEESFLVEEDKKHERHPIFGNIVDEVAYHEKYPTIYHLRKKLVDSTDKADLRLIYLALAHMIKFRGHFLIEGDLNPDNSDVDKLFIQLVQTYNQLFEENPINASGVDAKAILSARLSKSRRLENLIAQLPGEKKNGLFGNLIALSLGLTPNFKSNFDLAEDAKLQLSKDTYDDDLDNLLAQIGDQYADLFLAAKNLSDAILLSDILRVNTEITKAPLSASMIKRYDEHHQDLTLLKALVRQQLPEKYKEIFFDQSKNGYAGYIDGGASQEEFYKFIKPILEKMDGTEELLVKLNREDLLRKQRTFDNGSIPHQIHLGELHAILRRQEDFYPFLKDNREKIEKILTFRIPYYVGPLARGNSRFAWMTRKSEETITPWNFEEVVDKGASAQSFIERMTNFDKNLPNEKVLPKHSLLYEYFTVYNELTKVKYVTEGMRKPAFLSGEQKKAIVDLLFKTNRKVTVKQLKEDYFKKIECFDSVEISGVEDRFNASLGTYHDLLKIIKDKDFLDNEENEDILEDIVLTLTLFEDREMIEERLKTYAHLFDDKVMKQLKRRRYTGWGRLSRKLINGIRDKQSGKTILDFLKSDGFANRNFMQLIHDDSLTFKEDIQKAQVSGQGDSLHEHIANLAGSPAIKKGILQTVKVVDELVKVMGRHKPENIVIEMARENQTTQKGQKNSRERMKRIEEGIKELGSQILKEHPVENTQLQNEKLYLYYLQNGRDMYVDQELDINRLSDYDVDHIVPQSFLKDDSIDNKVLTRSDKARGKSDNVPSEEVVKKMKNYWRQLLNAKLITQRKFDNLTKAERGGLSELDKAGFIKRQLVETRQITKHVAQILDSRMNTKYDENDKLIREVKVITLKSKLVSDFRKDFQFYKVREINNYHHAHDAYLNAVVGTALIKKYPKLESEFVYGDYKVYDVRKMIAKSEQEIGKATAKYFFYSNIMNFFKTEITLANGEIRKRPLIETNGETGEIVWDKGRDFATVRKVLSMPQVNIVKKTEVQTGGFSKESILPKRNSDKLIARKKDWDPKKYGGFDSPTVAYSVLVVAKVEKGKSKKLKSVKELLGITIMERSSFEKNPIDFLEAKGYKEVKKDLIIKLPKYSLFELENGRKRMLASAGELQKGNELALPSKYVNFLYLASHYEKLKGSPEDNEQKQLFVEQHKHYLDEIIEQISEFSKRVILADANLDKVLSAYNKHRDKPIREQAENIIHLFTLTNLGAPAAFKYFDTTIDRKRYTSTKEVLDATLIHQSITGLYETRIDLSQLGGDGGPAPGSSGGGGGTLNLEDEYRLYETSAEPEVSPGSTWLSDFPQAWAETGGMGLAVRQAPLIIPLKATSTPVSIKQYPMSQEAKLGIKPHIQRLLDQGILVPCQSPWNTPLLPVKKPGTNDYRPVQDLREVNKRVEDIHPTVPNPYNLLSGLPPSHRWYTVLDLKDAFFCLRLHPTSQPLFAFEWRDPGMGISGQLTWTRLPQGFKNSPTLFNEALHRDLADFRIQHPDLILLQYVDDILLAATSELDCQQGTRALLLTLGNLGYRASAKKAQLCQKQVKYLGYLLKEGQRWLTEARKETVMGQPTPKTPRQLREFLGKAGFCRLFIPGFAEMAAPLYPLTKPGTLFNWGPDQQKAYQEIKQALLTAPALGLPDLTKPFELFVDEKQGYAKGVLTQKLGPWRRPVAYLSKKLDPVAAGWPPCLRMVAAIAVLRKDAGKLTMGQPLVILAPHAVEALVKQPPDRWLSNARMTHYQAMLLDTDRVQFGPVVALNPATLLPLPEEGAPHDCLEILAETHGTRPDLTDQPIPDADHTWYTDGSSFLQEGQRKAGAAVTTETEVIWARALPAGTSAQRAELIALTQALKMAEGKRLNVYTDSRYAFATAHIHGEIYRRRGWLTSEGREIKNKSEILALLKALFLPKRLSIIHCLGHQKGDSAEARGNRLADQAAREAAIKTPPDTSTLLAGKRTADGSEFEKRTADGSEFESPKKKAKVE

SEQ ID NO: 4534 - protein, 2096 aa, synthetic construct
MPAAKRVKLDGGDKKYSIGLDIGTNSVGWAVITDEYKVPSKKFKVLGNTDRHSIKKNLIGALLFDSGETAEATRLKRTARRRYTRRKNRICYLQEIFSNEMAKVDDSFFHRLEESFLVEEDKKHERHPIFGNIVDEVAYHEKYPTIYHLRKKLVDSTDKADLRLIYLALAHMIKFRGHFLIEGDLNPDNSDVDKLFIQLVQTYNQLFEENPINASGVDAKAILSARLSKSRRLENLIAQLPGEKKNGLFGNLIALSLGLTPNFKSNFDLAEDAKLQLSKDTYDDDLDNLLAQIGDQYADLFLAAKNLSDAILLSDILRVNTEITKAPLSASMIKRYDEHHQDLTLLKALVRQQLPEKYKEIFFDQSKNGYAGYIDGGASQEEFYKFIKPILEKMDGTEELLVKLNREDLLRKQRTFDNGSIPHQIHLGELHAILRRQEDFYPFLKDNREKIEKILTFRIPYYVGPLARGNSRFAWMTRKSEETITPWNFEEVVDKGASAQSFIERMTNFDKNLPNEKVLPKHSLLYEYFTVYNELTKVKYVTEGMRKPAFLSGEQKKAIVDLLFKTNRKVTVKQLKEDYFKKIECFDSVEISGVEDRFNASLGTYHDLLKIIKDKDFLDNEENEDILEDIVLTLTLFEDREMIEERLKTYAHLFDDKVMKQLKRRRYTGWGRLSRKLINGIRDKQSGKTILDFLKSDGFANRNFMQLIHDDSLTFKEDIQKAQVSGQGDSLHEHIANLAGSPAIKKGILQTVKVVDELVKVMGRHKPENIVIEMARENQTTQKGQKNSRERMKRIEEGIKELGSQILKEHPVENTQLQNEKLYLYYLQNGRDMYVDQELDINRLSDYDVDHIVPQSFLKDDSIDNKVLTRSDKARGKSDNVPSEEVVKKMKNYWRQLLNAKLITQRKFDNLTKAERGGLSELDKAGFIKRQLVETRQITKHVAQILDSRMNTKYDENDKLIREVKVITLKSKLVSDFRKDFQFYKVREINNYHHAHDAYLNAVVGTALIKKYPKLESEFVYGDYKVYDVRKMIAKSEQEIGKATAKYFFYSNIMNFFKTEITLANGEIRKRPLIETNGETGEIVWDKGRDFATVRKVLSMPQVNIVKKTEVQTGGFSKESILPKRNSDKLIARKKDWDPKKYGGFDSPTVAYSVLVVAKVEKGKSKKLKSVKELLGITIMERSSFEKNPIDFLEAKGYKEVKKDLIIKLPKYSLFELENGRKRMLASAGELQKGNELALPSKYVNFLYLASHYEKLKGSPEDNEQKQLFVEQHKHYLDEIIEQISEFSKRVILADANLDKVLSAYNKHRDKPIREQAENIIHLFTLTNLGAPAAFKYFDTTIDRKRYTSTKEVLDATLIHQSITGLYETRIDLSQLGGDGGGGGPAPEAAAKGGTLNIEDEHRLHETSKEPDVSLGSTWLSDFPQAWAETGGMGLAVRQAPLIIPLKATSTPVSIKQYPMSQEARLGIKPHIQRLLDQGILVPCQSPWNTPLLPVKKPGTNDYRPVQDLREVNKRVEDIHPTVPNPYNLLSGLPPSHQWYTVLDLKDAFFCLRLHPTSQPLFAFEWRDPEMGISGQLTWTRLPQGFKNSPTLFNEALHRDLADFRIQHPDLILLQYVDDLLLAATSELDCQQGTRALLQTLGNLGYRASAKKAQICQKQVKYLGYLLKEGQRWLTEARKETVMGQPTPKTPRQLREFLGTAGFCRLWIPGFAEMAAPLYPLTKPGTLFNWGPDQQKAYQEIKQALLTAPALGLPDLTKPFELFVDEKQGYAKGVLTQKLGPWRRPVAYLSKKLDPVAAGWPPCLRMVAAIAVLTKDAGKLTMGQPLVILAPHAVEALVKQPPDRWLSNARMTHYQALLLDTDRVQFGPVVALNPATLLPLPEEGLQHNCLDILAEAHGTRPDLTDQPLPDADHTWYTDGSSLLQEGQRKAGAAVTTETEVIWAKALPAGTSAQRAELIALTQALKMAEGKKLNVYTDSRYAFATAHIHGEIYRRRGWLTSEGKEIKNKDEILALLKALFLPKRLSIIHCPGHQKGHSAEARGNRMADQAARKAAITETPDTSTLLAGKRTADGSEFEKRTADGSEFESPKKKAKVE

SEQ ID NO: 4535 - protein, 2096 aa, synthetic construct
MPAAKRVKLDGGDKKYSIGLDIGTNSVGWAVITDEYKVPSKKFKVLGNTDRHSIKKNLIGALLFDSGETAEATRLKRTARRRYTRRKNRICYLQEIFSNEMAKVDDSFFHRLEESFLVEEDKKHERHPIFGNIVDEVAYHEKYPTIYHLRKKLVDSTDKADLRLIYLALAHMIKFRGHFLIEGDLNPDNSDVDKLFIQLVQTYNQLFEENPINASGVDAKAILSARLSKSRRLENLIAQLPGEKKNGLFGNLIALSLGLTPNFKSNFDLAEDAKLQLSKDTYDDDLDNLLAQIGDQYADLFLAAKNLSDAILLSDILRVNTEITKAPLSASMIKRYDEHHQDLTLLKALVRQQLPEKYKEIFFDQSKNGYAGYIDGGASQEEFYKFIKPILEKMDGTEELLVKLNREDLLRKQRTFDNGSIPHQIHLGELHAILRRQEDFYPFLKDNREKIEKILTFRIPYYVGPLARGNSRFAWMTRKSEETITPWNFEEVVDKGASAQSFIERMTNFDKNLPNEKVLPKHSLLYEYFTVYNELTKVKYVTEGMRKPAFLSGEQKKAIVDLLFKTNRKVTVKQLKEDYFKKIECFDSVEISGVEDRFNASLGTYHDLLKIIKDKDFLDNEENEDILEDIVLTLTLFEDREMIEERLKTYAHLFDDKVMKQLKRRRYTGWGRLSRKLINGIRDKQSGKTILDFLKSDGFANRNFMQLIHDDSLTFKEDIQKAQVSGQGDSLHEHIANLAGSPAIKKGILQTVKVVDELVKVMGRHKPENIVIEMARENQTTQKGQKNSRERMKRIEEGIKELGSQILKEHPVENTQLQNEKLYLYYLQNGRDMYVDQELDINRLSDYDVDHIVPQSFLKDDSIDNKVLTRSDKARGKSDNVPSEEVVKKMKNYWRQLLNAKLITQRKFDNLTKAERGGLSELDKAGFIKRQLVETRQITKHVAQILDSRMNTKYDENDKLIREVKVITLKSKLVSDFRKDFQFYKVREINNYHHAHDAYLNAVVGTALIKKYPKLESEFVYGDYKVYDVRKMIAKSEQEIGKATAKYFFYSNIMNFFKTEITLANGEIRKRPLIETNGETGEIVWDKGRDFATVRKVLSMPQVNIVKKTEVQTGGFSKESILPKRNSDKLIARKKDWDPKKYGGFDSPTVAYSVLVVAKVEKGKSKKLKSVKELLGITIMERSSFEKNPIDFLEAKGYKEVKKDLIIKLPKYSLFELENGRKRMLASAGELQKGNELALPSKYVNFLYLASHYEKLKGSPEDNEQKQLFVEQHKHYLDEIIEQISEFSKRVILADANLDKVLSAYNKHRDKPIREQAENIIHLFTLTNLGAPAAFKYFDTTIDRKRYTSTKEVLDATLIHQSITGLYETRIDLSQLGGDGGEAAAKGGGPAPGGTLNIEDEHRLHETSKEPDVSLGSTWLSDFPQAWAETGGMGLAVRQAPLIIPLKATSTPVSIKQYPMSQEARLGIKPHIQRLLDQGILVPCQSPWNTPLLPVKKPGTNDYRPVQDLREVNKRVEDIHPTVPNPYNLLSGLPPSHQWYTVLDLKDAFFCLRLHPTSQPLFAFEWRDPEMGISGQLTWTRLPQGFKNSPTLFNEALHRDLADFRIQHPDLILLQYVDDLLLAATSELDCQQGTRALLQTLGNLGYRASAKKAQICQKQVKYLGYLLKEGQRWLTEARKETVMGQPTPKTPRQLREFLGTAGFCRLWIPGFAEMAAPLYPLTKPGTLFNWGPDQQKAYQEIKQALLTAPALGLPDLTKPFELFVDEKQGYAKGVLTQKLGPWRRPVAYLSKKLDPVAAGWPPCLRMVAAIAVLTKDAGKLTMGQPLVILAPHAVEALVKQPPDRWLSNARMTHYQALLLDTDRVQFGPVVALNPATLLPLPEEGLQHNCLDILAEAHGTRPDLTDQPLPDADHTWYTDGSSLLQEGQRKAGAAVTTETEVIWAKALPAGTSAQRAELIALTQALKMAEGKKLNVYTDSRYAFATAHIHGEIYRRRGWLTSEGKEIKNKDEILALLKALFLPKRLSIIHCPGHQKGHSAEARGNRMADQAARKAAITETPDTSTLLAGKRTADGSEFEKRTADGSEFESPKKKAKVE

SEQ ID NO: 4536 - protein, 2096 aa, synthetic construct
MPAAKRVKLDGGDKKYSIGLDIGTNSVGWAVITDEYKVPSKKFKVLGNTDRHSIKKNLIGALLFDSGETAEATRLKRTARRRYTRRKNRICYLQEIFSNEMAKVDDSFFHRLEESFLVEEDKKHERHPIFGNIVDEVAYHEKYPTIYHLRKKLVDSTDKADLRLIYLALAHMIKFRGHFLIEGDLNPDNSDVDKLFIQLVQTYNQLFEENPINASGVDAKAILSARLSKSRRLENLIAQLPGEKKNGLFGNLIALSLGLTPNFKSNFDLAEDAKLQLSKDTYDDDLDNLLAQIGDQYADLFLAAKNLSDAILLSDILRVNTEITKAPLSASMIKRYDEHHQDLTLLKALVRQQLPEKYKEIFFDQSKNGYAGYIDGGASQEEFYKFIKPILEKMDGTEELLVKLNREDLLRKQRTFDNGSIPHQIHLGELHAILRRQEDFYPFLKDNREKIEKILTFRIPYYVGPLARGNSRFAWMTRKSEETITPWNFEEVVDKGASAQSFIERMTNFDKNLPNEKVLPKHSLLYEYFTVYNELTKVKYVTEGMRKPAFLSGEQKKAIVDLLFKTNRKVTVKQLKEDYFKKIECFDSVEISGVEDRFNASLGTYHDLLKIIKDKDFLDNEENEDILEDIVLTLTLFEDREMIEERLKTYAHLFDDKVMKQLKRRRYTGWGRLSRKLINGIRDKQSGKTILDFLKSDGFANRNFMQLIHDDSLTFKEDIQKAQVSGQGDSLHEHIANLAGSPAIKKGILQTVKVVDELVKVMGRHKPENIVIEMARENQTTQKGQKNSRERMKRIEEGIKELGSQILKEHPVENTQLQNEKLYLYYLQNGRDMYVDQELDINRLSDYDVDHIVPQSFLKDDSIDNKVLTRSDKARGKSDNVPSEEVVKKMKNYWRQLLNAKLITQRKFDNLTKAERGGLSELDKAGFIKRQLVETRQITKHVAQILDSRMNTKYDENDKLIREVKVITLKSKLVSDFRKDFQFYKVREINNYHHAHDAYLNAVVGTALIKKYPKLESEFVYGDYKVYDVRKMIAKSEQEIGKATAKYFFYSNIMNFFKTEITLANGEIRKRPLIETNGETGEIVWDKGRDFATVRKVLSMPQVNIVKKTEVQTGGFSKESILPKRNSDKLIARKKDWDPKKYGGFDSPTVAYSVLVVAKVEKGKSKKLKSVKELLGITIMERSSFEKNPIDFLEAKGYKEVKKDLIIKLPKYSLFELENGRKRMLASAGELQKGNELALPSKYVNFLYLASHYEKLKGSPEDNEQKQLFVEQHKHYLDEIIEQISEFSKRVILADANLDKVLSAYNKHRDKPIREQAENIIHLFTLTNLGAPAAFKYFDTTIDRKRYTSTKEVLDATLIHQSITGLYETRIDLSQLGGDGGEAAAKPAPGGGGGTLNIEDEYRLHETSKEPDVSLGSTWLSDFPQAWAETGGMGLAVRQAPLIIPLKATSTPVSIKQYPMSQEARLGIKPHIQRLLDQGILVPCQSPWNTPLLPVKKPGTNDYRPVQDLREVNKRVEDIHPTVPNPYNLLSGLPPSHQWYTVLDLKDAFFCLRLHPTSQPLFAFEWRDPEMGISGQLTWTRLPQGFKNSPTLFNEALHRDLAGFRIQHPDLILLQYVDDLLLAATSELDCQQGTRALLQTLGDLGYRASAKKAQICQKQVKYLGYLLKEGQRWLTEARKETVMGQPIPKTPRQLREFLGKAGFCRLFIPGFAEMAAPLYPLTKPGTLFNWGPDQQKAFQEIKQALLTAPALGLPDLTKPFELFVDEKQGYAKGVLTQKLGPWRRPVAYLSKKLDPVAAGWPPCLRMVAAIAVLTKDAGKLTMGQPLVILAPHAVEALVKQPPDRWLSNARMTHYQALLLDTDRVQFGPVVALNPATLLPLPEEGLQHDCLDILAEAHGTRSDLMDQPLPDADHTWYTDGSSFLQEGQRKAGAAVTTETEVIWARALPAGTSAQRAELIALTQALKMAEGKKLNVYTDSRYAFATAHIHGEIYRRRGWLTSEGKEIKNKDEILALLKALFLPKRLSIIHCPGHQKGNSAEARGNRMADQAAREVATRETPETSTLLAGKRTADGSEFEKRTADGSEFESPKKKAKVE

SEQ ID NO: 4537 - protein, 2127 aa, synthetic construct
MPAAKRVKLDGGDKKYSIGLDIGTNSVGWAVITDEYKVPSKKFKVLGNTDRHSIKKNLIGALLFDSGETAEATRLKRTARRRYTRRKNRICYLQEIFSNEMAKVDDSFFHRLEESFLVEEDKKHERHPIFGNIVDEVAYHEKYPTIYHLRKKLVDSTDKADLRLIYLALAHMIKFRGHFLIEGDLNPDNSDVDKLFIQLVQTYNQLFEENPINASGVDAKAILSARLSKSRRLENLIAQLPGEKKNGLFGNLIALSLGLTPNFKSNFDLAEDAKLQLSKDTYDDDLDNLLAQIGDQYADLFLAAKNLSDAILLSDILRVNTEITKAPLSASMIKRYDEHHQDLTLLKALVRQQLPEKYKEIFFDQSKNGYAGYIDGGASQEEFYKFIKPILEKMDGTEELLVKLNREDLLRKQRTFDNGSIPHQIHLGELHAILRRQEDFYPFLKDNREKIEKILTFRIPYYVGPLARGNSRFAWMTRKSEETITPWNFEEVVDKGASAQSFIERMTNFDKNLPNEKVLPKHSLLYEYFTVYNELTKVKYVTEGMRKPAFLSGEQKKAIVDLLFKTNRKVTVKQLKEDYFKKIECFDSVEISGVEDRFNASLGTYHDLLKIIKDKDFLDNEENEDILEDIVLTLTLFEDREMIEERLKTYAHLFDDKVMKQLKRRRYTGWGRLSRKLINGIRDKQSGKTILDFLKSDGFANRNFMQLIHDDSLTFKEDIQKAQVSGQGDSLHEHIANLAGSPAIKKGILQTVKVVDELVKVMGRHKPENIVIEMARENQTTQKGQKNSRERMKRIEEGIKELGSQILKEHPVENTQLQNEKLYLYYLQNGRDMYVDQELDINRLSDYDVDHIVPQSFLKDDSIDNKVLTRSDKARGKSDNVPSEEVVKKMKNYWRQLLNAKLITQRKFDNLTKAERGGLSELDKAGFIKRQLVETRQITKHVAQILDSRMNTKYDENDKLIREVKVITLKSKLVSDFRKDFQFYKVREINNYHHAHDAYLNAVVGTALIKKYPKLESEFVYGDYKVYDVRKMIAKSEQEIGKATAKYFFYSNIMNFFKTEITLANGEIRKRPLIETNGETGEIVWDKGRDFATVRKVLSMPQVNIVKKTEVQTGGFSKESILPKRNSDKLIARKKDWDPKKYGGFDSPTVAYSVLVVAKVEKGKSKKLKSVKELLGITIMERSSFEKNPIDFLEAKGYKEVKKDLIIKLPKYSLFELENGRKRMLASAGELQKGNELALPSKYVNFLYLASHYEKLKGSPEDNEQKQLFVEQHKHYLDEIIEQISEFSKRVILADANLDKVLSAYNKHRDKPIREQAENIIHLFTLTNLGAPAAFKYFDTTIDRKRYTSTKEVLDATLIHQSITGLYETRIDLSQLGGDGGPAPEAAAKGGGGGLLGRDLLTKLKAQIQFSTEGPQVTWEDRPAMCLVLNLEEEYRLHEKPVPPSIDPSWLQLFPMVWAEKAGMGLANQVPPVVVELKSDASPVAVRQYPMSKEAREGIRPHIQRFLDLGILVPCQSPWNTPLLPVKKPGTNDYRPVQDLREVNKRVQDIHPTVPNPYNLLSSLPPSHTWYSVLDLKDAFFCLKLHPNSQPLFAFEWRDPEKGNTGQLTWTRLPQGFKNSPTLFNEALHRDLASFRALNPQVVMLQYVDDLLVAAPTYRDCKEGTRRLLQELSKLGYRVSAKKAQLCREEVTYLGYLLKGGKRWLTPARKATVMKIPTPTTPRQVREFLGTAGFCRLWIPGFASLAAPLYPLTRPKVPFTWTEAHQEAFGRIKEALLSAPALALPDLTKPFALYVDEKEGVARGVLTQTLGPWRRPVAYLSKKLDPVASGWPTCLKAIAAVALLLKDADKLTLGQNVLVIAPHNLESIVRQPPDRWMTNARMTHYQSLLLNERVSFAPPAILNPATLLPVESDDTPIHICSEILAEETGTRPDLRDQPLPGVPAWYTDGSSFIMDGRRQAGAAIVDNKRTVWASNLPEGTSAQKAELIALTQALRLAEGKSINIYTDSRYAFATAHVHGAIYKQRGWLTSAGKDIKNKEEILALLEAIHLPKRVAIIHCPGHQRGTDPVATGNRKADEAAKQAAQSTRILTETTKNAGKRTADGSEFEKRTADGSEFESPKKKAKVE

SEQ ID NO: 4538 - protein, 2096 aa, synthetic construct
MPAAKRVKLDGGDKKYSIGLDIGTNSVGWAVITDEYKVPSKKFKVLGNTDRHSIKKNLIGALLFDSGETAEATRLKRTARRRYTRRKNRICYLQEIFSNEMAKVDDSFFHRLEESFLVEEDKKHERHPIFGNIVDEVAYHEKYPTIYHLRKKLVDSTDKADLRLIYLALAHMIKFRGHFLIEGDLNPDNSDVDKLFIQLVQTYNQLFEENPINASGVDAKAILSARLSKSRRLENLIAQLPGEKKNGLFGNLIALSLGLTPNFKSNFDLAEDAKLQLSKDTYDDDLDNLLAQIGDQYADLFLAAKNLSDAILLSDILRVNTEITKAPLSASMIKRYDEHHQDLTLLKALVRQQLPEKYKEIFFDQSKNGYAGYIDGGASQEEFYKFIKPILEKMDGTEELLVKLNREDLLRKQRTFDNGSIPHQIHLGELHAILRRQEDFYPFLKDNREKIEKILTFRIPYYVGPLARGNSRFAWMTRKSEETITPWNFEEVVDKGASAQSFIERMTNFDKNLPNEKVLPKHSLLYEYFTVYNELTKVKYVTEGMRKPAFLSGEQKKAIVDLLFKTNRKVTVKQLKEDYFKKIECFDSVEISGVEDRFNASLGTYHDLLKIIKDKDFLDNEENEDILEDIVLTLTLFEDREMIEERLKTYAHLFDDKVMKQLKRRRYTGWGRLSRKLINGIRDKQSGKTILDFLKSDGFANRNFMQLIHDDSLTFKEDIQKAQVSGQGDSLHEHIANLAGSPAIKKGILQTVKVVDELVKVMGRHKPENIVIEMARENQTTQKGQKNSRERMKRIEEGIKELGSQILKEHPVENTQLQNEKLYLYYLQNGRDMYVDQELDINRLSDYDVDHIVPQSFLKDDSIDNKVLTRSDKARGKSDNVPSEEVVKKMKNYWRQLLNAKLITQRKFDNLTKAERGGLSELDKAGFIKRQLVETRQITKHVAQILDSRMNTKYDENDKLIREVKVITLKSKLVSDFRKDFQFYKVREINNYHHAHDAYLNAVVGTALIKKYPKLESEFVYGDYKVYDVRKMIAKSEQEIGKATAKYFFYSNIMNFFKTEITLANGEIRKRPLIETNGETGEIVWDKGRDFATVRKVLSMPQVNIVKKTEVQTGGFSKESILPKRNSDKLIARKKDWDPKKYGGFDSPTVAYSVLVVAKVEKGKSKKLKSVKELLGITIMERSSFEKNPIDFLEAKGYKEVKKDLIIKLPKYSLFELENGRKRMLASAGELQKGNELALPSKYVNFLYLASHYEKLKGSPEDNEQKQLFVEQHKHYLDEIIEQISEFSKRVILADANLDKVLSAYNKHRDKPIREQAENIIHLFTLTNLGAPAAFKYFDTTIDRKRYTSTKEVLDATLIHQSITGLYETRIDLSQLGGDGGGSSEAAAKPAPGGTLNIEDEYRLHETSKEPDVPLGSTWLSDFPQAWAETGGMGLAVRQAPLIIPLKATSTPVSIKQYPMSQEARLGIKPHIQRLLDQGILVPCQSPWNTPLLPVKKPGTNDYRPVQDLREVNKRVEDIHPTVPNPYNLLSGLPPSHQWYTVLDLKDAFFCLRLHPTSQPLFAFEWRDPEMGISGQLTWTRLPQGFKNSPTLFNEALHRDLADFRIQHPDLILLQYVDDLLLAATSEQDCQRGTRALLQTLGNLGYRASAKKAQICQKQVKYLGYLLKEGQRWLTEARKETVMGQPTPKTPRQLREFLGTAGFCRLWIPGFAEMAAPLYPLTKPGTLFNWGPDQQKAYQEIKQALLTAPALGLPDLTKPFELFVDEKQGYAKGVLTQKLGPWRRPVAYLSKKLDPVAAGWPPCLRMVAAIAVLTKDAGKLTMGQPLVILAPHAVEALVKQPPDRWLSNARMTHYQAMLLDTDRVQFGPVVALNPATLLPLPEKEAPHDCLEILAETHGTRPDLTDQPIPDADYTWYTDGSSFLQEGQRRAGAAVTTETEVIWARALPAGTSAQRAELIALTQALKMAEGKKLNVYTDSRYAFATAHVHGEIYRRRGWLTSEGREIKNKNEILALLKALFLPKRLSIIHCPGHQKGNSAEARGNRMADQAAREAAMKAVLETSTLLAGKRTADGSEFEKRTADGSEFESPKKKAKVE

SEQ ID NO: 4539 - protein, 2098 aa, synthetic construct
MPAAKRVKLDGGDKKYSIGLDIGTNSVGWAVITDEYKVPSKKFKVLGNTDRHSIKKNLIGALLFDSGETAEATRLKRTARRRYTRRKNRICYLQEIFSNEMAKVDDSFFHRLEESFLVEEDKKHERHPIFGNIVDEVAYHEKYPTIYHLRKKLVDSTDKADLRLIYLALAHMIKFRGHFLIEGDLNPDNSDVDKLFIQLVQTYNQLFEENPINASGVDAKAILSARLSKSRRLENLIAQLPGEKKNGLFGNLIALSLGLTPNFKSNFDLAEDAKLQLSKDTYDDDLDNLLAQIGDQYADLFLAAKNLSDAILLSDILRVNTEITKAPLSASMIKRYDEHHQDLTLLKALVRQQLPEKYKEIFFDQSKNGYAGYIDGGASQEEFYKFIKPILEKMDGTEELLVKLNREDLLRKQRTFDNGSIPHQIHLGELHAILRRQEDFYPFLKDNREKIEKILTFRIPYYVGPLARGNSRFAWMTRKSEETITPWNFEEVVDKGASAQSFIERMTNFDKNLPNEKVLPKHSLLYEYFTVYNELTKVKYVTEGMRKPAFLSGEQKKAIVDLLFKTNRKVTVKQLKEDYFKKIECFDSVEISGVEDRFNASLGTYHDLLKIIKDKDFLDNEENEDILEDIVLTLTLFEDREMIEERLKTYAHLFDDKVMKQLKRRRYTGWGRLSRKLINGIRDKQSGKTILDFLKSDGFANRNFMQLIHDDSLTFKEDIQKAQVSGQGDSLHEHIANLAGSPAIKKGILQTVKVVDELVKVMGRHKPENIVIEMARENQTTQKGQKNSRERMKRIEEGIKELGSQILKEHPVENTQLQNEKLYLYYLQNGRDMYVDQELDINRLSDYDVDHIVPQSFLKDDSIDNKVLTRSDKARGKSDNVPSEEVVKKMKNYWRQLLNAKLITQRKFDNLTKAERGGLSELDKAGFIKRQLVETRQITKHVAQILDSRMNTKYDENDKLIREVKVITLKSKLVSDFRKDFQFYKVREINNYHHAHDAYLNAVVGTALIKKYPKLESEFVYGDYKVYDVRKMIAKSEQEIGKATAKYFFYSNIMNFFKTEITLANGEIRKRPLIETNGETGEIVWDKGRDFATVRKVLSMPQVNIVKKTEVQTGGFSKESILPKRNSDKLIARKKDWDPKKYGGFDSPTVAYSVLVVAKVEKGKSKKLKSVKELLGITIMERSSFEKNPIDFLEAKGYKEVKKDLIIKLPKYSLFELENGRKRMLASAGELQKGNELALPSKYVNFLYLASHYEKLKGSPEDNEQKQLFVEQHKHYLDEIIEQISEFSKRVILADANLDKVLSAYNKHRDKPIREQAENIIHLFTLTNLGAPAAFKYFDTTIDRKRYTSTKEVLDATLIHQSITGLYETRIDLSQLGGDGGGSSPAPEAAAKGGTAPLEEEYRLFLEAPIQNVTLLEQWKREIPKVWAEINPPGLASTQAPIHVQLLSTALPVRVRQYPITLEAKRSLRETIRKFRAAGILRPVHSPWNTPLLPVRKSGTSEYRMVQDLREVNKRVETIHPTVPNPYTLLSLLPPDRIWYSVLDLKDAFFCIPLAPESQLIFAFEWADAEEGESGQLTWTRLPQGFKNSPTLFNEALNRDLQGFRLDHPSVSLLQYVDDLLIAADTQAACLSATRDLLMTLAELGYRVSGKKAQLCQEEVTYLGFKIHKGSRSLSNSRTQAILQIPVPKTKRQVREFLGKIGYCRLFIPGFAELAQPLYAATRPGNDPLVWGEKEEEAFQSLKLALTQPPALALPSLDKPFQLFVEETSGAAKGVLTQALGPWKRPVAYLSKRLDPVAAGWPRCLRAIAAAALLTREASKLTFGQDIEITSSHNLESLLRSPPDKWLTNARITQYQVLLLDPPRVRFKQTAALNPATLLPETDDTLPIHHCLDTLDSLTSTRPDLTDQPLAQAEATLFTDGSSYIRDGKRYAGAAVVTLDSVIWAEPLPIGTSAQKAELIALTKALEWSKDKSVNIYTDSRYAFATLHVHGMIYRERGWLTAGGKAIKNAPEILALLTAVWLPKRVAVMHCKGHQKDDAPTSTGNRRADEVAREVAIRPLSTQATISAGKRTADGSEFEKRTADGSEFESPKKKAKVE

SEQ ID NO: 4540 - protein, 2131 aa, synthetic construct
MPAAKRVKLDGGDKKYSIGLDIGTNSVGWAVITDEYKVPSKKFKVLGNTDRHSIKKNLIGALLFDSGETAEATRLKRTARRRYTRRKNRICYLQEIFSNEMAKVDDSFFHRLEESFLVEEDKKHERHPIFGNIVDEVAYHEKYPTIYHLRKKLVDSTDKADLRLIYLALAHMIKFRGHFLIEGDLNPDNSDVDKLFIQLVQTYNQLFEENPINASGVDAKAILSARLSKSRRLENLIAQLPGEKKNGLFGNLIALSLGLTPNFKSNFDLAEDAKLQLSKDTYDDDLDNLLAQIGDQYADLFLAAKNLSDAILLSDILRVNTEITKAPLSASMIKRYDEHHQDLTLLKALVRQQLPEKYKEIFFDQSKNGYAGYIDGGASQEEFYKFIKPILEKMDGTEELLVKLNREDLLRKQRTFDNGSIPHQIHLGELHAILRRQEDFYPFLKDNREKIEKILTFRIPYYVGPLARGNSRFAWMTRKSEETITPWNFEEVVDKGASAQSFIERMTNFDKNLPNEKVLPKHSLLYEYFTVYNELTKVKYVTEGMRKPAFLSGEQKKAIVDLLFKTNRKVTVKQLKEDYFKKIECFDSVEISGVEDRFNASLGTYHDLLKIIKDKDFLDNEENEDILEDIVLTLTLFEDREMIEERLKTYAHLFDDKVMKQLKRRRYTGWGRLSRKLINGIRDKQSGKTILDFLKSDGFANRNFMQLIHDDSLTFKEDIQKAQVSGQGDSLHEHIANLAGSPAIKKGILQTVKVVDELVKVMGRHKPENIVIEMARENQTTQKGQKNSRERMKRIEEGIKELGSQILKEHPVENTQLQNEKLYLYYLQNGRDMYVDQELDINRLSDYDVDHIVPQSFLKDDSIDNKVLTRSDKARGKSDNVPSEEVVKKMKNYWRQLLNAKLITQRKFDNLTKAERGGLSELDKAGFIKRQLVETRQITKHVAQILDSRMNTKYDENDKLIREVKVITLKSKLVSDFRKDFQFYKVREINNYHHAHDAYLNAVVGTALIKKYPKLESEFVYGDYKVYDVRKMIAKSEQEIGKATAKYFFYSNIMNFFKTEITLANGEIRKRPLIETNGETGEIVWDKGRDFATVRKVLSMPQVNIVKKTEVQTGGFSKESILPKRNSDKLIARKKDWDPKKYGGFDSPTVAYSVLVVAKVEKGKSKKLKSVKELLGITIMERSSFEKNPIDFLEAKGYKEVKKDLIIKLPKYSLFELENGRKRMLASAGELQKGNELALPSKYVNFLYLASHYEKLKGSPEDNEQKQLFVEQHKHYLDEIIEQISEFSKRVILADANLDKVLSAYNKHRDKPIREQAENIIHLFTLTNLGAPAAFKYFDTTIDRKRYTSTKEVLDATLIHQSITGLYETRIDLSQLGGDGGAEAAAKEAAAKEAAAKEAAAKALEAEAAAKEAAAKEAAAKEAAAKAGGTLNIEDEYRLHETSKGPDVPLGSTWLSDFPQAWAETGGMGLAVRQAPLIIPLKATSTPVSIKQYPMSQEARLGIKPHIQRLLDQGILVPCQSPWNTPLLPVKKPGTNDYRPVQDLREVNKRVEDIHPTVPNPYNLLSGLPPSHQWYTVLDLKDAFFCLRLHPTSQSLFAFEWRDPEMGISGQLTWTRLPQGFKNSPTLFNEALHRDLADFRIQHPDLILLQYVDDLLLAATSELDCQQGTRALLQTLGDLGYRASAKKAQICQKQVKYLGYLLKEGQRWLTEARKETVMGQPTPKTPRQLREFLGTAGFCRLWIPGFAEMAAPLYPLTKPGTLFEWGPDQQKAYQEIKQALLTAPALGLPDLTKPFELFVDEKQGYAKGVLTQKLGPWRRPVAYLSKKLDPVAAGWPPCLRMVAAIAVLTKDAGKLTMGQPLVILAPHAVEALVKQPPDRWLSNARMTHYQALLLDTDRVQFGPIVALNPATLLPLPEEGLQHDCLDILAEAHGTRPDLTDQPLPDADHTWYTDGSSFLQEGQRKAGAAVTTETEVVWAKALPAGTSAQRAELIALTQALKMAEGKKLNVYTDSRYAFATAHIHGEIYRRRGWLTSEGKEIKNKDEILALLKALFLPKRLSIIHCPGHQKGNRAEARGNRMADQAAREVATRETPETSTLLAGKRTADGSEFEKRTADGSEFESPKKKAKVE

SEQ ID NO: 4541 - protein, 2122 aa, synthetic construct
MPAAKRVKLDGGDKKYSIGLDIGTNSVGWAVITDEYKVPSKKFKVLGNTDRHSIKKNLIGALLFDSGETAEATRLKRTARRRYTRRKNRICYLQEIFSNEMAKVDDSFFHRLEESFLVEEDKKHERHPIFGNIVDEVAYHEKYPTIYHLRKKLVDSTDKADLRLIYLALAHMIKFRGHFLIEGDLNPDNSDVDKLFIQLVQTYNQLFEENPINASGVDAKAILSARLSKSRRLENLIAQLPGEKKNGLFGNLIALSLGLTPNFKSNFDLAEDAKLQLSKDTYDDDLDNLLAQIGDQYADLFLAAKNLSDAILLSDILRVNTEITKAPLSASMIKRYDEHHQDLTLLKALVRQQLPEKYKEIFFDQSKNGYAGYIDGGASQEEFYKFIKPILEKMDGTEELLVKLNREDLLRKQRTFDNGSIPHQIHLGELHAILRRQEDFYPFLKDNREKIEKILTFRIPYYVGPLARGNSRFAWMTRKSEETITPWNFEEVVDKGASAQSFIERMTNFDKNLPNEKVLPKHSLLYEYFTVYNELTKVKYVTEGMRKPAFLSGEQKKAIVDLLFKTNRKVTVKQLKEDYFKKIECFDSVEISGVEDRFNASLGTYHDLLKIIKDKDFLDNEENEDILEDIVLTLTLFEDREMIEERLKTYAHLFDDKVMKQLKRRRYTGWGRLSRKLINGIRDKQSGKTILDFLKSDGFANRNFMQLIHDDSLTFKEDIQKAQVSGQGDSLHEHIANLAGSPAIKKGILQTVKVVDELVKVMGRHKPENIVIEMARENQTTQKGQKNSRERMKRIEEGIKELGSQILKEHPVENTQLQNEKLYLYYLQNGRDMYVDQELDINRLSDYDVDHIVPQSFLKDDSIDNKVLTRSDKARGKSDNVPSEEVVKKMKNYWRQLLNAKLITQRKFDNLTKAERGGLSELDKAGFIKRQLVETRQITKHVAQILDSRMNTKYDENDKLIREVKVITLKSKLVSDFRKDFQFYKVREINNYHHAHDAYLNAVVGTALIKKYPKLESEFVYGDYKVYDVRKMIAKSEQEIGKATAKYFFYSNIMNFFKTEITLANGEIRKRPLIETNGETGEIVWDKGRDFATVRKVLSMPQVNIVKKTEVQTGGFSKESILPKRNSDKLIARKKDWDPKKYGGFDSPTVAYSVLVVAKVEKGKSKKLKSVKELLGITIMERSSFEKNPIDFLEAKGYKEVKKDLIIKLPKYSLFELENGRKRMLASAGELQKGNELALPSKYVNFLYLASHYEKLKGSPEDNEQKQLFVEQHKHYLDEIIEQISEFSKRVILADANLDKVLSAYNKHRDKPIREQAENIIHLFTLTNLGAPAAFKYFDTTIDRKRYTSTKEVLDATLIHQSITGLYETRIDLSQLGGDGGAEAAAKEAAAKEAAAKEAAAKALEAEAAAKEAAAKEAAAKEAAAKAGGIPWLMKKPLQLTTLVPLQEYEERLLKQTMLTGSYKEKLQSLFLKYDALWQHWENQVGHRRIKPHHIATGTVNPRPQKQYPINPKAKASIQTVINDLLKQGVLIQQNSIMNTPVYPVPKPDGKWRMVLDYREVNKTIPLIAAQNQHSAGILSSIFRGKYKTTLDLSNGFWAHSITPESYWLTAFTWLGQQYCWTRLPQGFLNSPALFNADVVDLLKEVPNVQVYVDDIYISHDDPREHLEQLEKVFSLLLNAGYVVSLKKSEIAQHEVEFLGFNITKEGRGLTETFKQKLLNITPPRDLKQLQSILGKLNFARNFIPNFSELVKPLYNIIATAPGKYITWTTDNSQQLQNIISMLNSAENLEERNPEVRLIMKVNTSPSAGYIRFYNEFAKRPIMYLNYVYTKAEVKFTNTEKLLTTIHKGLIKALDLGMGQEILVYSPIVSMTKIQKTPLPERKALPIRWITWMSYLEDPRIQFHYDKTLPELQQVPTVTDDIIAKIKHPSEFSMVFYTDGSAIKHPNVNKSHNAGMGIAQVQFKPEFTVINTWSIPLGDHTAQLAEVAAVEFACKKALKIDGPVLIVTDSFYVAESVNKELPYWQSNGFFNNKKKPLKHVSKWKSIADCIQLKPDIIIIHEKGHQPTASTFHTEGNNLADKLATQGSYVVNAGKRTADGSEFEKRTADGSEFESPKKKAKVE

SEQ ID NO: 4542-4600 - skipped (59 entries)

SEQ ID NO: 4601 - DNA, 16 bp, synthetic construct
  source 1..16: mol_type = other DNA
gcgcgctcgctcgctc

SEQ ID NO: 4602-4643 - skipped (42 entries)

SEQ ID NO: 4644 - protein, 9 aa, synthetic construct
PAAKRVKLD

SEQ ID NO: 4645-4648 - skipped (4 entries)

SEQ ID NO: 4649 - protein, 29 aa, synthetic construct
KRTADGSEFEKRTADGSEFESPKKKAKVE

SEQ ID NO: 4650 - protein, 10 aa, synthetic construct
KRTADGSEFE

SEQ ID NO: 4651 - protein, 19 aa, synthetic construct
KRTADGSEFESPKKKAKVE

SEQ ID NO: 4652-5001 - skipped (350 entries)

SEQ ID NO: 5002 - protein, 672 aa, Murine leukemia virus
TLNIEDEYRLHETSKEPDVSLGSTWLSDFPQAWAETGGMGLAVRQAPLIIPLKATSTPVSIKQYPMSQEARLGIKPHIQRLLDQGILVPCQSPWNTPLLPVKKPGTNDYRPVQDLREVNKRVEDIHPTVPNPYNLLSGLPPSHQWYTVLDLKDAFFCLRLHPTSQPLFAFEWRDPEMGISGQLTWTRLPQGFKNSPTLFDEALHRDLADFRIQHPDLILLQYVDDLLLAATSELDCQQGTRALLQTLGNLGYRASAKKAQICQKQVKYLGYLLKEGQRWLTEARKETVMGQPTPKTPRQLREFLGTAGFCRLWIPGFAEMAAPLYPLTKTGTLFNWGPDQQKAYQEIKQALLTAPALGLPDLTKPFELFVDEKQGYAKGVLTQKLGPWRRPVAYLSKKLDPVAAGWPPCLRMVAAIAVLTKDAGKLTMGQPLVILAPHAVEALVKQPPDRWLSNARMTHYQALLLDTDRVQFGPVVALNPATLLPLPEEGLQHNCLDILAEAHGTRPDLTDQPLPDADHTWYTDGSSLLQEGQRKAGAAVTTETEVIWAKALPAGTSAQRAELIALTQALKMAEGKKLNVYTDSRYAFATAHIHGEIYRRRGLLTSEGKEIKNKDEILALLKALFLPKRLSIIHCPGHQKGHSAEARGNRMADQAARKAAITETPDTSTLLI

SEQ ID NO: 5003 - protein, 671 aa, Murine leukemia virus
TLNIEDEHRLHETSKEPDVSLGSTWLSDFPQAWAETGGMGLAVRQAPLIIPLKATSTPVSIKQYPMSQEARLGIKPHIQRLLDQGILVPCQSPWNTPLLPVKKPGTNDYRPVQDLREVNKRVEDIHPTVPNPYNLLSGLPPSHQWYTVLDLKDAFFCLRLHPTSQPLFAFEWRDPEMGISGQLTWTRLPQGFKNSPTLFDEALHRDLADFRIQHPDLILLQYVDDLLLAATSELDCQQGTRALLQTLGNLGYRASAKKAQICQKQVKYLGYLLKEGQRWLTEARKETVMGQPTPKTPRQLREFLGTAGFCRLWIPGFAEMAAPLYPLTKTGTLFNWGPDQQKAYQEIKQALLTAPALGLPDLTKPFELFVDEKQGYAKGVLTQKLGPWRRPVAYLSKKLDPVAAGWPPCLRMVAAIAVLTKDAGKLTMGQPLVILAPHAVEALVKQPPDRWLSNARMTHYQALLLDTDRVQFGPVVALNPATLLPLPEEGLQHNCLDILAEAHGTRPDLTDQPLPDADHTWYTDGSSLLQEGQRKAGAAVTTETEVIWAKALPAGTSAQRAELIALTQALKMAEGKKLNVYTDSRYAFATAHIHGEIYRRRGLLTSEGKEIKNKDEILALLKALFLPKRLSIIHCPGHQKGHSAEARGNRMADQAARKAAITETPDTSTLL

SEQ ID NO: 5004 - protein, 660 aa, Murine leukemia virus
TLNIEDEHRLHETSKEPDVSLGSTWLSDFPQAWAETGGMGLAVRQAPLIIPLKATSTPVSIKQYPMSQEARLGIKPHIQRLLDQGILVPCQSPWNTPLLPVKKPGTNDYRPVQDLREVNKRVEDIHPTVPNPYNLLSGLPPSHQWYTVLDLKDAFFCLRLHPTSQPLFAFEWRDPEMGISGQLTWTRLPQGFKNSPTLFDEALHRDLADFRIQHPDLILLQYVDDLLLAATSELDCQQGTRALLQTLGNLGYRASAKKAQICQKQVKYLGYLLKEGQRWLTEARKETVMGQPTPKTPRQLREFLGTAGFCRLWIPGFAEMAAPLYPLTKTGTLFNWGPDQQKAYQEIKQALLTAPALGLPDLTKPFELFVDEKQGYAKGVLTQKLGPWRRPVAYLSKKLDPVAAGWPPCLRMVAAIAVLTKDAGKLTMGQPLVILAPHAVEALVKQPPDRWLSNARMTHYQALLLDTDRVQFGPVVALNPATLLPLPEEGLQHNCLDILAEAHGTRPDLTDQPLPDADHTWYTDGSSLLQEGQRKAGAAVTTETEVIWAKALPAGTSAQRAELIALTQALKMAEGKKLNVYTDSRYAFATAHIHGEIYRRRGLLTSEGKEIKNKDEILALLKALFLPKRLSIIHCPGHQKGHSAEARGNRMADQAARKAA

SEQ ID NO: 5005 - protein, 672 aa, synthetic construct
TLNIEDEYRLHETSKEPDVSLGSTWLSDFPQAWAETGGMGLAVRQAPLIIPLKATSTPVSIKQYPMSQEARLGIKPHIQRLLDQGILVPCQSPWNTPLLPVKKPGTNDYRPVQDLREVNKRVEDIHPTVPNPYNLLSGLPPSHQWYTVLDLKDAFFCLRLHPTSQPLFAFEWRDPEMGISGQLTWTRLPQGFKNSPTLFNEALHRDLADFRIQHPDLILLQYVDDLLLAATSELDCQQGTRALLQTLGNLGYRASAKKAQICQKQVKYLGYLLKEGQRWLTEARKETVMGQPTPKTPRQLREFLGKAGFCRLFIPGFAEMAAPLYPLTKPGTLFNWGPDQQKAYQEIKQALLTAPALGLPDLTKPFELFVDEKQGYAKGVLTQKLGPWRRPVAYLSKKLDPVAAGWPPCLRMVAAIAVLTKDAGKLTMGQPLVILAPHAVEALVKQPPDRWLSNARMTHYQALLLDTDRVQFGPVVALNPATLLPLPEEGLQHNCLDILAEAHGTRPDLTDQPLPDADHTWYTDGSSLLQEGQRKAGAAVTTETEVIWAKALPAGTSAQRAELIALTQALKMAEGKKLNVYTDSRYAFATAHIHGEIYRRRGWLTSEGKEIKNKDEILALLKALFLPKRLSIIHCPGHQKGHSAEARGNRMADQAARKAAITETPDTSTLLI

SEQ ID NO: 5006 - protein, 33 aa, synthetic construct
SGGSSGGSSGSETPGTSESATPESSGGSSGGSS

SEQ ID NO: 5007 - protein, 1369 aa, unidentified
SMDKKYSIGLAIGTNSVGWAVITDDYKVPSKKFKVLGNTDRHSIKKNLIGALLFDSGETAEATRLKRTARRRYTRRKNRICYLQEIFSNEMAKVDDSFFHRLEESFLVEEDKKHERHPIFGNIVDEVAYHEKYPTIYHLRKKLVDSTDKADLRLIYLALAHMIKFRGHFLIEGDLNPDNSDVDKLFIQLVQTYNQLFEENPINASGVDAKAILSARLSKSRRLENLIAQLPGEKKNGLFGNLIALSLGLTPNFKSNFDLAEDAKLQLSKDTYDDDLDNLLAQIGDQYADLFLAAKNLSDAILLSDILRVNTEITKAPLSASMIKRYDEHHQDLTLLKALVRQQLPEKYKEIFFDQSKNGYAGYIDGGASQEEFYKFIKPILEKMDGTEELLVKLNREDLLRKQRTFDNGSIPHQIHLGELHAILRRQEDFYPFLKDNREKIEKILTFRIPYYVGPLARGNSRFAWMTRKSEETITPWNFEEVVDKGASAQSFIERMTNFDKNLPNEKVLPKHSLLYEYFTVYNELTKVKYVTEGMRKPAFLSGEQKKAIVDLLFKTNRKVTVKQLKEDYFKKIECFDSVEISGVEDRFNASLGTYHDLLKIIKDKDFLDNEENEDILEDIVLTLTLFEDREMIEERLKTYAHLFDDKVMKQLKRRRYTGWGRLSRKLINGIRDKQSGKTILDFLKSDGFANRNFMQLIHDDSLTFKEDIQKAQVSGQGDSLHEHIANLAGSPAIKKGILQTVKVVDELVKVMGRHKPENIVIEMARENQTTQKGQKNSRERMKRIEEGIKELGSQILKEHPVENTQLQNEKLYLYYLQNGRDMYVDQELDINRLSDYDVDAIVPQSFLKDDSIDNKVLTRSDKNRGKSDNVPSEEVVKKMKNYWRQLLNAKLITQRKFDNLTKAERGGLSELDKAGFIKRQLVETRQITKHVAQILDSRMNTKYDENDKLIREVKVITLKSKLVSDFRKDFQFYKVREINNYHHAHDAYLNAVVGTALIKKYPKLESEFVYGDYKVYDVRKMIAKSEQEIGKATAKYFFYSNIMNFFKTEITLANGEIRKRPLIETNGETGEIVWDKGRDFATVRKVLSMPQVNIVKKTEVQTGGFSKESILPKRNSDKLIARKKDWDPKKYGGFDSPTVAYSVLVVAKVEKGKSKKLKSVKELLGITIMERSSFEKNPIDFLEAKGYKEVKKDLIIKLPKYSLFELENGRKRMLASAGELQKGNELALPSKYVNFLYLASHYEKLKGSPEDNEQKQLFVEQHKHYLDEIIEQISEFSKRVILADANLDKVLSAYNKHRDKPIREQAENIIHLFTLTNLGAPAAFKYFDTTIDRKRYTSTKEVLDATLIHQSITGLYETRIDLSQLGGD

SEQ ID NO: 5008 - DNA, 76 bp, synthetic construct
  source 1..76: mol_type = other DNA
gttttagagctagaaatagcaagttaaaataaggctagtccgttatcaacttgaaaaagtgggaccgagtcggtcc

SEQ ID NO: 5009 - protein, 30 aa, synthetic construct
MDSLLMNRRKFLYQFKNVRWAKGRRETYLC

SEQ ID NO: 5010 - protein, 28 aa, synthetic construct
PKKRKVEGADKRTADGSEFESPKKKRKV

SEQ ID NO: 5011 - protein, 22 aa, synthetic construct
RKSGKIAAIWKRPRKPKKKRKV

SEQ ID NO: 5012 - protein, 18 aa, synthetic construct
KRTADGSEFESPKKKRKV

SEQ ID NO: 5013 - protein, 17 aa, synthetic construct
KKTELQTTNAENKTKKL

SEQ ID NO: 5014 - protein, 19 aa, synthetic construct
KRGINDRNFWRGENGRKTR

SEQ ID NO: 5015 - protein, 16 aa, synthetic construct
KRPAATKKAGQAKKKK

SEQ ID NO: 5016 - protein, 29 aa, synthetic construct
PKKKRKVEGADKRTADGSEFESPKKKRKV

SEQ ID NO: 5017 - protein, 25 aa, synthetic construct
KRASSQALGTIPKRRSSSRFIKRKK

SEQ ID NO: 5018 - protein, 7 aa, synthetic construct
RKKRKKK

SEQ ID NO: 5019-5024 - skipped (6 entries)

SEQ ID NO: 5025 - protein, 4 aa, synthetic construct
SGGS

SEQ ID NO: 5026 - protein, 4 aa, synthetic construct
GGGS

SEQ ID NO: 5027 - protein, 5 aa, synthetic construct
GGGGS

SEQ ID NO: 5028 - protein, 5 aa, synthetic construct
EAAAK

SEQ ID NO: 5029 - DNA, 306 bp, synthetic construct
  source 1..306: mol_type = other DNA
tgcctgtcatacgaaaccgagatactgacagtagaatatggccttctgccaatcgggaagattgtggagaaacggatagaatgcacagtttactctgtcgataacaatggtaacatttatactcagccagttgcccagtggcacgaccggggagagcaggaagtattcgaatactgtctggaggatggaagtctcattagggccactaaggaccacaaatttatgacagtcgatggccagatgctgcctatagacgaaatctttgagcgagagttggacctcatgcgagttgacaaccttcctaat

SEQ ID NO: 5030 - protein, 102 aa, synthetic construct
CLSYETEILTVEYGLLPIGKIVEKRIECTVYSVDNNGNIYTQPVAQWHDRGEQEVFEYCLEDGSLIRATKDHKFMTVDGQMLPIDEIFERELDLMRVDNLPN

SEQ ID NO: 5031 - DNA, 108 bp, synthetic construct
  source 1..108: mol_type = other DNA
atgatcaagatagctacaaggaagtatcttggcaaacaaaacgtttatgatattggagtcgaaagagatcacaactttgctctgaagaacggattcatagcttctaat

SEQ ID NO: 5032 - protein, 36 aa, synthetic construct
MIKIATRKYLGKQNVYDIGVERDHNFALKNGFIASN

SEQ ID NO: 5033 - DNA, 303 bp, synthetic construct
  source 1..303: mol_type = other DNA
tgcctgtcttatgataccgagatacttaccgttgaatatggcttcttgcctattggaaagattgtcgaagagagaattgaatgcacagtatatactgtagacaagaatggtttcgtttacacacagcccattgctcaatggcacaatcgcggcgaacaagaagtatttgagtactgtctcgaggatggaagcatcatacgagcaactaaagatcataaattcatgaccactgacgggcagatgttgccaatagatgagatattcgagcggggcttggatctcaaacaagtggatggattgcca

SEQ ID NO: 5034 - protein, 101 aa, synthetic construct
CLSYDTEILTVEYGFLPIGKIVEERIECTVYTVDKNGFVYTQPIAQWHNRGEQEVFEYCLEDGSIIRATKDHKFMTTDGQMLPIDEIFERGLDLKQVDGLP

SEQ ID NO: 5035 - DNA, 159 bp, synthetic construct
  source 1..159: mol_type = other DNA
atgaagaggactgccgatggatcagagtttgaatctcccaagaagaagaggaaagtaaagataatatctcgaaaaagtcttggtacccaaaatgtctatgatattggagtggagaaagatcacaacttccttctcaagaacggtctcgtagccagcaac

SEQ ID NO: 5036 - protein, 53 aa, synthetic construct
MKRTADGSEFESPKKKRKVKIISRKSLGTQNVYDIGVEKDHNFLLKNGLVASN

SEQ ID NO: 5037-5101 - skipped (65 entries)

SEQ ID NO: 5102 - protein, 6 aa, synthetic construct
GGSGGS

SEQ ID NO: 5103 - protein, 9 aa, synthetic construct
GGSGGSGGS

SEQ ID NO: 5104 - protein, 12 aa, synthetic construct
GGSGGSGGSGGS

SEQ ID NO: 5105 - protein, 15 aa, synthetic construct
GGSGGSGGSGGSGGS

SEQ ID NO: 5106 - protein, 18 aa, synthetic construct
GGSGGSGGSGGSGGSGGS

SEQ ID NO: 5107 - protein, 5 aa, synthetic construct
GGGGS

SEQ ID NO: 5108 - protein, 10 aa, synthetic construct
GGGGSGGGGS

SEQ ID NO: 5109 - protein, 15 aa, synthetic construct
GGGGSGGGGSGGGGS

SEQ ID NO: 5110 - protein, 20 aa, synthetic construct
GGGGSGGGGSGGGGSGGGGS

SEQ ID NO: 5111 - protein, 25 aa, synthetic construct
GGGGSGGGGSGGGGSGGGGSGGGGS

SEQ ID NO: 5112 - protein, 30 aa, synthetic construct
GGGGSGGGGSGGGGSGGGGSGGGGSGGGGS

SEQ ID NO: 5113 - skipped

SEQ ID NO: 5114 - protein, 4 aa, synthetic construct
GGGG

SEQ ID NO: 5115 - protein, 5 aa, synthetic construct
GGGGG

SEQ ID NO: 5116 - protein, 6 aa, synthetic construct
GGGGGG

SEQ ID NO: 5117 - protein, 7 aa, synthetic construct
GGGGGGG

SEQ ID NO: 5118 - protein, 8 aa, synthetic construct
GGGGGGGG

SEQ ID NO: 5119 - skipped

SEQ ID NO: 5120 - protein, 6 aa, synthetic construct
GSSGSS

SEQ ID NO: 5121 - protein, 9 aa, synthetic construct
GSSGSSGSS

SEQ ID NO: 5122 - protein, 12 aa, synthetic construct
GSSGSSGSSGSS

SEQ ID NO: 5123 - protein, 15 aa, synthetic construct
GSSGSSGSSGSSGSS

SEQ ID NO: 5124 - protein, 18 aa, synthetic construct
GSSGSSGSSGSSGSSGSS

SEQ ID NO: 5125 - protein, 5 aa, synthetic construct
EAAAK

SEQ ID NO: 5126 - protein, 10 aa, synthetic construct
EAAAKEAAAK

SEQ ID NO: 5127 - protein, 15 aa, synthetic construct
EAAAKEAAAKEAAAK

SEQ ID NO: 5128 - protein, 20 aa, synthetic construct
EAAAKEAAAKEAAAKEAAAK

SEQ ID NO: 5129 - protein, 25 aa, synthetic construct
EAAAKEAAAKEAAAKEAAAKEAAAK

SEQ ID NO: 5130 - protein, 30 aa, synthetic construct
EAAAKEAAAKEAAAKEAAAKEAAAKEAAAK

SEQ ID NO: 5131 - skipped

SEQ ID NO: 5132 - protein, 5 aa, synthetic construct
PAPAP

SEQ ID NO: 5133 - protein, 7 aa, synthetic construct
PAPAPAP

SEQ ID NO: 5134 - protein, 9 aa, synthetic construct
PAPAPAPAP

SEQ ID NO: 5135 - protein, 11 aa, synthetic construct
PAPAPAPAPAP

SEQ ID NO: 5136 - protein, 13 aa, synthetic construct
PAPAPAPAPAPAP

SEQ ID NO: 5137 - protein, 6 aa, synthetic construct
GGSGGG

SEQ ID NO: 5138 - protein, 6 aa, synthetic construct
GGGGGS

SEQ ID NO: 5139 - protein, 6 aa, synthetic construct
GGSGSS

SEQ ID NO: 5140 - protein, 6 aa, synthetic construct
GSSGGS

SEQ ID NO: 5141 - protein, 8 aa, synthetic construct
GGSEAAAK

SEQ ID NO: 5142 - protein, 8 aa, synthetic construct
EAAAKGGS

SEQ ID NO: 5143 - protein, 6 aa, synthetic construct
GGSPAP

SEQ ID NO: 5144 - protein, 6 aa, synthetic construct
PAPGGS

SEQ ID NO: 5145 - protein, 6 aa, synthetic construct
GGGGSS

SEQ ID NO: 5146 - protein, 6 aa, synthetic construct
GSSGGG

SEQ ID NO: 5147 - protein, 8 aa, synthetic construct
GGGEAAAK

SEQ ID NO: 5148 - protein, 8 aa, synthetic construct
EAAAKGGG

SEQ ID NO: 5149 - protein, 6 aa, synthetic construct
GGGPAP

SEQ ID NO: 5150 - protein, 6 aa, synthetic construct
PAPGGG

SEQ ID NO: 5151 - protein, 8 aa, synthetic construct
GSSEAAAK

SEQ ID NO: 5152 - protein, 8 aa, synthetic construct
EAAAKGSS

SEQ ID NO: 5153 - protein, 6 aa, synthetic construct
GSSPAP

SEQ ID NO: 5154 - protein, 6 aa, synthetic construct
PAPGSS

SEQ ID NO: 5155 - protein, 8 aa, synthetic construct
EAAAKPAP

SEQ ID NO: 5156 - protein, 8 aa, synthetic construct
PAPEAAAK

SEQ ID NO: 5157 - protein, 9 aa, synthetic construct
GGSGGGGSS

SEQ ID NO: 5158 - protein, 9 aa, synthetic construct
GGSGSSGGG

SEQ ID NO: 5159 - protein, 9 aa, synthetic construct
GGGGGSGSS

SEQ ID NO: 5160 - protein, 9 aa, synthetic construct
GGGGSSGGS

SEQ ID NO: 5161 - protein, 9 aa, synthetic construct
GSSGGSGGG

SEQ ID NO: 5162 - protein, 9 aa, synthetic construct
GSSGGGGGS

SEQ ID NO: 5163 - protein, 11 aa, synthetic construct
GGSGGGEAAAK

SEQ ID NO: 5164 - protein, 11 aa, synthetic construct
GGSEAAAKGGG

SEQ ID NO: 5165 - protein, 11 aa, synthetic construct
GGGGGSEAAAK

SEQ ID NO: 5166 - protein, 11 aa, synthetic construct
GGGEAAAKGGS

SEQ ID NO: 5167 - protein, 11 aa, synthetic construct
EAAAKGGSGGG

SEQ ID NO: 5168 - protein, 11 aa, synthetic construct
EAAAKGGGGGS

SEQ ID NO: 5169 - protein, 9 aa, synthetic construct
GGSGGGPAP

SEQ ID NO: 5170 - protein, 9 aa, synthetic construct
GGSPAPGGG

SEQ ID NO: 5171 - protein, 9 aa, synthetic construct
GGGGGSPAP

SEQ ID NO: 5172 - protein, 9 aa, synthetic construct
GGGPAPGGS

SEQ ID NO: 5173 - protein, 9 aa, synthetic construct
PAPGGSGGG

SEQ ID NO: 5174 - protein, 9 aa, synthetic construct
PAPGGGGGS

SEQ ID NO: 5175 - protein, 11 aa, synthetic construct
GGSGSSEAAAK

SEQ ID NO: 5176 - protein, 11 aa, synthetic construct
GGSEAAAKGSS

SEQ ID NO: 5177 - protein, 11 aa, synthetic construct
GSSGGSEAAAK

SEQ ID NO: 5178 - protein, 11 aa, synthetic construct
GSSEAAAKGGS

SEQ ID NO: 5179 - protein, 11 aa, synthetic construct
EAAAKGGSGSS

SEQ ID NO: 5180 - protein, 11 aa, synthetic construct
EAAAKGSSGGS

SEQ ID NO: 5181 - protein, 9 aa, synthetic construct
GGSGSSPAP

SEQ ID NO: 5182 - protein, 9 aa, synthetic construct
GGSPAPGSS

SEQ ID NO: 5183 - protein, 9 aa, synthetic construct
GSSGGSPAP

SEQ ID NO: 5184 - protein, 9 aa, synthetic construct
GSSPAPGGS

SEQ ID NO: 5185 - protein, 9 aa, synthetic construct
PAPGGSGSS

SEQ ID NO: 5186 - protein, 9 aa, synthetic construct
PAPGSSGGS

SEQ ID NO: 5187 - protein, 11 aa, synthetic construct
GGSEAAAKPAP

SEQ ID NO: 5188 - protein, 11 aa, synthetic construct
GGSPAPEAAAK

SEQ ID NO: 5189 - protein, 11 aa, synthetic construct
EAAAKGGSPAP

SEQ ID NO: 5190 - protein, 11 aa, synthetic construct
EAAAKPAPGGS

SEQ ID NO: 5191 - protein, 11 aa, synthetic construct
PAPGGSEAAAK

SEQ ID NO: 5192 - protein, 11 aa, synthetic construct
PAPEAAAKGGS

SEQ ID NO: 5193 - protein, 11 aa, synthetic construct
GGGGSSEAAAK

SEQ ID NO: 5194 - protein, 11 aa, synthetic construct
GGGEAAAKGSS

SEQ ID NO: 5195 - protein, 11 aa, synthetic construct
GSSGGGEAAAK

SEQ ID NO: 5196 - protein, 11 aa, synthetic construct
GSSEAAAKGGG

SEQ ID NO: 5197 - protein, 11 aa, synthetic construct
EAAAKGGGGSS

SEQ ID NO: 5198 - protein, 11 aa, synthetic construct
EAAAKGSSGGG

SEQ ID NO: 5199 - protein, 9 aa, synthetic construct
GGGGSSPAP

SEQ ID NO: 5200 - protein, 9 aa, synthetic construct
GGGPAPGSS

SEQ ID NO: 5201 - protein, 9 aa, synthetic construct
GSSGGGPAP

SEQ ID NO: 5202 - protein, 9 aa, synthetic construct
GSSPAPGGG

SEQ ID NO: 5203 - protein, 9 aa, synthetic construct
PAPGGGGSS

SEQ ID NO: 5204 - protein, 9 aa, synthetic construct
PAPGSSGGG

SEQ ID NO: 5205 - protein, 11 aa, synthetic construct
GGGEAAAKPAP

SEQ ID NO: 5206 - protein, 11 aa, synthetic construct
GGGPAPEAAAK

SEQ ID NO: 5207 - protein, 11 aa, synthetic construct
EAAAKGGGPAP

SEQ ID NO: 5208 - protein, 11 aa, synthetic construct
EAAAKPAPGGG

SEQ ID NO: 5209 - protein, 11 aa, synthetic construct
PAPGGGEAAAK

SEQ ID NO: 5210 - protein, 11 aa, synthetic construct
PAPEAAAKGGG

SEQ ID NO: 5211 - protein, 11 aa, synthetic construct
GSSEAAAKPAP

SEQ ID NO: 5212 - protein, 11 aa, synthetic construct
GSSPAPEAAAK

SEQ ID NO: 5213 - protein, 11 aa, synthetic construct
EAAAKGSSPAP

SEQ ID NO: 5214 - protein, 11 aa, synthetic construct
EAAAKPAPGSS

SEQ ID NO: 5215 - protein, 11 aa, synthetic construct
PAPGSSEAAAK

SEQ ID NO: 5216 - protein, 11 aa, synthetic construct
PAPEAAAKGSS

SEQ ID NO: 5217 - protein, 46 aa, synthetic construct
AEAAAKEAAAKEAAAKEAAAKALEAEAAAKEAAAKEAAAKEAAAKA

SEQ ID NO: 5218 - protein, 15 aa, synthetic construct
GGGGSEAAAKGGGGS

SEQ ID NO: 5219 - protein, 15 aa, synthetic construct
EAAAKGGGGSEAAAK

SEQ ID NO: 5220 - protein, 16 aa, synthetic construct
SGSETPGTSESATPES

SEQ ID NO: 5221 - protein, 12 aa, synthetic construct
GSAGSAAGSGEF

SEQ ID NO: 5222 - protein, 33 aa, synthetic construct; identical to SEQ ID NO: 5006

SEQ ID NO: 5223 - protein, 30 aa, synthetic construct
AHFKISGEKRPSTDPGKKAKNPKKKKKKDP

SEQ ID NO: 5224 - protein, 12 aa, synthetic construct
AHRAKKMSKTHA

SEQ ID NO: 5225 - protein, 14 aa, synthetic construct
ASPEYVNLPINGNG

SEQ ID NO: 5226 - protein, 7 aa, synthetic construct
CTKRPRW

SEQ ID NO: 5227 - protein, 16 aa, synthetic construct
DKAKRVSRNKSEKKRR

SEQ ID NO: 5228 - protein, 15 aa, synthetic construct
EELRLKEELLKGIYA

SEQ ID NO: 5229 - protein, 16 aa, synthetic construct
EEQLRRRKNSRLNNTG

SEQ ID NO: 5230 - protein, 24 aa, synthetic construct
EVLKVIRTGKRKKKAWKRMVTKVC

SEQ ID NO: 5231 - protein, 15 aa, synthetic construct
HHHHHHHHHHHHQPH

SEQ ID NO: 5232 - protein, 17 aa, synthetic construct
HKKKHPDASVNFSEFSK

SEQ ID NO: 5233 - protein, 6 aa, synthetic construct
HKRTKK

SEQ ID NO: 5234 - protein, 29 aa, synthetic construct
IINGRKLKLKKSRRRSSQTSNNSFTSRRS

SEQ ID NO: 5235 - protein, 8 aa, synthetic construct
KAEQERRK

SEQ ID NO: 5236 - protein, 18 aa, synthetic construct
KEKRKRREELFIEQKKRK

SEQ ID NO: 5237 - protein, 14 aa, synthetic construct
KKGKDEWFSRGKKP

SEQ ID NO: 5238 - protein, 12 aa, synthetic construct
KKGPSVQKRKKT

SEQ ID NO: 5239 - protein, 16 aa, synthetic construct
KKKTVINDLLHYKKEK

SEQ ID NO: 5240 - protein, 17 aa, synthetic construct
KKNGGKGKNKPSAKIKK

SEQ ID NO: 5241 - protein, 13 aa, synthetic construct
KKPKWDDFKKKKK

SEQ ID NO: 5242 - protein, 6 aa, synthetic construct
KKRKKD

SEQ ID NO: 5243 - protein, 9 aa, synthetic construct
KKRRKRRRK

SEQ ID NO: 5244 - protein, 9 aa, synthetic construct
KKRRRRARK

SEQ ID NO: 5245 - protein, 7 aa, synthetic construct
KKSKRGR

SEQ ID NO: 5246 - protein, 8 aa, synthetic construct
KKSRKRGS

SEQ ID NO: 5247 - protein, 17 aa, synthetic construct
KKSTALSRELGKIMRRR

SEQ ID NO: 5248 - protein, 17 aa, synthetic construct
KKSYQDPEIIAHSRPRK

SEQ ID NO: 5249 - protein, 17 aa, synthetic construct
KKTGKNRKLKSKRVKTR

SEQ ID NO: 5250 - protein, 17 aa, synthetic construct
KKVSIAGQSGKLWRWKR

SEQ ID NO: 5251 - protein, 20 aa, synthetic construct
KKYENVVIKRSPRKRGRPRK

SEQ ID NO: 5252 - protein, 6 aa, synthetic construct
KNKKRK

SEQ ID NO: 5253 - protein, 6 aa, synthetic construct
KPKKKR

SEQ ID NO: 5254 - protein, 19 aa, synthetic construct
KRAMKDDSHGNSTSPKRRK

SEQ ID NO: 5255 - protein, 17 aa, synthetic construct
KRANSNLVAAYEKAKKK

SEQ ID NO: 5256 - protein, 22 aa, synthetic construct
KRASEDTTSGSPPKKSSAGPKR

SEQ ID NO: 5257 - protein, 16 aa, synthetic construct
KRFKRRWMVRKMKTKK

SEQ ID NO: 5258 - protein, 16 aa, synthetic construct
KRGLNSSFETSPKKVK

SEQ ID NO: 5259 - protein, 20 aa, synthetic construct
KRGNSSIGPNDLSKRKQRKK

SEQ ID NO: 5260 - protein, 23 aa, synthetic construct
KRIHSVSLSQSQIDPSKKVKRAK

SEQ ID NO: 5261 - protein, 15 aa, synthetic construct
KRKGKLKNKGSKRKK

SEQ ID NO: 5262 - protein, 13 aa, synthetic construct
KRRRRRRREKRKR

SEQ ID NO: 5263 - protein, 18 aa, synthetic construct
KRSNDRTYSPEEEKQRRA

SEQ ID NO: 5264 - protein, 21 aa, synthetic construct
KRTVATNGDASGAHRAKKMSK

SEQ ID NO: 5265 - protein, 20 aa, synthetic construct
KRVYNKGEDEQEHLPKGKKR

SEQ ID NO: 5266 - protein, 18 aa, synthetic construct
KSGKAPRRRAVSMDNSNK

SEQ ID NO: 5267 - protein, 19 aa, synthetic construct
KVNFLDMSLDDIIIYKELE

SEQ ID NO: 5268 - protein, 15 aa, synthetic construct
KVQHRIAKKTTRRRR

SEQ ID NO: 5269 - protein, 8 aa, synthetic construct
LSPSLSPL

SEQ ID NO: 5270 - protein, 30 aa, synthetic construct; identical to SEQ ID NO: 5009

SEQ ID NO: 5271 - protein, 52 aa, synthetic construct
MPQNEYIELHRKRYGYRLDYHEKKRKKESREAHERSKKAKKMIGLKAKLYHK

SEQ ID NO: 5272 - protein, 10 aa, synthetic construct
MVQLRPRASR

SEQ ID NO: 5273 - protein, 24 aa, synthetic construct
NNKLLAKRRKGGASPKDDPMDDIK

SEQ ID NO: 5274 - protein, 20 aa, synthetic construct
NYKRPMDGTYGPPAKRHEGE

SEQ ID NO: 5275 - protein, 19 aa, synthetic construct
PDTKRAKLDSSETTMVKKK

SEQ ID NO: 5276 - protein, 7 aa, synthetic construct
PEKRTKI

SEQ ID NO: 5277 - protein, 8 aa, synthetic construct
PGGRGKKK

SEQ ID NO: 5278 - protein, 18 aa, synthetic construct
PGKMDKGEHRQERRDRPY

SEQ ID NO: 5279 - protein, 11 aa, synthetic construct
PKKGDKYDKTD

SEQ ID NO: 5280 - protein, 7 aa, synthetic construct
PKKKSRK

SEQ ID NO: 5281 - protein, 7 aa, synthetic construct
PKKNKPE

SEQ ID NO: 5282 - protein, 7 aa, synthetic construct
PKKRAKV

SEQ ID NO: 5283 - protein, 9 aa, synthetic construct
PKPKKLKVE

SEQ ID NO: 5284 - protein, 7 aa, synthetic construct
PKRGRGR

SEQ ID NO: 5285 - protein, 9 aa, synthetic construct
PKRRLVDDA

SEQ ID NO: 5286 - protein, 7 aa, synthetic construct
PKRRRTY

SEQ ID NO: 5287 - protein, 6 aa, synthetic construct
PLFKRR

SEQ ID NO: 5288 - protein, 7 aa, synthetic construct
PLRKAKR

SEQ ID NO: 5289 - protein, 9 aa, synthetic construct
PPAKRKCIF

SEQ ID NO: 5290 - protein, 8 aa, synthetic construct
PPARRRRL

SEQ ID NO: 5291 - protein, 8 aa, synthetic construct
PPKKKRKV

SEQ ID NO: 5292 - protein, 10 aa, synthetic construct
PPNKRMKVKH

SEQ ID NO: 5293 - protein, 13 aa, synthetic construct
PPRIYPQLPSAPT

SEQ ID NO: 5294 - protein, 13 aa, synthetic construct
PQRSPFPKSSVKR

SEQ ID NO: 5295 - protein, 8 aa, synthetic construct
PRPRKVPR

SEQ ID NO: 5296 - protein, 9 aa, synthetic construct
PRRRVQRKR

SEQ ID NO: 5297 - protein, 7 aa, synthetic construct
PRRVRLK

SEQ ID NO: 5298 - protein, 7 aa, synthetic construct
PSRKRPR

SEQ ID NO: 5299 - protein, 8 aa, synthetic construct
PSSKKRKV

SEQ ID NO: 5300 - protein, 7 aa, synthetic construct
PTKKRVK

SEQ ID NO: 5301 - protein, 9 aa, synthetic construct
QRPGPYDRP

SEQ ID NO: 5302 - protein, 18 aa, synthetic construct
RGKGGKGLGKGGAKRHRK

SEQ ID NO: 5303 - protein, 24 aa, synthetic construct
RKAGKGGGGHKTTKKRSAKDEKVP

SEQ ID NO: 5304 - protein, 9 aa, synthetic construct
RKIKLKRAK

SEQ ID NO: 5305 - protein, 9 aa, synthetic construct
RKIKRKRAK

SEQ ID NO: 5306 - protein, 17 aa, synthetic construct
RKKEAPGPREELRSRGR

SEQ ID NO: 5307 - protein, 7 aa, synthetic construct
RKKRKGK

SEQ ID NO: 5308 - protein, 9 aa, synthetic construct
RKKRRQRRR

SEQ ID NO: 5309 - protein, 25 aa, synthetic construct
RKKSIPLSIKNLKRKHKRKKNKITR

SEQ ID NO: 5310 - protein, 20 aa, synthetic construct
RKLVKPKNTKMKTKLRTNPY

SEQ ID NO: 5311 - protein, 16 aa, synthetic construct
RKRLILSDKGQLDWKK

SEQ ID NO: 5312 - protein, 7 aa, synthetic construct
RKRLKSK

SEQ ID NO: 5313 - protein, 9 aa, synthetic construct
RKRRVRDNM

SEQ ID NO: 5314 - protein, 22 aa, synthetic construct
RKRSPKDKKEKDLDGAGKRRKT

SEQ ID NO: 5315 - protein, 22 aa, synthetic construct
RKRTPRVDGQTGENDMNKRRRK

SEQ ID NO: 5316 - protein, 10 aa, synthetic construct
RLPVRRRRRR

SEQ ID NO: 5317 - protein, 10 aa, synthetic construct
RLRFRKPKSK

SEQ ID NO: 5318 - protein, 6 aa, synthetic construct
RQQRKR

SEQ ID NO: 5319 - protein, 16 aa, synthetic construct
RRDLNSSFETSPKKVK

SEQ ID NO: 5320 - protein, 8 aa, synthetic construct
RRDRAKLR

SEQ ID NO: 5321 - protein, 8 aa, synthetic construct
RRGDGRRR

SEQ ID NO: 5322 - protein, 11 aa, synthetic construct
RRGRKRKAEKQ

SEQ ID NO: 5323 - protein, 6 aa, synthetic construct
RRKKRR

SEQ ID NO: 5324 - protein, 19 aa, synthetic construct
RRKRSKSEDMDSVESKRRR

SEQ ID NO: 5325 - protein, 6 aa, synthetic construct
RRKRSR

SEQ ID NO: 5326 - protein, 14 aa, synthetic construct
RRPKGKTLQKRKPK

SEQ ID NO: 5327 - protein, 18 aa, synthetic construct
RRRGFERFGPDNMGRKRK

SEQ ID NO: 5328 - protein, 15 aa, synthetic construct
RRRGKNKVAAQNCRK

SEQ ID NO: 5329 - protein, 6 aa, synthetic construct
RRRKRR

SEQ ID NO: 5330 - protein, 14 aa, synthetic construct
RRRQKQKGGASRRR

SEQ ID NO: 5331 - protein, 13 aa, synthetic construct
RRRREGPRARRRR

SEQ ID NO: 5332 - protein, 61 aa, synthetic construct
RRTIRLKLVYDKCDRSCKIQKKNRNKCQYCRFHKCLSVGMSHNAIRFGRMPRSEKAKLKAE

SEQ ID NO: 5333 - protein, 17 aa, synthetic construct
RRVPQRKEVSRCRKCRK

SEQ ID NO: 5334 - protein, 32 aa, synthetic construct
RVGGRRQAVECIEDLLNEPGQPLDLSCKRPRP

SEQ ID NO: 5335 - protein, 9 aa, synthetic construct
RVVKLRIAP

SEQ ID NO: 5336 - protein, 6 aa, synthetic construct
RVVRRR

SEQ ID NO: 5337 - protein, 12 aa, synthetic construct
SKRKTKISRKTR

SEQ ID NO: 5338 - protein, 16 aa, synthetic construct
SYVKTVPNRTRTYIKL

SEQ ID NO: 5339 - protein, 12 aa, synthetic construct
TGKNEAKKRKIA

SEQ ID NO: 5340 - protein, 30 aa, synthetic construct
TLSPASSPSSVSCPVIPASTDESPGSALNI

SEQ ID NO: 5341 - protein, 12 aa, synthetic construct
VSKKQRTGKKIH

SEQ ID NO: 5342 - protein, 9 aa, synthetic construct
SPKKKRKVE

SEQ ID NO: 5343 - protein, 19 aa, synthetic construct
KRTADGSEFESPKKKRKVE

SEQ ID NO: 5344 - protein, 9 aa, synthetic construct
PAAKRVKLD

SEQ ID NO: 5345 - protein, 7 aa, synthetic construct
PKKKRKV

SEQ ID NO: 5346 - protein, 30 aa, synthetic construct; identical to SEQ ID NO: 5009

SEQ ID NO: 5347 - protein, 11 aa, synthetic construct
SPKKKRKVEAS

SEQ ID NO: 5348 - protein, 16 aa, synthetic construct
MAPKKKRKVGIHRGVP

SEQ ID NO: 5349 - protein, 29 aa, synthetic construct
KRTADGSEFEKRTADGSEFESPKKKAKVE

SEQ ID NO: 5350 - protein, 10 aa, synthetic construct
KRTADGSEFE

SEQ ID NO: 5351 - protein, 19 aa, synthetic construct
KRTADGSEFESPKKKAKVE

SEQ ID NO: 5352-6000 - skipped (649 entries)

SEQ ID NO: 6001 - protein, 2090 aa, synthetic construct
MPAAKRVKLDGGDKKYSIGLDIGTNSVGWAVITDEYKVPSKKFKVLGNTDRHSIKKNLIGALLFDSGETAEATRLKRTARRRYTRRKNRICYLQEIFSNEMAKVDDSFFHRLEESFLVEEDKKHERHPIFGNIVDEVAYHEKYPTIYHLRKKLVDSTDKADLRLIYLALAHMIKFRGHFLIEGDLNPDNSDVDKLFIQLVQTYNQLFEENPINASGVDAKAILSARLSKSRRLENLIAQLPGEKKNGLFGNLIALSLGLTPNFKSNFDLAEDAKLQLSKDTYDDDLDNLLAQIGDQYADLFLAAKNLSDAILLSDILRVNTEITKAPLSASMIKRYDEHHQDLTLLKALVRQQLPEKYKEIFFDQSKNGYAGYIDGGASQEEFYKFIKPILEKMDGTEELLVKLNREDLLRKQRTFDNGSIPHQIHLGELHAILRRQEDFYPFLKDNREKIEKILTFRIPYYVGPLARGNSRFAWMTRKSEETITPWNFEEVVDKGASAQSFIERMTNFDKNLPNEKVLPKHSLLYEYFTVYNELTKVKYVTEGMRKPAFLSGEQKKAIVDLLFKTNRKVTVKQLKEDYFKKIECFDSVEISGVEDRFNASLGTYHDLLKIIKDKDFLDNEENEDILEDIVLTLTLFEDREMIEERLKTYAHLFDDKVMKQLKRRRYTGWGRLSRKLINGIRDKQSGKTILDFLKSDGFANRNFMQLIHDDSLTFKEDIQKAQVSGQGDSLHEHIANLAGSPAIKKGILQTVKVVDELVKVMGRHKPENIVIEMARENQTTQKGQKNSRERMKRIEEGIKELGSQILKEHPVENTQLQNEKLYLYYLQNGRDMYVDQELDINRLSDYDVDHIVPQSFLKDDSIDNKVLTRSDKARGKSDNVPSEEVVKKMKNYWRQLLNAKLITQRKFDNLTKAERGGLSELDKAGFIKRQLVETRQITKHVAQILDSRMNTKYDENDKLIREVKVITLKSKLVSDFRKDFQFYKVREINNYHHAHDAYLNAVVGTALIKKYPKLESEFVYGDYKVYDVRKMIAKSEQEIGKATAKYFFYSNIMNFFKTEITLANGEIRKRPLIETNGETGEIVWDKGRDFATVRKVLSMPQVNIVKKTEVQTGGFSKESILPKRNSDKLIARKKDWDPKKYGGFDSPTVAYSVLVVAKVEKGKSKKLKSVKELLGITIMERSSFEKNPIDFLEAKGYKEVKKDLIIKLPKYSLFELENGRKRMLASAGELQKGNELALPSKYVNFLYLASHYEKLKGSPEDNEQKQLFVEQHKHYLDEIIEQISEFSKRVILADANLDKVLSAYNKHRDKPIREQAENIIHLFTLTNLGAPAAFKYFDTTIDRKRYTSTKEVLDATLIHQSITGLYETRIDLSQLGGDGGGGSGGTAPLEEEYRLFLEAPIQNVTLLEQWKREIPKVWAEINPPGLASTQAPIHVQLLSTALPVRVRQYPITLEAKRSLRETIRKFRAAGILRPVHSPWNTPLLPVRKSGTSEYRMVQDLREVNKRVETIHPTVPNPYTLLSLLPPDRIWYSVLDLKDAFFCIPLAPESQLIFAFEWADAEEGESGQLTWTRLPQGFKNSPTLFNEALNRDLQGFRLDHPSVSLLQYVDDLLIAADTQAACLSATRDLLMTLAELGYRVSGKKAQLCQEEVTYLGFKIHKGSRSLSNSRTQAILQIPVPKTKRQVREFLGKIGYCRLFIPGFAELAQPLYAATRPGNDPLVWGEKEEEAFQSLKLALTQPPALALPSLDKPFQLFVEETSGAAKGVLTQALGPWKRPVAYLSKRLDPVAAGWPRCLRAIAAAALLTREASKLTFGQDIEITSSHNLESLLRSPPDKWLTNARITQYQVLLLDPPRVRFKQTAALNPATLLPETDDTLPIHHCLDTLDSLTSTRPDLTDQPLAQAEATLFTDGSSYIRDGKRYAGAAVVTLDSVIWAEPLPIGTSAQKAELIALTKALEWSKDKSVNIYTDSRYAFATLHVHGMIYRERGWLTAGGKAIKNAPEILALLTAVWLPKRVAVMHCKGHQKDDAPTSTGNRRADEVAREVAIRPLSTQATISAGKRTADGSEFEKRTADGSEFESPKKKAKVE

SEQ ID NO: 6002 - protein, 2094 aa, synthetic construct
MPAAKRVKLDGGDKKYSIGLDIGTNSVGWAVITDEYKVPSKKFKVLGNTDRHSIKKNLIGALLFDSGETAEATRLKRTARRRYTRRKNRICYLQEIFSNEMAKVDDSFFHRLEESFLVEEDKKHERHPIFGNIVDEVAYHEKYPTIYHLRKKLVDSTDKADLRLIYLALAHMIKFRGHFLIEGDLNPDNSDVDKLFIQLVQTYNQLFEENPINASGVDAKAILSARLSKSRRLENLIAQLPGEKKNGLFGNLIALSLGLTPNFKSNFDLAEDAKLQLSKDTYDDDLDNLLAQIGDQYADLFLAAKNLSDAILLSDILRVNTEITKAPLSASMIKRYDEHHQDLTLLKALVRQQLPEKYKEIFFDQSKNGYAGYIDGGASQEEFYKFIKPILEKMDGTEELLVKLNREDLLRKQRTFDNGSIPHQIHLGELHAILRRQEDFYPFLKDNREKIEKILTFRIPYYVGPLARGNSRFAWMTRKSEETITPWNFEEVVDKGASAQSFIERMTNFDKNLPNEKVLPKHSLLYEYFTVYNELTKVKYVTEGMRKPAFLSGEQKKAIVDLLFKTNRKVTVKQLKEDYFKKIECFDSVEISGVEDRFNASLGTYHDLLKIIKDKDFLDNEENEDILEDIVLTLTLFEDREMIEERLKTYAHLFDDKVMKQLKRRRYTGWGRLSRKLINGIRDKQSGKTILDFLKSDGFANRNFMQLIHDDSLTFKEDIQKAQVSGQGDSLHEHIANLAGSPAIKKGILQTVKVVDELVKVMGRHKPENIVIEMARENQTTQKGQKNSRERMKRIEEGIKELGSQILKEHPVENTQLQNEKLYLYYLQNGRDMYVDQELDINRLSDYDVDHIVPQSFLKDDSIDNKVLTRSDKARGKSDNVPSEEVVKKMKNYWRQLLNAKLITQRKFDNLTKAERGGLSELDKAGFIKRQLVETRQITKHVAQILDSRMNTKYDENDKLIREVKVITLKSKLVSDFRKDFQFYKVREINNYHHAHDAYLNAVVGTALIKKYPKLESEFVYGDYKVYDVRKMIAKSEQEIGKATAKYFFYSNIMNFFKTEITLANGEIRKRPLIETNGETGEIVWDKGRDFATVRKVLSMPQVNIVKKTEVQTGGFSKESILPKRNSDKLIARKKDWDPKKYGGFDSPTVAYSVLVVAKVEKGKSKKLKSVKELLGITIMERSSFEKNPIDFLEAKGYKEVKKDLIIKLPKYSLFELENGRKRMLASAGELQKGNELALPSKYVNFLYLASHYEKLKGSPEDNEQKQLFVEQHKHYLDEIIEQISEFSKRVILADANLDKVLSAYNKHRDKPIREQAENIIHLFTLTNLGAPAAFKYFDTTIDRKRYTSTKEVLDATLIHQSITGLYETRIDLSQLGGDGGGGSGGTVSLQDEHRLFDIPVTTSLPDVWLQDFPQAWAETGGLGRAKCQAPIIIDLKPTAVPVSIKQYPMSLEAHMGIRQHIIKFLELGVLRPCRSPWNTPLLPVKKPGTQDYRPVQDLREINKRTVDIHPTVPNPYNLLSTLKPDYSWYTVLDLKDAFFCLPLAPQSQELFAFEWKDPERGISGQLTWTRLPQGFKNSPTLFDEALHRDLTDFRTQHPEVTLLQYVDDLLLAAPTKKACTQGTRHLLQELGEKGYRASAKKAQICQTKVTYLGYILSEGKRWLTPGRIETVARIPPPRNPREVREFLGTAGFCRLWIPGFAELAAPLYALTKESTPFTWQTEHQLAFEALKKALLSAPALGLPDTSKPFTLFLDERQGIAKGVLTQKLGPWKRPVAYLSKKLDPVAAGWPPCLRIMAATAMLVKDSAKLTLGQPLTVITPHTLEAIVRQPPDRWITNARLTHYQALLLDTDRVQFGPPVTLNPATLLPVPENQPSPHDCRQVLAETHGTREDLKDQELPDADHTWYTDGSSYLDSGTRRAGAAVVDGHNTIWAQSLPPGTSAQKAELIALTKALELSKGKKANIYTDSRYAFATAHTHGSIYERRGLLTSEGKEIKNKAEIIALLKALFLPQEVAIIHCPGHQKGQDPVAVGNRQADRVARQAAMAEVLTLATEPDNTSHITAGKRTADGSEFEKRTADGSEFESPKKKAKVE

SEQ ID NO: 6003 - protein, 2079 aa, synthetic construct
MPAAKRVKLDGGDKKYSIGLDIGTNSVGWAVITDEYKVPSKKFKVLGNTDRHSIKKNLIGALLFDSGETAEATRLKRTARRRYTRRKNRICYLQEIFSNEMAKVDDSFFHRLEESFLVEEDKKHERHPIFGNIVDEVAYHEKYPTIYHLRKKLVDSTDKADLRLIYLALAHMIKFRGHFLIEGDLNPDNSDVDKLFIQLVQTYNQLFEENPINASGVDAKAILSARLSKSRRLENLIAQLPGEKKNGLFGNLIALSLGLTPNFKSNFDLAEDAKLQLSKDTYDDDLDNLLAQIGDQYADLFLAAKNLSDAILLSDILRVNTEITKAPLSASMIKRYDEHHQDLTLLKALVRQQLPEKYKEIFFDQSKNGYAGYIDGGASQEEFYKFIKPILEKMDGTEELLVKLNREDLLRKQRTFDNGSIPHQIHLGELHAILRRQEDFYPFLKDNREKIEKILTFRIPYYVGPLARGNSRFAWMTRKSEETITPWNFEEVVDKGASAQSFIERMTNFDKNLPNEKVLPKHSLLYEYFTVYNELTKVKYVTEGMRKPAFLSGEQKKAIVDLLFKTNRKVTVKQLKEDYFKKIECFDSVEISGVEDRFNASLGTYHDLLKIIKDKDFLDNEENEDILEDIVLTLTLFEDREMIEERLKTYAHLFDDKVMKQLKRRRYTGWGRLSRKLINGIRDKQSGKTILDFLKSDGFANRNFMQLIHDDSLTFKEDIQKAQVSGQGDSLHEHIANLAGSPAIKKGILQTVKVVDELVKVMGRHKPENIVIEMARENQTTQKGQKNSRERMKRIEEGIKELGSQILKEHPVENTQLQNEKLYLYYLQNGRDMYVDQELDINRLSDYDVDHIVPQSFLKDDSIDNKVLTRSDKARGKSDNVPSEEVVKKMKNYWRQLLNAKLITQRKFDNLTKAERGGLSELDKAGFIKRQLVETRQITKHVAQILDSRMNTKYDENDKLIREVKVITLKSKLVSDFRKDFQFYKVREINNYHHAHDAYLNAVVGTALIKKYPKLESEFVYGDYKVYDVRKMIAKSEQEIGKATAKYFFYSNIMNFFKTEITLANGEIRKRPLIETNGETGEIVWDKGRDFATVRKVLSMPQVNIVKKTEVQTGGFSKESILPKRNSDKLIARKKDWDPKKYGGFDSPTVAYSVLVVAKVEKGKSKKLKSVKELLGITIMERSSFEKNPIDFLEAKGYKEVKKDLIIKLPKYSLFELENGRKRMLASAGELQKGNELALPSKYVNFLYLASHYEKLKGSPEDNEQKQLFVEQHKHYLDEIIEQISEFSKRVILADANLDKVLSAYNKHRDKPIREQAENIIHLFTLTNLGAPAAFKYFDTTIDRKRYTSTKEVLDATLIHQSITGLYETRIDLSQLGGDGGGGSGGVPWILKKPLELTIKLDLEEQQGTLLNNSILSKKGKEELKQLFEKYSALWQSWENQVGHRRIRPHKIATGTVKPTPQKQYHINPKAKPDIQIVINDLLKQGVLIQKESTMNTPVYPVPKPNGRWRMVLDYRAVNKVTPLIAVQNQHSYGILGSLFKGRYKTTIDLSNGFWAHPIVPEDYWITAFTWQGKQYCWTVLPQGFLNSPGLFTGDVVDLLQGIPNVEVYVDDVYISHDSEKEHLEYLDILFNRLKEAGYIISLKKSNIANSIVDFLGFQITNEGRGLTDTFKEKLENITAPTTLKQLQSILGLLNFARNFIPDFTELIAPLYALIPKSTKNYVPWQIEHSTTLETLITKLNGAEYLQGRKGDKTLIMKVNASYTTGYIRYYNEGEKKPISYVSIVFSKTELKFTELEKLLTTVHKGLLKALDLSMGQNIHVYSPIVSMQNIQKTPQTAKKALASRWLSWLSYLEDPRIRFFYDPQMPALKDLPAVDTGKDNKKHPSNFQHIFYTDGSAITSPTKEGHLNAGMGIVYFINKDGNLQKQQEWSISLGNHTAQFAEIAAFEFALKKCLPLGGNILVVTDSNYVAKAYNEELDVWASNGFVNNRKKPLKHISKWKSVADLKRLRPDVVVTHEPGHQKLDSSPHAYGNNLADQLATQASFKVHAGKRTADGSEFEKRTADGSEFESPKKKAKVE

SEQ ID NO: 6004 - protein, 2087 aa, synthetic construct
MPAAKRVKLDGGDKKYSIGLDIGTNSVGWAVITDEYKVPSKKFKVLGNTDRHSIKKNLIGALLFDSGETAEATRLKRTARRRYTRRKNRICYLQEIFSNEMAKVDDSFFHRLEESFLVEEDKKHERHPIFGNIVDEVAYHEKYPTIYHLRKKLVDSTDKADLRLIYLALAHMIKFRGHFLIEGDLNPDNSDVDKLFIQLVQTYNQLFEENPINASGVDAKAILSARLSKSRRLENLIAQLPGEKKNGLFGNLIALSLGLTPNFKSNFDLAEDAKLQLSKDTYDDDLDNLLAQIGDQYADLFLAAKNLSDAILLSDILRVNTEITKAPLSASMIKRYDEHHQDLTLLKALVRQQLPEKYKEIFFDQSKNGYAGYIDGGASQEEFYKFIKPILEKMDGTEELLVKLNREDLLRKQRTFDNGSIPHQIHLGELHAILRRQEDFYPFLKDNREKIEKILTFRIPYYVGPLARGNSRFAWMTRKSEETITPWNFEEVVDKGASAQSFIERMTNFDKNLPNEKVLPKHSLLYEYFTVYNELTKVKYVTEGMRKPAFLSGEQKKAIVDLLFKTNRKVTVKQLKEDYFKKIECFDSVEISGVEDRFNASLGTYHDLLKIIKDKDFLDNEENEDILEDIVLTLTLFEDREMIEERLKTYAHLFDDKVMKQLKRRRYTGWGRLSRKLINGIRDKQSGKTILDFLKSDGFANRNFMQLIHDDSLTFKEDIQKAQVSGQGDSLHEHIANLAGSPAIKKGILQTVKVVDELVKVMGRHKPENIVIEMARENQTTQKGQKNSRERMKRIEEGIKELGSQILKEHPVENTQLQNEKLYLYYLQNGRDMYVDQELDINRLSDYDVDHIVPQSFLKDDSIDNKVLTRSDKARGKSDNVPSEEVVKKMKNYWRQLLNAKLITQRKFDNLTKAERGGLSELDKAGFIKRQLVETRQITKHVAQILDSRMNTKYDENDKLIREVKVITLKSKLVSDFRKDFQFYKVREINNYHHAHDAYLNAVVGTALIKKYPKLESEFVYGDYKVYDVRKMIAKSEQEIGKATAKYFFYSNIMNFFKTEITLANGEIRKRPLIETNGETGEIVWDKGRDFATVRKVLSMPQVNIVKKTEVQTGGFSKESILPKRNSDKLIARKKDWDPKKYGGFDSPTVAYSVLVVAKVEKGKSKKLKSVKELLGITIMERSSFEKNPIDFLEAKGYKEVKKDLIIKLPKYSLFELENGRKRMLASAGELQKGNELALPSKYVNFLYLASHYEKLKGSPEDNEQKQLFVEQHKHYLDEIIEQISEFSKRVILADANLDKVLSAYNKHRDKPIREQAENIIHLFTLTNLGAPAAFKYFDTTIDRKRYTSTKEVLDATLIHQSITGLYETRIDLSQLGGDGGGGSGGTLQLEEEYRLFEPESTQKQEMDIWLKNFPQAWAETGGMGTAHCQAPVLIQLKATATPISIRQYPMPHEAYQGIKPHIRRMLDQGILKPCQSPWNTPLLPVKKPGTEDYRPVQDLREVNKRVEDIHPTVPNPYNLLSTLPPSHPWYTVLDLKDAFFCLRLHSESQLLFAFEWRDPEIGLSGQLTWTRLPQGFKNSPTLFNEALHSDLADFRVRYPALVLLQYVDDLLLAAATRTECLEGTKALLETLGNKGYRASAKKAQICLQEVTYLGYSLKDGQRWLTKARKEAILSIPVPKNSRQVREFLGKAGYCRLFIPGFAELAAPLYPLTRPGTLFQWGTEQQLAFEDIKKALLSSPALGLPDITKPFELFIDENSGFAKGVLVQKLGPWKRPVAYLSKKLDTVASGWPPCLRMVAAIAILVKDAGKLTLGQPLTILTSHPVEALVRQPPNKWLSNARMTHYQAMLLDAERVHFGPTVSLNPATLLPLPSGGNHHDCLQILAETHGTRPDLTDQPLPDADLTWYTDGSSFIRNGEREAGAAVTTESEVIWAAPLPPGTSAQRAELIALTQALKMAEGKKLTVYTDSRYAFATTHVHGEIYRRRGWLTSEGKEIKNKNEILALLEALFLPKRLSIIHCPGHQKGDSPQAKGNRLADDTAKKAATETHSSLTVLPAGKRTADGSEFEKRTADGSEFESPKKKAKVE

SEQ ID NO: 6005 - protein, 2079 aa, synthetic construct
MPAAKRVKLDGGDKKYSIGLDIGTNSVGWAVITDEYKVPSKKFKVLGNTDRHSIKKNLIGALLFDSGETAEATRLKRTARRRYTRRKNRICYLQEIFSNEMAKVDDSFFHRLEESFLVEEDKKHERHPIFGNIVDEVAYHEKYPTIYHLRKKLVDSTDKADLRLIYLALAHMIKFRGHFLIEGDLNPDNSDVDKLFIQLVQTYNQLFEENPINASGVDAKAILSARLSKSRRLENLIAQLPGEKKNGLFGNLIALSLGLTPNFKSNFDLAEDAKLQLSKDTYDDDLDNLLAQIGDQYADLFLAAKNLSDAILLSDILRVNTEITKAPLSASMIKRYDEHHQDLTLLKALVRQQLPEKYKEIFFDQSKNGYAGYIDGGASQEEFYKFIKPILEKMDGTEELLVKLNREDLLRKQRTFDNGSIPHQIHLGELHAILRRQEDFYPFLKDNREKIEKILTFRIPYYVGPLARGNSRFAWMTRKSEETITPWNFEEVVDKGASAQSFIERMTNFDKNLPNEKVLPKHSLLYEYFTVYNELTKVKYVTEGMRKPAFLSGEQKKAIVDLLFKTNRKVTVKQLKEDYFKKIECFDSVEISGVEDRFNASLGTYHDLLKIIKDKDFLDNEENEDILEDIVLTLTLFEDREMIEERLKTYAHLFDDKVMKQLKRRRYTGWGRLSRKLINGIRDKQSGKTILDFLKSDGFANRNFMQLIHDDSLTFKEDIQKAQVSGQGDSLHEHIANLAGSPAIKKGILQTVKVVDELVKVMGRHKPENIVIEMARENQTTQKGQKNSRERMKRIEEGIKELGSQILKEHPVENTQLQNEKLYLYYLQNGRDMYVDQELDINRLSDYDVDHIVPQSFLKDDSIDNKVLTRSDKARGKSDNVPSEEVVKKMKNYWRQLLNAKLITQRKFDNLTKAERGGLSELDKAGFIKRQLVETRQITKHVAQILDSRMNTKYDENDKLIREVKVITLKSKLVSDFRKDFQFYKVREINNYHHAHDAYLNAVVGTALIKKYPKLESEFVYGDYKVYDVRKMIAKSEQEIGKATAKYFFYSNIMNFFKTEITLANGEIRKRPLIETNGETGEIVWDKGRDFATVRKVLSMPQVNIVKKTEVQTGGFSKESILPKRNSDKLIARKKDWDPKKYGGFDSPTVAYSVLVVAKVEKGKSKKLKSVKELLGITIMERSSFEKNPIDFLEAKGYKEVKKDLIIKLPKYSLFELENGRKRMLASAGELQKGNELALPSKYVNFLYLASHYEKLKGSPEDNEQKQLFVEQHKHYLDEIIEQISEFSKRVILADANLDKVLSAYNKHRDKPIREQAENIIHLFTLTNLGAPAAFKYFDTTIDRKRYTSTKEVLDATLIHQSITGLYETRIDLSQLGGDGGGGSGGVPWLTQQPLQLTILVPLQEYQEKILSKTALPEDQKQQLKTLFVKYDNLWQHWENQVGHRKIRPHNIATGDYPPRPQKQYPINPKAKPSIQIVIDDLLKQGVLTPQNSTMNTPVYPVPKPDGRWRMVLDYREVNKTIPLTAAQNQHSAGILATIVRQKYKTTLDLANGFWAHPITPESYWLTAFTWQGKQYCWTRLPQGFLNSPALFNADVVDLLKEIPNVQVYVDDIYLSHDDPKEHVQQLEKVFQILLQAGYVVSLKKSEIGQKTVEFLGFNITKEGRGLTDTFKTKLLNITPPKDLKQLQSILGKLNFARNFIPNFAELVQPLYNLIAPAKGKYIEWSEENTKQLNMVIEALNTASNLEERLPEQRLVIKVNTSPSAGYVRYYNETGKKPIMYLNYVFSKAELKFSMLEKLLTTMHKALIKAMDLAMGQEILVYSPIVSMTKIQKTPLPERKALPIRWITWMTYLEDPRIQFHYDKTLPELKHIPDVYTSSQSPVKHPSQYEGVFYTDGSAIKSPDPTKSNNAGMGIVHATYKPEYQVLNQWSIPLGNHTAQMAEIAAVEFACKKALKIPGPVLVITDSFYVAESANKELPYWKSNGFVNNKKKPLKHISKWKSIAECLSMKPDITIQHEKGISLQIPVFILKGNALADKLATQGSYVVNAGKRTADGSEFEKRTADGSEFESPKKKAKVE

SEQ ID NO: 6006 - protein, 2210 aa, synthetic construct
MPAAKRVKLDGGDKKYSIGLDIGTNSVGWAVITDEYKVPSKKFKVLGNTDRHSIKKNLIGALLFDSGETAEATRLKRTARRRYTRRKNRICYLQEIFSNEMAKVDDSFFHRLEESFLVEEDKKHERHPIFGNIVDEVAYHEKYPTIYHLRKKLVDSTDKADLRLIYLALAHMIKFRGHFLIEGDLNPDNSDVDKLFIQLVQTYNQLFEENPINASGVDAKAILSARLSKSRRLENLIAQLPGEKKNGLFGNLIALSLGLTPNFKSNFDLAEDAKLQLSKDTYDDDLDNLLAQIGDQYADLFLAAKNLSDAILLSDILRVNTEITKAPLSASMIKRYDEHHQDLTLLKALVRQQLPEKYKEIFFDQSKNGYAGYIDGGASQEEFYKFIKPILEKMDGTEELLVKLNREDLLRKQRTFDNGSIPHQIHLGELHAILRRQEDFYPFLKDNREKIEKILTFRIPYYVGPLARGNSRFAWMTRKSEETITPWNFEEVVDKGASAQSFIERMTNFDKNLPNEKVLPKHSLLYEYFTVYNELTKVKYVTEGMRKPAFLSGEQKKAIVDLLFKTNRKVTVKQLKEDYFKKIECFDSVEISGVEDRFNASLGTYHDLLKIIKDKDFLDNEENEDILEDIVLTLTLFEDREMIEERLKTYAHLFDDKVMKQLKRRRYTGWGRLSRKLINGIRDKQSGKTILDFLKSDGFANRNFMQLIHDDSLTFKEDIQKAQVSGQGDSLHEHIANLAGSPAIKKGILQTVKVVDELVKVMGRHKPENIVIEMARENQTTQKGQKNSRERMKRIEEGIKELGSQILKEHPVENTQLQNEKLYLYYLQNGRDMYVDQELDINRLSDYDVDHIVPQSFLKDDSIDNKVLTRSDKARGKSDNVPSEEVVKKMKNYWRQLLNAKLITQRKFDNLTKAERGGLSELDKAGFIKRQLVETRQITKHVAQILDSRMNTKYDENDKLIREVKVITLKSKLVSDFRKDFQFYKVREINNYHHAHDAYLNAVVGTALIKKYPKLESEFVYGDYKVYDVRKMIAKSEQEIGKATAKYFFYSNIMNFFKTEITLANGEIRKRPLIETNGETGEIVWDKGRDFATVRKVLSMPQVNIVKKTEVQTGGFSKESILPKRNSDKLIARKKDWDPKKYGGFDSPTVAYSVLVVAKVEKGKSKKLKSVKELLGITIMERSSFEKNPIDFLEAKGYKEVKKDLIIKLPKYSLFELENGRKRMLASAGELQKGNELALPSKYVNFLYLASHYEKLKGSPEDNEQKQLFVEQHKHYLDEIIEQISEFSKRVILADANLDKVLSAYNKHRDKPIREQAENIIHLFTLTNLGAPAAFKYFDTTIDRKRYTSTKEVLDATLIHQSITGLYETRIDLSQLGGDGGGGSGGTLGDQGSRGSDPLPEPRVTLTVEGIPTEFLVNTGAEHSVLTKPMGKMGSKRTVVAGATGSKVYPWTTKRLLKIGQKQVTHSFLVIPECPAPLLGRDLLTKLKAQIQFSTEGPQVTWEDRPAMCLVLNLEEEYRLHEKPVPPSIDPSWLQLFPMVWAEKAGMGLANQVPPVVVELKSDASPVAVRQYPMSKEAREGIRPHIQRFLDLGILVPCQSPWNTPLLPVKKPGTNDYRPVQDLREVNKRVQDIHPTVPNPYNLLSSLPPSHTWYSVLDLKDAFFCLKLHPNSQPLFAFEWRDPEKGNTGQLTWTRLPQGFKNSPTLFDEALHRDLASFRALNPQVVMLQYVDDLLVAAPTYRDCKEGTRRLLQELSKLGYRVSAKKAQLCREEVTYLGYLLKGGKRWLTPARKATVMKIPTPTTPRQVREFLGTAGFCRLWIPGFASLAAPLYPLTREKVPFTWTEAHQEAFGRIKEALLSAPALALPDLTKPFALYVDEKEGVARGVLTQTLGPWRRPVAYLSKKLDPVASGWPTCLKAIAAVALLLKDADKLTLGQNVLVIAPHNLESIVRQPPDRWMTNARMTHYQSLLLNERVSFAPPAILNPATLLPVESDDTPIHICSEILAEETGTRPDLRDQPLPGVPAWYTDGSSFIMDGRRQAGAAIVDNKRTVWASNLPEGTSAQKAELIALTQALRLAEGKSINIYTDSRYAFATAHVHGAIYKQRGLLTSAGKDIKNKEEILALLEAIHLPKRVAIIHCPGHQRGTDPVATGNRKADEAAKQAAQSTRILTETTKNAGKRTADGSEFEKRTADGSEFESPKKKAKVE

SEQ ID NO: 6007 - protein, 2210 aa, synthetic construct
MPAAKRVKLDGGDKKYSIGLDIGTNSVGWAVITDEYKVPSKKFKVLGNTDRHSIKKNLIGALLFDSGETAEATRLKRTARRRYTRRKNRICYLQEIFSNEMAKVDDSFFHRLEESFLVEEDKKHERHPIFGNIVDEVAYHEKYPTIYHLRKKLVDSTDKADLRLIYLALAHMIKFRGHFLIEGDLNPDNSDVDKLFIQLVQTYNQLFEENPINASGVDAKAILSARLSKSRRLENLIAQLPGEKKNGLFGNLIALSLGLTPNFKSNFDLAEDAKLQLSKDTYDDDLDNLLAQIGDQYADLFLAAKNLSDAILLSDILRVNTEITKAPLSASMIKRYDEHHQDLTLLKALVRQQLPEKYKEIFFDQSKNGYAGYIDGGASQEEFYKFIKPILEKMDGTEELLVKLNREDLLRKQRTFDNGSIPHQIHLGELHAILRRQEDFYPFLKDNREKIEKILTFRIPYYVGPLARGNSRFAWMTRKSEETITPWNFEEVVDKGASAQSFIERMTNFDKNLPNEKVLPKHSLLYEYFTVYNELTKVKYVTEGMRKPAFLSGEQKKAIVDLLFKTNRKVTVKQLKEDYFKKIECFDSVEISGVEDRFNASLGTYHDLLKIIKDKDFLDNEENEDILEDIVLTLTLFEDREMIEERLKTYAHLFDDKVMKQLKRRRYTGWGRLSRKLINGIRDKQSGKTILDFLKSDGFANRNFMQLIHDDSLTFKEDIQKAQVSGQGDSLHEHIANLAGSPAIKKGILQTVKVVDELVKVMGRHKPENIVIEMARENQTTQKGQKNSRERMKRIEEGIKELGSQILKEHPVENTQLQNEKLYLYYLQNGRDMYVDQELDINRLSDYDVDHIVPQSFLKDDSIDNKVLTRSDKARGKSDNVPSEEVVKKMKNYWRQLLNAKLITQRKFDNLTKAERGGLSELDKAGFIKRQLVETRQITKHVAQILDSRMNTKYDENDKLIREVKVITLKSKLVSDFRKDFQFYKVREINNYHHAHDAYLNAVVGTALIKKYPKLESEFVYGDYKVYDVRKMIAKSEQEIGKATAKYFFYSNIMNFFKTEITLANGEIRKRPLIETNGETGEIVWDKGRDFATVRKVLSMPQVNIVKKTEVQTGGFSKESILPKRNSDKLIARKKDWDPKKYGGFDSPTVAYSVLVVAKVEKGKSKKLKSVKELLGITIMERSSFEKNPIDFLEAKGYKEVKKDLIIKLPKYSLFELENGRKRMLASAGELQKGNELALPSKYVNFLYLASHYEKLKGSPEDNEQKQLFVEQHKHYLDEIIEQISEFSKRVILADANLDKVLSAYNKHRDKPIREQAENIIHLFTLTNLGAPAAFKYFDTTIDRKRYTSTKEVLDATLIHQSITGLYETRIDLSQLGGDGGGGSGGTLGDQGSRGSDPLPEPRVTLTVEGIPTEFLVNTGAEHSVLTKPMGKMGSKRTVVAGATGSKVYPWTTKRLLKIGQKQVTHSFLVIPECPAPLLGRDLLTKLKAQIQFSTEGPQVTWEDRPAMCLVLNLEEEYRLHEKPVPPSIDPSWLQLFPMVWAEKAGMGLANQVPPVVVELKSDASPVAVRQYPMSKEAREGIRPHIQRFLDLGILVPCQSPWNTPLLPVKKPGTNDYRPVQDLREVNKRVQDIHPTVPNPYNLLSSLPPSHTWYSVLDLKDAFFCLKLHPNSQPLFAFEWRDPEKGNTGQLTWTRLPQGFKNSPTLFNEALHRDLASFRALNPQVVMLQYVDDLLVAAPTYRDCKEGTRRLLQELSKLGYRVSAKKAQLCREEVTYLGYLLKGGKRWLTPARKATVMKIPTPTTPRQVREFLGTAGFCRLWIPGFASLAAPLYPLTRPKVPFTWTEAHQEAFGRIKEALLSAPALALPDLTKPFALYVDEKEGVARGVLTQTLGPWRRPVAYLSKKLDPVASGWPTCLKAIAAVALLLKDADKLTLGQNVLVIAPHNLESIVRQPPDRWMTNARMTHYQSLLLNERVSFAPPAILNPATLLPVESDDTPIHICSEILAEETGTRPDLRDQPLPGVPAWYTDGSSFIMDGRRQAGAAIVDNKRTVWASNLPEGTSAQKAELIALTQALRLAEGKSINIYTDSRYAFATAHVHGAIYKQRGWLTSAGKDIKNKEEILALLEAIHLPKRVAIIHCPGHQRGTDPVATGNRKADEAAKQAAQSTRILTETTKNAGKRTADGSEFEKRTADGSEFESPKKKAKVE

SEQ ID NO: 6008 - protein, 2088 aa, synthetic construct
MPAAKRVKLDGGDKKYSIGLDIGTNSVGWAVITDEYKVPSKKFKVLGNTDRHSIKKNLIGALLFDSGETAEATRLKRTARRRYTRRKNRICYLQEIFSNEMAKVDDSFFHRLEESFLVEEDKKHERHPIFGNIVDEVAYHEKYPTIYHLRKKLVDSTDKADLRLIYLALAHMIKFRGHFLIEGDLNPDNSDVDKLFIQLVQTYNQLFEENPINASGVDAKAILSARLSKSRRLENLIAQLPGEKKNGLFGNLIALSLGLTPNFKSNFDLAEDAKLQLSKDTYDDDLDNLLAQIGDQYADLFLAAKNLSDAILLSDILRVNTEITKAPLSASMIKRYDEHHQDLTLLKALVRQQLPEKYKEIFFDQSKNGYAGYIDGGASQEEFYKFIKPILEKMDGTEELLVKLNREDLLRKQRTFDNGSIPHQIHLGELHAILRRQEDFYPFLKDNREKIEKILTFRIPYYVGPLARGNSRFAWMTRKSEETITPWNFEEVVDKGASAQSFIERMTNFDKNLPNEKVLPKHSLLYEYFTVYNELTKVKYVTEGMRKPAFLSGEQKKAIVDLLFKTNRKVTVKQLKEDYFKKIECFDSVEISGVEDRFNASLGTYHDLLKIIKDKDFLDNEENEDILEDIVLTLTLFEDREMIEERLKTYAHLFDDKVMKQLKRRRYTGWGRLSRKLINGIRDKQSGKTILDFLKSDGFANRNFMQLIHDDSLTFKEDIQKAQVSGQGDSLHEHIANLAGSPAIKKGILQTVKVVDELVKVMGRHKPENIVIEMARENQTTQKGQKNSRERMKRIEEGIKELGSQILKEHPVENTQLQNEKLYLYYLQNGRDMYVDQELDINRLSDYDVDHIVPQSFLKDDSIDNKVLTRSDKARGKSDNVPSEEVVKKMKNYWRQLLNAKLITQRKFDNLTKAERGGLSELDKAGFIKRQLVETRQITKHVAQILDSRMNTKYDENDKLIREVKVITLKSKLVSDFRKDFQFYKVREINNYHHAHDAYLNAVVGTALIKKYPKLESEFVYGDYKVYDVRKMIAKSEQEIGKATAKYFFYSNIMNFFKTEITLANGEIRKRPLIETNGETGEIVWDKGRDFATVRKVLSMPQVNIVKKTEVQTGGFSKESILPKRNSDKLIARKKDWDPKKYGGFDSPTVAYSVLVVAKVEKGKSKKLKSVKELLGITIMERSSFEKNPIDFLEAKGYKEVKKDLIIKLPKYSLFELENGRKRMLASAGELQKGNELALPSKYVNFLYLASHYEKLKGSPEDNEQKQLFVEQHKHYLDEIIEQISEFSKRVILADANLDKVLSAYNKHRDKPIREQAENIIHLFTLTNLGAPAAFKYFDTTIDRKRYTSTKEVLDATLIHQSITGLYETRIDLSQLGGDGGGGSGGTLNLEDEYRLYETSAEPEVSPGSTWLSDFPQAWAETGGMGLAVRQAPLIIPLKATSTPVSIKQYPMSQEAKLGIKPHIQRLLDQGILVPCQSPWNTPLLPVKKPGTNDYRPVQDLREVNKRVEDIHPTVPNPYNLLSGLPPSHRWYTVLDLKDAFFCLRLHPTSQPLFAFEWRDPGMGISGQLTWTRLPQGFKNSPTLFNEALHRDLADFRIQHPDLILLQYVDDILLAATSELDCQQGTRALLLTLGNLGYRASAKKAQLCQKQVKYLGYLLKEGQRWLTEARKETVMGQPTPKTPRQLREFLGKAGFCRLFIPGFAEMAAPLYPLTKPGTLFNWGPDQQKAYQEIKQALLTAPALGLPDLTKPFELFVDEKQGYAKGVLTQKLGPWRRPVAYLSKKLDPVAAGWPPCLRMVAAIAVLRKDAGKLTMGQPLVILAPHAVEALVKQPPDRWLSNARMTHYQAMLLDTDRVQFGPVVALNPATLLPLPEEGAPHDCLEILAETHGTRPDLTDQPIPDADHTWYTDGSSFLQEGQRKAGAAVTTETEVIWARALPAGTSAQRAELIALTQALKMAEGKRLNVYTDSRYAFATAHIHGEIYRRRGWLTSEGREIKNKSEILALLKALFLPKRLSIIHCLGHQKGDSAEARGNRLADQAAREAAIKTPPDTSTLLAGKRTADGSEFEKRTADGSEFESPKKKAKVE

SEQ ID NO: 6009 - protein, 2088 aa, synthetic construct
MPAAKRVKLDGGDKKYSIGLDIGTNSVGWAVITDEYKVPSKKFKVLGNTDRHSIKKNLIGALLFDSGETAEATRLKRTARRRYTRRKNRICYLQEIFSNEMAKVDDSFFHRLEESFLVEEDKKHERHPIFGNIVDEVAYHEKYPTIYHLRKKLVDSTDKADLRLIYLALAHMIKFRGHFLIEGDLNPDNSDVDKLFIQLVQTYNQLFEENPINASGVDAKAILSARLSKSRRLENLIAQLPGEKKNGLFGNLIALSLGLTPNFKSNFDLAEDAKLQLSKDTYDDDLDNLLAQIGDQYADLFLAAKNLSDAILLSDILRVNTEITKAPLSASMIKRYDEHHQDLTLLKALVRQQLPEKYKEIFFDQSKNGYAGYIDGGASQEEFYKFIKPILEKMDGTEELLVKLNREDLLRKQRTFDNGSIPHQIHLGELHAILRRQEDFYPFLKDNREKIEKILTFRIPYYVGPLARGNSRFAWMTRKSEETITPWNFEEVVDKGASAQSFIERMTNFDKNLPNEKVLPKHSLLYEYFTVYNELTKVKYVTEGMRKPAFLSGEQKKAIVDLLFKTNRKVTVKQLKEDYFKKIECFDSVEISGVEDRFNASLGTYHDLLKIIKDKDFLDNEENEDILEDIVLTLTLFEDREMIEERLKTYAHLFDDKVMKQLKRRRYTGWGRLSRKLINGIRDKQSGKTILDFLKSDGFANRNFMQLIHDDSLTFKEDIQKAQVSGQGDSLHEHIANLAGSPAIKKGILQTVKVVDELVKVMGRHKPENIVIEMARENQTTQKGQKNSRERMKRIEEGIKELGSQILKEHPVENTQLQNEKLYLYYLQNGRDMYVDQELDINRLSDYDVDHIVPQSFLKDDSIDNKVLTRSDKARGKSDNVPSEEVVKKMKNYWRQLLNAKLITQRKFDNLTKAERGGLSELDKAGFIKRQLVETRQITKHVAQILDSRMNTKYDENDKLIREVKVITLKSKLVSDFRKDFQFYKVREINNYHHAHDAYLNAVVGTALIKKYPKLESEFVYGDYKVYDVRKMIAKSEQEIGKATAKYFFYSNIMNFFKTEITLANGEIRKRPLIETNGETGEIVWDKGRDFATVRKVLSMPQVNIVKKTEVQTGGFSKESILPKRNSDKLIARKKDWDPKKYGGFDSPTVAYSVLVVAKVEKGKSKKLKSVKELLGITIMERSSFEKNPIDFLEAKGYKEVKKDLIIKLPKYSLFELENGRKRMLASAGELQKGNELALPSKYVNFLYLASHYEKLKGSPEDNEQKQLFVEQHKHYLDEIIEQISEFSKRVILADANLDKVLSAYNKHRDKPIREQAENIIHLFTLTNLGAPAAFKYFDTTIDRKRYTSTKEVLDATLIHQSITGLYETRIDLSQLGGDGGGGSGGTLGIEDEYRLHETSTEPDVSLGSTWLSDFPQAWAETGGMGLAVRQAPLIIPLKATSTPVSIQQYPMSHEARLGIKPHIQRLLDQGILVPCQSPWNTPLLPVKKPGTNDYRPVQDLREVNKRVEDIHPTVPNPYNLLSGLPPSHQWYTVLDLKDAFFCLRLHPTSQPLFAFEWRDPGMGISGQLTWTRLPQGFKNSPTLFNEALHRDLADFRIQHPDLILLQYVDDILLAATSELDCQQGTRALLQTLGDLGYRASAKKAQICQKQVKYLGYLLREGQRWLTEARKETVMGQPVPKTPRQLREFLGTAGFCRLWIPGFAEMAAPLYPLTKPGTLFSWGPDQQKAYQEIKQALLTAPALGLPDLTKPFELFVDEKQGYAKGVLTQKLGPWRRPVAYLSKKLDPVAAGWPPCLRMVAAIAVLTKDAGKLTMGQPLVILAPHAVEALVKQPPDRWLSNARMTHYQAMLLDTDRVQFGPVVALNPATLLPLPEEGAPHDCLEILAETHGTRPDLTDQPIPDADHTWYTDGSSFLQEGQRKAGAAVTTETEVIWAGALPAGTSAQRAELIALTQALKMAEGKRLNVYTDSRYAFATAHIHGEIYRRRGWLTSEGREIKNKSEILALLKALFLPKRLSIIHCLGHQKGDSAEARGNRLADQAAREAAIKTPPDTSTLLAGKRTADGSEFEKRTADGSEFESPKKKAKVE

SEQ ID NO: 6010 - protein, 2088 aa, synthetic construct
MPAAKRVKLDGGDKKYSIGLDIGTNSVGWAVITDEYKVPSKKFKVLGNTDRHSIKKNLIGALLFDSGETAEATRLKRTARRRYTRRKNRICYLQEIFSNEMAKVDDSFFHRLEESFLVEEDKKHERHPIFGNIVDEVAYHEKYPTIYHLRKKLVDSTDKADLRLIYLALAHMIKFRGHFLIEGDLNPDNSDVDKLFIQLVQTYNQLFEENPINASGVDAKAILSARLSKSRRLENLIAQLPGEKKNGLFGNLIALSLGLTPNFKSNFDLAEDAKLQLSKDTYDDDLDNLLAQIGDQYADLFLAAKNLSDAILLSDILRVNTEITKAPLSASMIKRYDEHHQDLTLLKALVRQQLPEKYKEIFFDQSKNGYAGYIDGGASQEEFYKFIKPILEKMDGTEELLVKLNREDLLRKQRTFDNGSIPHQIHLGELHAILRRQEDFYPFLKDNREKIEKILTFRIPYYVGPLARGNSRFAWMTRKSEETITPWNFEEVVDKGASAQSFIERMTNFDKNLPNEKVLPKHSLLYEYFTVYNELTKVKYVTEGMRKPAFLSGEQKKAIVDLLFKTNRKVTVKQLKEDYFKKIECFDSVEISGVEDRFNASLGTYHDLLKIIKDKDFLDNEENEDILEDIVLTLTLFEDREMIEERLKTYAHLFDDKVMKQLKRRRYTGWGRLSRKLINGIRDKQSGKTILDFLKSDGFANRNFMQLIHDDSLTFKEDIQKAQVSGQGDSLHEHIANLAGSPAIKKGILQTVKVVDELVKVMGRHKPENIVIEMARENQTTQKGQKNSRERMKRIEEGIKELGSQILKEHPVENTQLQNEKLYLYYLQNGRDMYVDQELDINRLSDYDVDHIVPQSFLKDDSIDNKVLTRSDKARGKSDNVPSEEVVKKMKNYWRQLLNAKLITQRKFDNLTKAERGGLSELDKAGFIKRQLVETRQITKHVAQILDSRMNTKYDENDKLIREVKVITLKSKLVSDFRKDFQFYKVREINNYHHAHDAYLNAVVGTALIKKYPKLESEFVYGDYKVYDVRKMIAKSEQEIGKATAKYFFYSNIMNFFKTEITLANGEIRKRPLIETNGETGEIVWDKGRDFATVRKVLSMPQVNIVKKTEVQTGGFSKESILPKRNSDKLIARKKDWDPKKYGGFDSPTVAYSVLVVAKVEKGKSKKLKSVKELLGITIMERSSFEKNPIDFLEAKGYKEVKKDLIIKLPKYSLFELENGRKRMLASAGELQKGNELALPSKYVNFLYLASHYEKLKGSPEDNEQKQLFVEQHKHYLDEIIEQISEFSKRVILADANLDKVLSAYNKHRDKPIREQAENIIHLFTLTNLGAPAAFKYFDTTIDRKRYTSTKEVLDATLIHQSITGLYETRIDLSQLGGDGGGGSGGTLNIEDEYRLHETSKEPDVSLGSTWLSDFPQAWAETGGMGLAVRQAPLIIPLKATSTPVSIKQYPMSQEARLGIKPHIQRLLDQGILVPCQSPWNTPLLPVKKPGTNDYRPVQDLREVNKRVEDIHPTVPNPYNLLSGLPPSHQWYTVLDLKDAFFCLRLHPTSQPLFAFEWRDPEMGISGQLTWTRLPQGFKNSPTLFNEALHRDLAGFRIQHPDLILLQYVDDLLLAATSELDCQQGTRALLQTLGDLGYRASAKKAQICQKQVKYLGYLLKEGQRWLTEARKETVMGQPIPKTPRQLREFLGTAGFCRLWIPGFAEMAAPLYPLTKPGTLFNWGPDQQKAFQEIKQALLTAPALGLPDLTKPFELFVDEKQGYAKGVLTQKLGPWRRPVAYLSKKLDPVAAGWPPCLRMVAAIAVLTKDAGKLTMGQPLVILAPHAVEALVKQPPDRWLSNARMTHYQALLLDTDRVQFGPVVALNPATLLPLPEEGLQHDCLDILAEAHGTRSDLMDQPLPDADHTWYTDGSSFLQEGQRKAGAAVTTETEVIWARALPAGTSAQRAELIALTQALKMAEGKKLNVYTDSRYAFATAHIHGEIYRRRGWLTSEGKEIKNKDEILALLKALFLPKRLSIIHCPGHQKGNSAEARGNRMADQAAREVATRETPETSTLLAGKRTADGSEFEKRTADGSEFESPKKKAKVE

SEQ ID NO: 6011 - protein, 2088 aa, synthetic construct
MPAAKRVKLDGGDKKYSIGLDIGTNSVGWAVITDEYKVPSKKFKVLGNTDRHSIKKNLIGALLFDSGETAEATRLKRTARRRYTRRKNRICYLQEIFSNEMAKVDDSFFHRLEESFLVEEDKKHERHPIFGNIVDEVAYHEKYPTIYHLRKKLVDSTDKADLRLIYLALAHMIKFRGHFLIEGDLNPDNSDVDKLFIQLVQTYNQLFEENPINASGVDAKAILSARLSKSRRLENLIAQLPGEKKNGLFGNLIALSLGLTPNFKSNFDLAEDAKLQLSKDTYDDDLDNLLAQIGDQYADLFLAAKNLSDAILLSDILRVNTEITKAPLSASMIKRYDEHHQDLTLLKALVRQQLPEKYKEIFFDQSKNGYAGYIDGGASQEEFYKFIKPILEKMDGTEELLVKLNREDLLRKQRTFDNGSIPHQIHLGELHAILRRQEDFYPFLKDNREKIEKILTFRIPYYVGPLARGNSRFAWMTRKSEETITPWNFEEVVDKGASAQSFIERMTNFDKNLPNEKVLPKHSLLYEYFTVYNELTKVKYVTEGMRKPAFLSGEQKKAIVDLLFKTNRKVTVKQLKEDYFKKIECFDSVEISGVEDRFNASLGTYHDLLKIIKDKDFLDNEENEDILEDIVLTLTLFEDREMIEERLKTYAHLFDDKVMKQLKRRRYTGWGRLSRKLINGIRDKQSGKTILDFLKSDGFANRNFMQLIHDDSLTFKEDIQKAQVSGQGDSLHEHIANLAGSPAIKKGILQTVKVVDELVKVMGRHKPENIVIEMARENQTTQKGQKNSRERMKRIEEGIKELGSQILKEHPVENTQLQNEKLYLYYLQNGRDMYVDQELDINRLSDYDVDHIVPQSFLKDDSIDNKVLTRSDKARGKSDNVPSEEVVKKMKNYWRQLLNAKLITQRKFDNLTKAERGGLSELDKAGFIKRQLVETRQITKHVAQILDSRMNTKYDENDKLIREVKVITLKSKLVSDFRKDFQFYKVREINNYHHAHDAYLNAVVGTALIKKYPKLESEFVYGDYKVYDVRKMIAKSEQEIGKATAKYFFYSNIMNFFKTEITLANGEIRKRPLIETNGETGEIVWDKGRDFATVRKVLSMPQVNIVKKTEVQTGGFSKESILPKRNSDKLIARKKDWDPKKYGGFDSPTVAYSVLVVAKVEKGKSKKLKSVKELLGITIMERSSFEKNPIDFLEAKGYKEVKKDLIIKLPKYSLFELENGRKRMLASAGELQKGNELALPSKYVNFLYLASHYEKLKGSPEDNEQKQLFVEQHKHYLDEIIEQISEFSKRVILADANLDKVLSAYNKHRDKPIREQAENIIHLFTLTNLGAPAAFKYFDTTIDRKRYTSTKEVLDATLIHQSITGLYETRIDLSQLGGDGGGGSGGTLNIEDEYRLHETSKGPDVPLGSTWLSDFPQAWAETGGMGLAVRQAPLIIPLKATSTPVSIKQYPMSQEARLGIKPHIQRLLDQGILVPCQSPWNTPLLPVKKPGTNDYRPVQDLREVNKRVEDIHPTVPNPYNLLSGLPPSHQWYTVLDLKDAFFCLRLHPTSQSLFAFEWRDPEMGISGQLTWTRLPQGFKNSPTLFNEALHRDLADFRIQHPDLILLQYVDDLLLAATSELDCQQGTRALLQTLGDLGYRASAKKAQICQKQVKYLGYLLKEGQRWLTEARKETVMGQPTPKTPRQLREFLGTAGFCRLWIPGFAEMAAPLYPLTKPGTLFEWGPDQQKAYQEIKQALLTAPALGLPDLTKPFELFVDEKQGYAKGVLTQKLGPWRRPVAYLSKKLDPVAAGWPPCLRMVAAIAVLTKDAGKLTMGQPLVILAPHAVEALVKQPPDRWLSNARMTHYQALLLDTDRVQFGPIVALNPATLLPLPEEGLQHDCLDILAEAHGTRPDLTDQPLPDADHTWYTDGSSFLQEGQRKAGAAVTTETEVVWAKALPAGTSAQRAELIALTQALKMAEGKKLNVYTDSRYAFATAHIHGEIYRRRGWLTSEGKEIKNKDEILALLKALFLPKRLSIIHCPGHQKGNRAEARGNRMADQAAREVATRETPETSTLLAGKRTADGSEFEKRTADGSEFESPKKKAKVE

SEQ ID NO: 6012 - protein, 2088 aa, synthetic construct
MPAAKRVKLDGGDKKYSIGLDIGTNSVGWAVITDEYKVPSKKFKVLGNTDRHSIKKNLIGALLFDSGETAEATRLKRTARRRYTRRKNRICYLQEIFSNEMAKVDDSFFHRLEESFLVEEDKKHERHPIFGNIVDEVAYHEKYPTIYHLRKKLVDSTDKADLRLIYLALAHMIKFRGHFLIEGDLNPDNSDVDKLFIQLVQTYNQLFEENPINASGVDAKAILSARLSKSRRLENLIAQLPGEKKNGLFGNLIALSLGLTPNFKSNFDLAEDAKLQLSKDTYDDDLDNLLAQIGDQYADLFLAAKNLSDAILLSDILRVNTEITKAPLSASMIKRYDEHHQDLTLLKALVRQQLPEKYKEIFFDQSKNGYAGYIDGGASQEEFYKFIKPILEKMDGTEELLVKLNREDLLRKQRTFDNGSIPHQIHLGELHAILRRQEDFYPFLKDNREKIEKILTFRIPYYVGPLARGNSRFAWMTRKSEETITPWNFEEVVDKGASAQSFIERMTNFDKNLPNEKVLPKHSLLYEYFTVYNELTKVKYVTEGMRKPAFLSGEQKKAIVDLLFKTNRKVTVKQLKEDYFKKIECFDSVEISGVEDRFNASLGTYHDLLKIIKDKDFLDNEENEDILEDIVLTLTLFEDREMIEERLKTYAHLFDDKVMKQLKRRRYTGWGRLSRKLINGIRDKQSGKTILDFLKSDGFANRNFMQLIHDDSLTFKEDIQKAQVSGQGDSLHEHIANLAGSPAIKKGILQTVKVVDELVKVMGRHKPENIVIEMARENQTTQKGQKNSRERMKRIEEGIKELGSQILKEHPVENTQLQNEKLYLYYLQNGRDMYVDQELDINRLSDYDVDHIVPQSFLKDDSIDNKVLTRSDKARGKSDNVPSEEVVKKMKNYWRQLLNAKLITQRKFDNLTKAERGGLSELDKAGFIKRQLVETRQITKHVAQILDSRMNTKYDENDKLIREVKVITLKSKLVSDFRKDFQFYKVREINNYHHAHDAYLNAVVGTALIKKYPKLESEFVYGDYKVYDVRKMIAKSEQEIGKATAKYFFYSNIMNFFKTEITLANGEIRKRPLIETNGETGEIVWDKGRDFATVRKVLSMPQVNIVKKTEVQTGGFSKESILPKRNSDKLIARKKDWDPKKYGGFDSPTVAYSVLVVAKVEKGKSKKLKSVKELLGITIMERSSFEKNPIDFLEAKGYKEVKKDLIIKLPKYSLFELENGRKRMLASAGELQKGNELALPSKYVNFLYLASHYEKLKGSPEDNEQKQLFVEQHKHYLDEIIEQISEFSKRVILADANLDKVLSAYNKHRDKPIREQAENIIHLFTLTNLGAPAAFKYFDTTIDRKRYTSTKEVLDATLIHQSITGLYETRIDLSQLGGDGGGGSGGTLNIEDEYRLHETSKGPDVPLGSTWLSDFPQAWAETGGMGLAVRQAPLIIPLKATSTPVSIKQYPMSQEARLGIKPHIQRLLDQGILVPCQSPWNTPLLPVKKPGTNDYRPVQDLREVNKRVEDIHPTVPNPYNLLSGLPPSHQWYTVLDLKDAFFCLRLHPTSQSLFAFEWRDPEMGISGQLTWTRLPQGFKNSPTLFNEALHRDLADFRIQHPDLILLQYVDDLLLAATSELDCQQGTRALLQTLGDLGYRASAKKAQICQKQVKYLGYLLKEGQRWLTEARKETVMGQPTPKTPRQLREFLGKAGFCRLFIPGFAEMAAPLYPLTKPGTLFEWGPDQQKAYQEIKQALLTAPALGLPDLTKPFELFVDEKQGYAKGVLTQKLGPWRRPVAYLSKKLDPVAAGWPPCLRMVAAIAVLTKDAGKLTMGQPLVILAPHAVEALVKQPPDRWLSNARMTHYQALLLDTDRVQFGPIVALNPATLLPLPEEGLQHDCLDILAEAHGTRPDLTDQPLPDADHTWYTDGSSFLQEGQRKAGAAVTTETEVVWAKALPAGTSAQRAELIALTQALKMAEGKKLNVYTDSRYAFATAHIHGEIYRRRGWLTSEGKEIKNKDEILALLKALFLPKRLSIIHCPGHQKGNRAEARGNRMADQAAREVATRETPETSTLLAGKRTADGSEFEKRTADGSEFESPKKKAKVE

SEQ ID NO: 6013 - protein, 2086 aa, synthetic construct
MPAAKRVKLDGGDKKYSIGLDIGTNSVGWAVITDEYKVPSKKFKVLGNTDRHSIKKNLIGALLFDSGETAEATRLKRTARRRYTRRKNRICYLQEIFSNEMAKVDDSFFHRLEESFLVEEDKKHERHPIFGNIVDEVAYHEKYPTIYHLRKKLVDSTDKADLRLIYLALAHMIKFRGHFLIEGDLNPDNSDVDKLFIQLVQTYNQLFEENPINASGVDAKAILSARLSKSRRLENLIAQLPGEKKNGLFGNLIALSLGLTPNFKSNFDLAEDAKLQLSKDTYDDDLDNLLAQIGDQYADLFLAAKNLSDAILLSDILRVNTEITKAPLSASMIKRYDEHHQDLTLLKALVRQQLPEKYKEIFFDQSKNGYAGYIDGGASQEEFYKFIKPILEKMDGTEELLVKLNREDLLRKQRTFDNGSIPHQIHLGELHAILRRQEDFYPFLKDNREKIEKILTFRIPYYVGPLARGNSRFAWMTRKSEETITPWNFEEVVDKGASAQSFIERMTNFDKNLPNEKVLPKHSLLYEYFTVYNELTKVKYVTEGMRKPAFLSGEQKKAIVDLLFKTNRKVTVKQLKEDYFKKIECFDSVEISGVEDRFNASLGTYHDLLKIIKDKDFLDNEENEDILEDIVLTLTLFEDREMIEERLKTYAHLFDDKVMKQLKRRRYTGWGRLSRKLINGIRDKQSGKTILDFLKSDGFANRNFMQLIHDDSLTFKEDIQKAQVSGQGDSLHEHIANLAGSPAIKKGILQTVKVVDELVKVMGRHKPENIVIEMARENQTTQKGQKNSRERMKRIEEGIKELGSQILKEHPVENTQLQNEKLYLYYLQNGRDMYVDQELDINRLSDYDVDHIVPQSFLKDDSIDNKVLTRSDKARGKSDNVPSEEVVKKMKNYWRQLLNAKLITQRKFDNLTKAERGGLSELDKAGFIKRQLVETRQITKHVAQILDSRMNTKYDENDKLIREVKVITLKSKLVSDFRKDFQFYKVREINNYHHAHDAYLNAVVGTALIKKYPKLESEFVYGDYKVYDVRKMIAKSEQEIGKATAKYFFYSNIMNFFKTEITLANGEIRKRPLIETNGETGEIVWDKGRDFATVRKVLSMPQVNIVKKTEVQTGGFSKESILPKRNSDKLIARKKDWDPKKYGGFDSPTVAYSVLVVAKVEKGKSKKLKSVKELLGITIMERSSFEKNPIDFLEAKGYKEVKKDLIIKLPKYSLFELENGRKRMLASAGELQKGNELALPSKYVNFLYLASHYEKLKGSPEDNEQKQLFVEQHKHYLDEIIEQISEFSKRVILADANLDKVLSAYNKHRDKPIREQAENIIHLFTLTNLGAPAAFKYFDTTIDRKRYTSTKEVLDATLIHQSITGLYETRIDLSQLGGDGGGGSGGVLNLEEEYRLHEKPVPSSIDPSWLQLFPTVWAERAGMGLANQVPPVVVELRSGASPVAVRQYPMSKEAREGIRPHIQRFLDLGVLVPCQSPWNTPLLPVKKPGTNDYRPVQDLREINKRVQDIHPTVPNPYNLLSSLPPSHTWYSVLDLKDAFFCLKLHPNSQPLFAFEWRDPEKGNTGQLTWTRLPQGFKNSPTLFNEALHRDLAPFRALNPQVVLLQYVDDLLVAAPTYRDCKEGTQKLLQELSKLGYRVSAKKAQLCQKEVTYLGYLLKEGKRWLTPARKATVMKIPPPTTPRQVREFLGKAGFCRLFIPGFASLAAPLYPLTKPSIPFIWTEEHQKAFDRIKEALLSAPALALPDLTKPFTLYVDERAGVARGVLTQTLGPWRRPVAYLSKKLDPVASGWPTCLKAVAAVALLLKDADKLTLGQNVTVIASHSLESIVRQPPDRWMTNARMTHYQSLLLNERVSFAPPAVLNPATLLPVESEATPVHRCSEILAEETGTRRDLKDQPLPGVPAWYTDGSSFIAEGKRRAGAAIVDGKRTVWASSLPEGTSAQKAELVALTQALRLAEGKDINIYTDSRYAFATAHIHGAIYKQRGWLTSAGKDIKNKEEILALLEAIHLPKRVAIIHCPGHQKGNDPVATGNRRADEAAKQAALSTRVLAETTKPAGKRTADGSEFEKRTADGSEFESPKKKAKVE

SEQ ID NO: 6014 - protein, 2088 aa, synthetic construct
MPAAKRVKLDGGDKKYSIGLDIGTNSVGWAVITDEYKVPSKKFKVLGNTDRHSIKKNLIGALLFDSGETAEATRLKRTARRRYTRRKNRICYLQEIFSNEMAKVDDSFFHRLEESFLVEEDKKHERHPIFGNIVDEVAYHEKYPTIYHLRKKLVDSTDKADLRLIYLALAHMIKFRGHFLIEGDLNPDNSDVDKLFIQLVQTYNQLFEENPINASGVDAKAILSARLSKSRRLENLIAQLPGEKKNGLFGNLIALSLGLTPNFKSNFDLAEDAKLQLSKDTYDDDLDNLLAQIGDQYADLFLAAKNLSDAILLSDILRVNTEITKAPLSASMIKRYDEHHQDLTLLKALVRQQLPEKYKEIFFDQSKNGYAGYIDGGASQEEFYKFIKPILEKMDGTEELLVKLNREDLLRKQRTFDNGSIPHQIHLGELHAILRRQEDFYPFLKDNREKIEKILTFRIPYYVGPLARGNSRFAWMTRKSEETITPWNFEEVVDKGASAQSFIERMTNFDKNLPNEKVLPKHSLLYEYFTVYNELTKVKYVTEGMRKPAFLSGEQKKAIVDLLFKTNRKVTVKQLKEDYFKKIECFDSVEISGVEDRFNASLGTYHDLLKIIKDKDFLDNEENEDILEDIVLTLTLFEDREMIEERLKTYAHLFDDKVMKQLKRRRYTGWGRLSRKLINGIRDKQSGKTILDFLKSDGFANRNFMQLIHDDSLTFKEDIQKAQVSGQGDSLHEHIANLAGSPAIKKGILQTVKVVDELVKVMGRHKPENIVIEMARENQTTQKGQKNSRERMKRIEEGIKELGSQILKEHPVENTQLQNEKLYLYYLQNGRDMYVDQELDINRLSDYDVDHIVPQSFLKDDSIDNKVLTRSDKARGKSDNVPSEEVVKKMKNYWRQLLNAKLITQRKFDNLTKAERGGLSELDKAGFIKRQLVETRQITKHVAQILDSRMNTKYDENDKLIREVKVITLKSKLVSDFRKDFQFYKVREINNYHHAHDAYLNAVVGTALIKKYPKLESEFVYGDYKVYDVRKMIAKSEQEIGKATAKYFFYSNIMNFFKTEITLANGEIRKRPLIETNGETGEIVWDKGRDFATVRKVLSMPQVNIVKKTEVQTGGFSKESILPKRNSDKLIARKKDWDPKKYGGFDSPTVAYSVLVVAKVEKGKSKKLKSVKELLGITIMERSSFEKNPIDFLEAKGYKEVKKDLIIKLPKYSLFELENGRKRMLASAGELQKGNELALPSKYVNFLYLASHYEKLKGSPEDNEQKQLFVEQHKHYLDEIIEQISEFSKRVILADANLDKVLSAYNKHRDKPIREQAENIIHLFTLTNLGAPAAFKYFDTTIDRKRYTSTKEVLDATLIHQSITGLYETRIDLSQLGGDGGGGSGGTLNIEDEYRLHETSKEPDVPLGSTWLSDFPQAWAETGGMGLAVRQAPLIIPLKATSTPVSIKQYPMSQEARLGIKPHIQRLLDQGILVPCQSPWNTPLLPVKKPGTNDYRPVQDLREVNKRVEDIHPTVPNPYNLLSGLPPSHQWYTVLDLKDAFFCLRLHPTSQPLFAFEWRDPEMGISGQLTWTRLPQGFKNSPTLFNEALHRDLADFRIQHPDLILLQYVDDLLLAATSEQDCQRGTRALLQTLGNLGYRASAKKAQICQKQVKYLGYLLKEGQRWLTEARKETVMGQPTPKTPRQLREFLGKAGFCRLFIPGFAEMAAPLYPLTKPGTLFNWGPDQQKAYQEIKQALLTAPALGLPDLTKPFELFVDEKQGYAKGVLTQKLGPWRRPVAYLSKKLDPVAAGWPPCLRMVAAIAVLTKDAGKLTMGQPLVILAPHAVEALVKQPPDRWLSNARMTHYQAMLLDTDRVQFGPVVALNPATLLPLPEKEAPHDCLEILAETHGTRPDLTDQPIPDADYTWYTDGSSFLQEGQRRAGAAVTTETEVIWARALPAGTSAQRAELIALTQALKMAEGKKLNVYTDSRYAFATAHVHGEIYRRRGWLTSEGREIKNKNEILALLKALFLPKRLSIIHCPGHQKGNSAEARGNRMADQAAREAAMKAVLETSTLLAGKRTADGSEFEKRTADGSEFESPKKKAKVE

SEQ ID NO: 6015 - protein, 2093 aa, synthetic construct
MPAAKRVKLDGGDKKYSIGLDIGTNSVGWAVITDEYKVPSKKFKVLGNTDRHSIKKNLIGALLFDSGETAEATRLKRTARRRYTRRKNRICYLQEIFSNEMAKVDDSFFHRLEESFLVEEDKKHERHPIFGNIVDEVAYHEKYPTIYHLRKKLVDSTDKADLRLIYLALAHMIKFRGHFLIEGDLNPDNSDVDKLFIQLVQTYNQLFEENPINASGVDAKAILSARLSKSRRLENLIAQLPGEKKNGLFGNLIALSLGLTPNFKSNFDLAEDAKLQLSKDTYDDDLDNLLAQIGDQYADLFLAAKNLSDAILLSDILRVNTEITKAPLSASMIKRYDEHHQDLTLLKALVRQQLPEKYKEIFFDQSKNGYAGYIDGGASQEEFYKFIKPILEKMDGTEELLVKLNREDLLRKQRTFDNGSIPHQIHLGELHAILRRQEDFYPFLKDNREKIEKILTFRIPYYVGPLARGNSRFAWMTRKSEETITPWNFEEVVDKGASAQSFIERMTNFDKNLPNEKVLPKHSLLYEYFTVYNELTKVKYVTEGMRKPAFLSGEQKKAIVDLLFKTNRKVTVKQLKEDYFKKIECFDSVEISGVEDRFNASLGTYHDLLKIIKDKDFLDNEENEDILEDIVLTLTLFEDREMIEERLKTYAHLFDDKVMKQLKRRRYTGWGRLSRKLINGIRDKQSGKTILDFLKSDGFANRNFMQLIHDDSLTFKEDIQKAQVSGQGDSLHEHIANLAGSPAIKKGILQTVKVVDELVKVMGRHKPENIVIEMARENQTTQKGQKNSRERMKRIEEGIKELGSQILKEHPVENTQLQNEKLYLYYLQNGRDMYVDQELDINRLSDYDVDHIVPQSFLKDDSIDNKVLTRSDKARGKSDNVPSEEVVKKMKNYWRQLLNAKLITQRKFDNLTKAERGGLSELDKAGFIKRQLVETRQITKHVAQILDSRMNTKYDENDKLIREVKVITLKSKLVSDFRKDFQFYKVREINNYHHAHDAYLNAVVGTALIKKYPKLESEFVYGDYKVYDVRKMIAKSEQEIGKATAKYFFYSNIMNFFKTEITLANGEIRKRPLIETNGETGEIVWDKGRDFATVRKVLSMPQVNIVKKTEVQTGGFSKESILPKRNSDKLIARKKDWDPKKYGGFDSPTVAYSVLVVAKVEKGKSKKLKSVKELLGITIMERSSFEKNPIDFLEAKGYKEVKKDLIIKLPKYSLFELENGRKRMLASAGELQKGNELALPSKYVNFLYLASHYEKLKGSPEDNEQKQLFVEQHKHYLDEIIEQISEFSKRVILADANLDKVLSAYNKHRDKPIREQAENIIHLFTLTNLGAPAAFKYFDTTIDRKRYTSTKEVLDATLIHQSITGLYETRIDLSQLGGDGGGGSGGSGGTAPLEEEYRLFLEAPIQNVTLLEQWKREIPKVWAEINPPGLASTQAPIHVQLLSTALPVRVRQYPITLEAKRSLRETIRKFRAAGILRPVHSPWNTPLLPVRKSGTSEYRMVQDLREVNKRVETIHPTVPNPYTLLSLLPPDRIWYSVLDLKDAFFCIPLAPESQLIFAFEWADAEEGESGQLTWTRLPQGFKNSPTLFNEALNRDLQGFRLDHPSVSLLQYVDDLLIAADTQAACLSATRDLLMTLAELGYRVSGKKAQLCQEEVTYLGFKIHKGSRSLSNSRTQAILQIPVPKTKRQVREFLGTIGYCRLWIPGFAELAQPLYAATRPGNDPLVWGEKEEEAFQSLKLALTQPPALALPSLDKPFQLFVEETSGAAKGVLTQALGPWKRPVAYLSKRLDPVAAGWPRCLRAIAAAALLTREASKLTFGQDIEITSSHNLESLLRSPPDKWLTNARITQYQVLLLDPPRVRFKQTAALNPATLLPETDDTLPIHHCLDTLDSLTSTRPDLTDQPLAQAEATLFTDGSSYIRDGKRYAGAAVVTLDSVIWAEPLPIGTSAQKAELIALTKALEWSKDKSVNIYTDSRYAFATLHVHGMIYRERGWLTAGGKAIKNAPEILALLTAVWLPKRVAVMHCKGHQKDDAPTSTGNRRADEVAREVAIRPLSTQATISAGKRTADGSEFEKRTADGSEFESPKKKAKVE

SEQ ID NO: 6016 - protein, 2082 aa, synthetic construct
MPAAKRVKLDGGDKKYSIGLDIGTNSVGWAVITDEYKVPSKKFKVLGNTDRHSIKKNLIGALLFDSGETAEATRLKRTARRRYTRRKNRICYLQEIFSNEMAKVDDSFFHRLEESFLVEEDKKHERHPIFGNIVDEVAYHEKYPTIYHLRKKLVDSTDKADLRLIYLALAHMIKFRGHFLIEGDLNPDNSDVDKLFIQLVQTYNQLFEENPINASGVDAKAILSARLSKSRRLENLIAQLPGEKKNGLFGNLIALSLGLTPNFKSNFDLAEDAKLQLSKDTYDDDLDNLLAQIGDQYADLFLAAKNLSDAILLSDILRVNTEITKAPLSASMIKRYDEHHQDLTLLKALVRQQLPEKYKEIFFDQSKNGYAGYIDGGASQEEFYKFIKPILEKMDGTEELLVKLNREDLLRKQRTFDNGSIPHQIHLGELHAILRRQEDFYPFLKDNREKIEKILTFRIPYYVGPLARGNSRFAWMTRKSEETITPWNFEEVVDKGASAQSFIERMTNFDKNLPNEKVLPKHSLLYEYFTVYNELTKVKYVTEGMRKPAFLSGEQKKAIVDLLFKTNRKVTVKQLKEDYFKKIECFDSVEISGVEDRFNASLGTYHDLLKIIKDKDFLDNEENEDILEDIVLTLTLFEDREMIEERLKTYAHLFDDKVMKQLKRRRYTGWGRLSRKLINGIRDKQSGKTILDFLKSDGFANRNFMQLIHDDSLTFKEDIQKAQVSGQGDSLHEHIANLAGSPAIKKGILQTVKVVDELVKVMGRHKPENIVIEMARENQTTQKGQKNSRERMKRIEEGIKELGSQILKEHPVENTQLQNEKLYLYYLQNGRDMYVDQELDINRLSDYDVDHIVPQSFLKDDSIDNKVLTRSDKARGKSDNVPSEEVVKKMKNYWRQLLNAKLITQRKFDNLTKAERGGLSELDKAGFIKRQLVETRQITKHVAQILDSRMNTKYDENDKLIREVKVITLKSKLVSDFRKDFQFYKVREINNYHHAHDAYLNAVVGTALIKKYPKLESEFVYGDYKVYDVRKMIAKSEQEIGKATAKYFFYSNIMNFFKTEITLANGEIRKRPLIETNGETGEIVWDKGRDFATVRKVLSMPQVNIVKKTEVQTGGFSKESILPKRNSDKLIARKKDWDPKKYGGFDSPTVAYSVLVVAKVEKGKSKKLKSVKELLGITIMERSSFEKNPIDFLEAKGYKEVKKDLIIKLPKYSLFELENGRKRMLASAGELQKGNELALPSKYVNFLYLASHYEKLKGSPEDNEQKQLFVEQHKHYLDEIIEQISEFSKRVILADANLDKVLSAYNKHRDKPIREQAENIIHLFTLTNLGAPAAFKYFDTTIDRKRYTSTKEVLDATLIHQSITGLYETRIDLSQLGGDGGGGSGGSGGVPWILKKPLELTIKLDLEEQQGTLLNNSILSKKGKEELKQLFEKYSALWQSWENQVGHRRIRPHKIATGTVKPTPQKQYHINPKAKPDIQIVINDLLKQGVLIQKESTMNTPVYPVPKPNGRWRMVLDYRAVNKVTPLIAVQNQHSYGILGSLFKGRYKTTIDLSNGFWAHPIVPEDYWITAFTWQGKQYCWTVLPQGFLNSPGLFNGDVVDLLQGIPNVEVYVDDVYISHDSEKEHLEYLDILFNRLKEAGYIISLKKSNIANSIVDFLGFQITNEGRGLTDTFKEKLENITAPTTLKQLQSILGKLNFARNFIPDFTELIAPLYALIPKSPKNYVPWQIEHSTTLETLITKLNGAEYLQGRKGDKTLIMKVNASYTTGYIRYYNEGEKKPISYVSIVFSKTELKFTELEKLLTTVHKGLLKALDLSMGQNIHVYSPIVSMQNIQKTPQTAKKALASRWLSWLSYLEDPRIRFFYDPQMPALKDLPAVDTGKDNKKHPSNFQHIFYTDGSAITSPTKEGHLNAGMGIVYFINKDGNLQKQQEWSISLGNHTAQFAEIAAFEFALKKCLPLGGNILVVTDSNYVAKAYNEELDVWASNGFVNNRKKPLKHISKWKSVADLKRLRPDVVVTHEPGHQKLDSSPHAYGNNLADQLATQASFKVHAGKRTADGSEFEKRTADGSEFESPKKKAKVE

SEQ ID NO: 6017 - protein, 2090 aa, synthetic construct
MPAAKRVKLDGGDKKYSIGLDIGTNSVGWAVITDEYKVPSKKFKVLGNTDRHSIKKNLIGALLFDSGETAEATRLKRTARRRYTRRKNRICYLQEIFSNEMAKVDDSFFHRLEESFLVEEDKKHERHPIFGNIVDEVAYHEKYPTIYHLRKKLVDSTDKADLRLIYLALAHMIKFRGHFLIEGDLNPDNSDVDKLFIQLVQTYNQLFEENPINASGVDAKAILSARLSKSRRLENLIAQLPGEKKNGLFGNLIALSLGLTPNFKSNFDLAEDAKLQLSKDTYDDDLDNLLAQIGDQYADLFLAAKNLSDAILLSDILRVNTEITKAPLSASMIKRYDEHHQDLTLLKALVRQQLPEKYKEIFFDQSKNGYAGYIDGGASQEEFYKFIKPILEKMDGTEELLVKLNREDLLRKQRTFDNGSIPHQIHLGELHAILRRQEDFYPFLKDNREKIEKILTFRIPYYVGPLARGNSRFAWMTRKSEETITPWNFEEVVDKGASAQSFIERMTNFDKNLPNEKVLPKHSLLYEYFTVYNELTKVKYVTEGMRKPAFLSGEQKKAIVDLLFKTNRKVTVKQLKEDYFKKIECFDSVEISGVEDRFNASLGTYHDLLKIIKDKDFLDNEENEDILEDIVLTLTLFEDREMIEERLKTYAHLFDDKVMKQLKRRRYTGWGRLSRKLINGIRDKQSGKTILDFLKSDGFANRNFMQLIHDDSLTFKEDIQKAQVSGQGDSLHEHIANLAGSPAIKKGILQTVKVVDELVKVMGRHKPENIVIEMARENQTTQKGQKNSRERMKRIEEGIKELGSQILKEHPVENTQLQNEKLYLYYLQNGRDMYVDQELDINRLSDYDVDHIVPQSFLKDDSIDNKVLTRSDKARGKSDNVPSEEVVKKMKNYWRQLLNAKLITQRKFDNLTKAERGGLSELDKAGFIKRQLVETRQITKHVAQILDSRMNTKYDENDKLIREVKVITLKSKLVSDFRKDFQFYKVREINNYHHAHDAYLNAVVGTALIKKYPKLESEFVYGDYKVYDVRKMIAKSEQEIGKATAKYFFYSNIMNFFKTEITLANGEIRKRPLIETNGETGEIVWDKGRDFATVRKVLSMPQVNIVKKTEVQTGGFSKESILPKRNSDKLIARKKDWDPKKYGGFDSPTVAYSVLVVAKVEKGKSKKLKSVKELLGITIMERSSFEKNPIDFLEAKGYKEVKKDLIIKLPKYSLFELENGRKRMLASAGELQKGNELALPSKYVNFLYLASHYEKLKGSPEDNEQKQLFVEQHKHYLDEIIEQISEFSKRVILADANLDKVLSAYNKHRDKPIREQAENIIHLFTLTNLGAPAAFKYFDTTIDRKRYTSTKEVLDATLIHQSITGLYETRIDLSQLGGDGGGGSGGSGGTLQLEEEYRLFEPESTQKQEMDIWLKNFPQAWAETGGMGTAHCQAPVLIQLKATATPISIRQYPMPHEAYQGIKPHIRRMLDQGILKPCQSPWNTPLLPVKKPGTEDYRPVQDLREVNKRVEDIHPTVPNPYNLLSTLPPSHPWYTVLDLKDAFFCLRLHSESQLLFAFEWRDPEIGLSGQLTWTRLPQGFKNSPTLFNEALHSDLADFRVRYPALVLLQYVDDLLLAAATRTECLEGTKALLETLGNKGYRASAKKAQICLQEVTYLGYSLKDGQRWLTKARKEAILSIPVPKNSRQVREFLGKAGYCRLFIPGFAELAAPLYPLTRPGTLFQWGTEQQLAFEDIKKALLSSPALGLPDITKPFELFIDENSGFAKGVLVQKLGPWKRPVAYLSKKLDTVASGWPPCLRMVAAIAILVKDAGKLTLGQPLTILTSHPVEALVRQPPNKWLSNARMTHYQAMLLDAERVHFGPTVSLNPATLLPLPSGGNHHDCLQILAETHGTRPDLTDQPLPDADLTWYTDGSSFIRNGEREAGAAVTTESEVIWAAPLPPGTSAQRAELIALTQALKMAEGKKLTVYTDSRYAFATTHVHGEIYRRRGWLTSEGKEIKNKNEILALLEALFLPKRLSIIHCPGHQKGDSPQAKGNRLADDTAKKAATETHSSLTVLPAGKRTADGSEFEKRTADGSEFESPKKKAKVE

SEQ ID NO: 6018 - protein, 2171 aa, synthetic construct
MPAAKRVKLDGGDKKYSIGLDIGTNSVGWAVITDEYKVPSKKFKVLGNTDRHSIKKNLIGALLFDSGETAEATRLKRTARRRYTRRKNRICYLQEIFSNEMAKVDDSFFHRLEESFLVEEDKKHERHPIFGNIVDEVAYHEKYPTIYHLRKKLVDSTDKADLRLIYLALAHMIKFRGHFLIEGDLNPDNSDVDKLFIQLVQTYNQLFEENPINASGVDAKAILSARLSKSRRLENLIAQLPGEKKNGLFGNLIALSLGLTPNFKSNFDLAEDAKLQLSKDTYDDDLDNLLAQIGDQYADLFLAAKNLSDAILLSDILRVNTEITKAPLSASMIKRYDEHHQDLTLLKALVRQQLPEKYKEIFFDQSKNGYAGYIDGGASQEEFYKFIKPILEKMDGTEELLVKLNREDLLRKQRTFDNGSIPHQIHLGELHAILRRQEDFYPFLKDNREKIEKILTFRIPYYVGPLARGNSRFAWMTRKSEETITPWNFEEVVDKGASAQSFIERMTNFDKNLPNEKVLPKHSLLYEYFTVYNELTKVKYVTEGMRKPAFLSGEQKKAIVDLLFKTNRKVTVKQLKEDYFKKIECFDSVEISGVEDRFNASLGTYHDLLKIIKDKDFLDNEENEDILEDIVLTLTLFEDREMIEERLKTYAHLFDDKVMKQLKRRRYTGWGRLSRKLINGIRDKQSGKTILDFLKSDGFANRNFMQLIHDDSLTFKEDIQKAQVSGQGDSLHEHIANLAGSPAIKKGILQTVKVVDELVKVMGRHKPENIVIEMARENQTTQKGQKNSRERMKRIEEGIKELGSQILKEHPVENTQLQNEKLYLYYLQNGRDMYVDQELDINRLSDYDVDHIVPQSFLKDDSIDNKVLTRSDKARGKSDNVPSEEVVKKMKNYWRQLLNAKLITQRKFDNLTKAERGGLSELDKAGFIKRQLVETRQITKHVAQILDSRMNTKYDENDKLIREVKVITLKSKLVSDFRKDFQFYKVREINNYHHAHDAYLNAVVGTALIKKYPKLESEFVYGDYKVYDVRKMIAKSEQEIGKATAKYFFYSNIMNFFKTEITLANGEIRKRPLIETNGETGEIVWDKGRDFATVRKVLSMPQVNIVKKTEVQTGGFSKESILPKRNSDKLIARKKDWDPKKYGGFDSPTVAYSVLVVAKVEKGKSKKLKSVKELLGITIMERSSFEKNPIDFLEAKGYKEVKKDLIIKLPKYSLFELENGRKRMLASAGELQKGNELALPSKYVNFLYLASHYEKLKGSPEDNEQKQLFVEQHKHYLDEIIEQISEFSKRVILADANLDKVLSAYNKHRDKPIREQAENIIHLFTLTNLGAPAAFKYFDTTIDRKRYTSTKEVLDATLIHQSITGLYETRIDLSQLGGDGGGGSGGSGGMNPLQLLQPLPAEIKGTKLLAHWNSGATITCIPESFLEDEQPIKKTLIKTIHGEKQQNVYYVTFKVKGRKVEAEVIASPYEYILLSPTDVPWLTQQPLQLTILVPLQEYQEKILSKTALPEDQKQQLKTLFVKYDNLWQHWENQVGHRKIRPHNIATGDYPPRPQKQYPINPKAKPSIQIVIDDLLKQGVLTPQNSTMNTPVYPVPKPDGRWRMVLDYREVNKTIPLTAAQNQHSAGILATIVRQKYKTTLDLANGFWAHPITPESYWLTAFTWQGKQYCWTRLPQGFLNSPALFNADVVDLLKEIPNVQVYVDDIYLSHDDPKEHVQQLEKVFQILLQAGYVVSLKKSEIGQKTVEFLGFNITKEGRGLTDTFKTKLLNITPPKDLKQLQSILGLLNFARNFIPNFAELVQPLYNLIAPAKGKYIEWSEENTKQLNMVIEALNTASNLEERLPEQRLVIKVNTSPSAGYVRYYNETGKKPIMYLNYVFSKAELKFSMLEKLLTTMHKALIKAMDLAMGQEILVYSPIVSMTKIQKTPLPERKALPIRWITWMTYLEDPRIQFHYDKTLPELKHIPDVYTSSQSPVKHPSQYEGVFYTDGSAIKSPDPTKSNNAGMGIVHATYKPEYQVLNQWSIPLGNHTAQMAEIAAVEFACKKALKIPGPVLVITDSFYVAESANKELPYWKSNGFVNNKKKPLKHISKWKSIAECLSMKPDITIQHEKGISLQIPVFILKGNALADKLATQGSYVVNAGKRTADGSEFEKRTADGSEFESPKKKAKVE

SEQ ID NO: 6019 - protein, 2213 aa, synthetic construct
MPAAKRVKLDGGDKKYSIGLDIGTNSVGWAVITDEYKVPSKKFKVLGNTDRHSIKKNLIGALLFDSGETAEATRLKRTARRRYTRRKNRICYLQEIFSNEMAKVDDSFFHRLEESFLVEEDKKHERHPIFGNIVDEVAYHEKYPTIYHLRKKLVDSTDKADLRLIYLALAHMIKFRGHFLIEGDLNPDNSDVDKLFIQLVQTYNQLFEENPINASGVDAKAILSARLSKSRRLENLIAQLPGEKKNGLFGNLIALSLGLTPNFKSNFDLAEDAKLQLSKDTYDDDLDNLLAQIGDQYADLFLAAKNLSDAILLSDILRVNTEITKAPLSASMIKRYDEHHQDLTLLKALVRQQLPEKYKEIFFDQSKNGYAGYIDGGASQEEFYKFIKPILEKMDGTEELLVKLNREDLLRKQRTFDNGSIPHQIHLGELHAILRRQEDFYPFLKDNREKIEKILTFRIPYYVGPLARGNSRFAWMTRKSEETITPWNFEEVVDKGASAQSFIERMTNFDKNLPNEKVLPKHSLLYEYFTVYNELTKVKYVTEGMRKPAFLSGEQKKAIVDLLFKTNRKVTVKQLKEDYFKKIECFDSVEISGVEDRFNASLGTYHDLLKIIKDKDFLDNEENEDILEDIVLTLTLFEDREMIEERLKTYAHLFDDKVMKQLKRRRYTGWGRLSRKLINGIRDKQSGKTILDFLKSDGFANRNFMQLIHDDSLTFKEDIQKAQVSGQGDSLHEHIANLAGSPAIKKGILQTVKVVDELVKVMGRHKPENIVIEMARENQTTQKGQKNSRERMKRIEEGIKELGSQILKEHPVENTQLQNEKLYLYYLQNGRDMYVDQELDINRLSDYDVDHIVPQSFLKDDSIDNKVLTRSDKARGKSDNVPSEEVVKKMKNYWRQLLNAKLITQRKFDNLTKAERGGLSELDKAGFIKRQLVETRQITKHVAQILDSRMNTKYDENDKLIREVKVITLKSKLVSDFRKDFQFYKVREINNYHHAHDAYLNAVVGTALIKKYPKLESEFVYGDYKVYDVRKMIAKSEQEIGKATAKYFFYSNIMNFFKTEITLANGEIRKRPLIETNGETGEIVWDKGRDFATVRKVLSMPQVNIVKKTEVQTGGFSKESILPKRNSDKLIARKKDWDPKKYGGFDSPTVAYSVLVVAKVEKGKSKKLKSVKELLGITIMERSSFEKNPIDFLEAKGYKEVKKDLIIKLPKYSLFELENGRKRMLASAGELQKGNELALPSKYVNFLYLASHYEKLKGSPEDNEQKQLFVEQHKHYLDEIIEQISEFSKRVILADANLDKVLSAYNKHRDKPIREQAENIIHLFTLTNLGAPAAFKYFDTTIDRKRYTSTKEVLDATLIHQSITGLYETRIDLSQLGGDGGGGSGGSGGTLGDQGSRGSDPLPEPRVTLTVEGIPTEFLVNTGAEHSVLTKPMGKMGSKRTVVAGATGSKVYPWTTKRLLKIGQKQVTHSFLVIPECPAPLLGRDLLTKLKAQIQFSTEGPQVTWEDRPAMCLVLNLEEEYRLHEKPVPPSIDPSWLQLFPMVWAEKAGMGLANQVPPVVVELKSDASPVAVRQYPMSKEAREGIRPHIQRFLDLGILVPCQSPWNTPLLPVKKPGTNDYRPVQDLREVNKRVQDIHPTVPNPYNLLSSLPPSHTWYSVLDLKDAFFCLKLHPNSQPLFAFEWRDPEKGNTGQLTWTRLPQGFKNSPTLFDEALHRDLASFRALNPQVVMLQYVDDLLVAAPTYRDCKEGTRRLLQELSKLGYRVSAKKAQLCREEVTYLGYLLKGGKRWLTPARKATVMKIPTPTTPRQVREFLGTAGFCRLWIPGFASLAAPLYPLTREKVPFTWTEAHQEAFGRIKEALLSAPALALPDLTKPFALYVDEKEGVARGVLTQTLGPWRRPVAYLSKKLDPVASGWPTCLKAIAAVALLLKDADKLTLGQNVLVIAPHNLESIVRQPPDRWMTNARMTHYQSLLLNERVSFAPPAILNPATLLPVESDDTPIHICSEILAEETGTRPDLRDQPLPGVPAWYTDGSSFIMDGRRQAGAAIVDNKRTVWASNLPEGTSAQKAELIALTQALRLAEGKSINIYTDSRYAFATAHVHGAIYKQRGLLTSAGKDIKNKEEILALLEAIHLPKRVAIIHCPGHQRGTDPVATGNRKADEAAKQAAQSTRILTETTKNAGKRTADGSEFEKRTADGSEFESPKKKAKVE

SEQ ID NO: 6020 - protein, 2122 aa, synthetic construct
MPAAKRVKLDGGDKKYSIGLDIGTNSVGWAVITDEYKVPSKKFKVLGNTDRHSIKKNLIGALLFDSGETAEATRLKRTARRRYTRRKNRICYLQEIFSNEMAKVDDSFFHRLEESFLVEEDKKHERHPIFGNIVDEVAYHEKYPTIYHLRKKLVDSTDKADLRLIYLALAHMIKFRGHFLIEGDLNPDNSDVDKLFIQLVQTYNQLFEENPINASGVDAKAILSARLSKSRRLENLIAQLPGEKKNGLFGNLIALSLGLTPNFKSNFDLAEDAKLQLSKDTYDDDLDNLLAQIGDQYADLFLAAKNLSDAILLSDILRVNTEITKAPLSASMIKRYDEHHQDLTLLKALVRQQLPEKYKEIFFDQSKNGYAGYIDGGASQEEFYKFIKPILEKMDGTEELLVKLNREDLLRKQRTFDNGSIPHQIHLGELHAILRRQEDFYPFLKDNREKIEKILTFRIPYYVGPLARGNSRFAWMTRKSEETITPWNFEEVVDKGASAQSFIERMTNFDKNLPNEKVLPKHSLLYEYFTVYNELTKVKYVTEGMRKPAFLSGEQKKAIVDLLFKTNRKVTVKQLKEDYFKKIECFDSVEISGVEDRFNASLGTYHDLLKIIKDKDFLDNEENEDILEDIVLTLTLFEDREMIEERLKTYAHLFDDKVMKQLKRRRYTGWGRLSRKLINGIRDKQSGKTILDFLKSDGFANRNFMQLIHDDSLTFKEDIQKAQVSGQGDSLHEHIANLAGSPAIKKGILQTVKVVDELVKVMGRHKPENIVIEMARENQTTQKGQKNSRERMKRIEEGIKELGSQILKEHPVENTQLQNEKLYLYYLQNGRDMYVDQELDINRLSDYDVDHIVPQSFLKDDSIDNKVLTRSDKARGKSDNVPSEEVVKKMKNYWRQLLNAKLITQRKFDNLTKAERGGLSELDKAGFIKRQLVETRQITKHVAQILDSRMNTKYDENDKLIREVKVITLKSKLVSDFRKDFQFYKVREINNYHHAHDAYLNAVVGTALIKKYPKLESEFVYGDYKVYDVRKMIAKSEQEIGKATAKYFFYSNIMNFFKTEITLANGEIRKRPLIETNGETGEIVWDKGRDFATVRKVLSMPQVNIVKKTEVQTGGFSKESILPKRNSDKLIARKKDWDPKKYGGFDSPTVAYSVLVVAKVEKGKSKKLKSVKELLGITIMERSSFEKNPIDFLEAKGYKEVKKDLIIKLPKYSLFELENGRKRMLASAGELQKGNELALPSKYVNFLYLASHYEKLKGSPEDNEQKQLFVEQHKHYLDEIIEQISEFSKRVILADANLDKVLSAYNKHRDKPIREQAENIIHLFTLTNLGAPAAFKYFDTTIDRKRYTSTKEVLDATLIHQSITGLYETRIDLSQLGGDGGGGSGGSGGLLGRDLLTKLKAQIQFSTEGPQVTWEDRPAMCLVLNLEEEYRLHEKPVPPSIDPSWLQLFPMVWAEKAGMGLANQVPPVVVELKSDASPVAVRQYPMSKEAREGIRPHIQRFLDLGILVPCQSPWNTPLLPVKKPGTNDYRPVQDLREVNKRVQDIHPTVPNPYNLLSSLPPSHTWYSVLDLKDAFFCLKLHPNSQPLFAFEWRDPEKGNTGQLTWTRLPQGFKNSPTLFDEALHRDLASFRALNPQVVMLQYVDDLLVAAPTYRDCKEGTRRLLQELSKLGYRVSAKKAQLCREEVTYLGYLLKGGKRWLTPARKATVMKIPTPTTPRQVREFLGTAGFCRLWIPGFASLAAPLYPLTREKVPFTWTEAHQEAFGRIKEALLSAPALALPDLTKPFALYVDEKEGVARGVLTQTLGPWRRPVAYLSKKLDPVASGWPTCLKAIAAVALLLKDADKLTLGQNVLVIAPHNLESIVRQPPDRWMTNARMTHYQSLLLNERVSFAPPAILNPATLLPVESDDTPIHICSEILAEETGTRPDLRDQPLPGVPAWYTDGSSFIMDGRRQAGAAIVDNKRTVWASNLPEGTSAQKAELIALTQALRLAEGKSINIYTDSRYAFATAHVHGAIYKQRGLLTSAGKDIKNKEEILALLEAIHLPKRVAIIHCPGHQRGTDPVATGNRKADEAAKQAAQSTRILTETTKNAGKRTADGSEFEKRTADGSEFESPKKKAKVE

SEQ ID NO: 6021 - protein, 2213 aa, synthetic construct
MPAAKRVKLDGGDKKYSIGLDIGTNSVGWAVITDEYKVPSKKFKVLGNTDRHSIKKNLIGALLFDSGETAEATRLKRTARRRYTRRKNRICYLQEIFSNEMAKVDDSFFHRLEESFLVEEDKKHERHPIFGNIVDEVAYHEKYPTIYHLRKKLVDSTDKADLRLIYLALAHMIKFRGHFLIEGDLNPDNSDVDKLFIQLVQTYNQLFEENPINASGVDAKAILSARLSKSRRLENLIAQLPGEKKNGLFGNLIALSLGLTPNFKSNFDLAEDAKLQLSKDTYDDDLDNLLAQIGDQYADLFLAAKNLSDAILLSDILRVNTEITKAPLSASMIKRYDEHHQDLTLLKALVRQQLPEKYKEIFFDQSKNGYAGYIDGGASQEEFYKFIKPILEKMDGTEELLVKLNREDLLRKQRTFDNGSIPHQIHLGELHAILRRQEDFYPFLKDNREKIEKILTFRIPYYVGPLARGNSRFAWMTRKSEETITPWNFEEVVDKGASAQSFIERMTNFDKNLPNEKVLPKHSLLYEYFTVYNELTKVKYVTEGMRKPAFLSGEQKKAIVDLLFKTNRKVTVKQLKEDYFKKIECFDSVEISGVEDRFNASLGTYHDLLKIIKDKDFLDNEENEDILEDIVLTLTLFEDREMIEERLKTYAHLFDDKVMKQLKRRRYTGWGRLSRKLINGIRDKQSGKTILDFLKSDGFANRNFMQLIHDDSLTFKEDIQKAQVSGQGDSLHEHIANLAGSPAIKKGILQTVKVVDELVKVMGRHKPENIVIEMARENQTTQKGQKNSRERMKRIEEGIKELGSQILKEHPVENTQLQNEKLYLYYLQNGRDMYVDQELDINRLSDYDVDHIVPQSFLKDDSIDNKVLTRSDKARGKSDNVPSEEVVKKMKNYWRQLLNAKLITQRKFDNLTKAERGGLSELDKAGFIKRQLVETRQITKHVAQILDSRMNTKYDENDKLIREVKVITLKSKLVSDFRKDFQFYKVREINNYHHAHDAYLNAVVGTALIKKYPKLESEFVYGDYKVYDVRKMIAKSEQEIGKATAKYFFYSNIMNFFKTEITLANGEIRKRPLIETNGETGEIVWDKGRDFATVRKVLSMPQVNIVKKTEVQTGGFSKESILPKRNSDKLIARKKDWDPKKYGGFDSPTVAYSVLVVAKVEKGKSKKLKSVKELLGITIMERSSFEKNPIDFLEAKGYKEVKKDLIIKLPKYSLFELENGRKRMLASAGELQKGNELALPSKYVNFLYLASHYEKLKGSPEDNEQKQLFVEQHKHYLDEIIEQISEFSKRVILADANLDKVLSAYNKHRDKPIREQAENIIHLFTLTNLGAPAAFKYFDTTIDRKRYTSTKEVLDATLIHQSITGLYETRIDLSQLGGDGGGGSGGSGGTLGDQGSRGSDPLPEPRVTLTVEGIPTEFLVNTGAEHSVLTKPMGKMGSKRTVVAGATGSKVYPWTTKRLLKIGQKQVTHSFLVIPECPAPLLGRDLLTKLKAQIQFSTEGPQVTWEDRPAMCLVLNLEEEYRLHEKPVPPSIDPSWLQLFPMVWAEKAGMGLANQVPPVVVELKSDASPVAVRQYPMSKEAREGIRPHIQRFLDLGILVPCQSPWNTPLLPVKKPGTNDYRPVQDLREVNKRVQDIHPTVPNPYNLLSSLPPSHTWYSVLDLKDAFFCLKLHPNSQPLFAFEWRDPEKGNTGQLTWTRLPQGFKNSPTLFNEALHRDLASFRALNPQVVMLQYVDDLLVAAPTYRDCKEGTRRLLQELSKLGYRVSAKKAQLCREEVTYLGYLLKGGKRWLTPARKATVMKIPTPTTPRQVREFLGTAGFCRLWIPGFASLAAPLYPLTRPKVPFTWTEAHQEAFGRIKEALLSAPALALPDLTKPFALYVDEKEGVARGVLTQTLGPWRRPVAYLSKKLDPVASGWPTCLKAIAAVALLLKDADKLTLGQNVLVIAPHNLESIVRQPPDRWMTNARMTHYQSLLLNERVSFAPPAILNPATLLPVESDDTPIHICSEILAEETGTRPDLRDQPLPGVPAWYTDGSSFIMDGRRQAGAAIVDNKRTVWASNLPEGTSAQKAELIALTQALRLAEGKSINIYTDSRYAFATAHVHGAIYKQRGWLTSAGKDIKNKEEILALLEAIHLPKRVAIIHCPGHQRGTDPVATGNRKADEAAKQAAQSTRILTETTKNAGKRTADGSEFEKRTADGSEFESPKKKAKVE

SEQ ID NO: 6022 - protein, 2091 aa, synthetic construct
MPAAKRVKLDGGDKKYSIGLDIGTNSVGWAVITDEYKVPSKKFKVLGNTDRHSIKKNLIGALLFDSGETAEATRLKRTARRRYTRRKNRICYLQEIFSNEMAKVDDSFFHRLEESFLVEEDKKHERHPIFGNIVDEVAYHEKYPTIYHLRKKLVDSTDKADLRLIYLALAHMIKFRGHFLIEGDLNPDNSDVDKLFIQLVQTYNQLFEENPINASGVDAKAILSARLSKSRRLENLIAQLPGEKKNGLFGNLIALSLGLTPNFKSNFDLAEDAKLQLSKDTYDDDLDNLLAQIGDQYADLFLAAKNLSDAILLSDILRVNTEITKAPLSASMIKRYDEHHQDLTLLKALVRQQLPEKYKEIFFDQSKNGYAGYIDGGASQEEFYKFIKPILEKMDGTEELLVKLNREDLLRKQRTFDNGSIPHQIHLGELHAILRRQEDFYPFLKDNREKIEKILTFRIPYYVGPLARGNSRFAWMTRKSEETITPWNFEEVVDKGASAQSFIERMTNFDKNLPNEKVLPKHSLLYEYFTVYNELTKVKYVTEGMRKPAFLSGEQKKAIVDLLFKTNRKVTVKQLKEDYFKKIECFDSVEISGVEDRFNASLGTYHDLLKIIKDKDFLDNEENEDILEDIVLTLTLFEDREMIEERLKTYAHLFDDKVMKQLKRRRYTGWGRLSRKLINGIRDKQSGKTILDFLKSDGFANRNFMQLIHDDSLTFKEDIQKAQVSGQGDSLHEHIANLAGSPAIKKGILQTVKVVDELVKVMGRHKPENIVIEMARENQTTQKGQKNSRERMKRIEEGIKELGSQILKEHPVENTQLQNEKLYLYYLQNGRDMYVDQELDINRLSDYDVDHIVPQSFLKDDSIDNKVLTRSDKARGKSDNVPSEEVVKKMKNYWRQLLNAKLITQRKFDNLTKAERGGLSELDKAGFIKRQLVETRQITKHVAQILDSRMNTKYDENDKLIREVKVITLKSKLVSDFRKDFQFYKVREINNYHHAHDAYLNAVVGTALIKKYPKLESEFVYGDYKVYDVRKMIAKSEQEIGKATAKYFFYSNIMNFFKTEITLANGEIRKRPLIETNGETGEIVWDKGRDFATVRKVLSMPQVNIVKKTEVQTGGFSKESILPKRNSDKLIARKKDWDPKKYGGFDSPTVAYSVLVVAKVEKGKSKKLKSVKELLGITIMERSSFEKNPIDFLEAKGYKEVKKDLIIKLPKYSLFELENGRKRMLASAGELQKGNELALPSKYVNFLYLASHYEKLKGSPEDNEQKQLFVEQHKHYLDEIIEQISEFSKRVILADANLDKVLSAYNKHRDKPIREQAENIIHLFTLTNLGAPAAFKYFDTTIDRKRYTSTKEVLDATLIHQSITGLYETRIDLSQLGGDGGGGSGGSGGLGIEDEYRLHETSTEPDVSLGSTWLSDFPQAWAETGGMGLAVRQAPLIIPLKATSTPVSIQQYPMSHEARLGIKPHIQRLLDQGILVPCQSPWNTPLLPVKKPGTNDYRPVQDLREVNKRVEDIHPTVPNPYNLLSGLPPSHQWYTVLDLKDAFFCLRLHPTSQPLFAFEWRDPGMGISGQLTWTRLPQGFKNSPTLFNEALHRDLADFRIQHPDLILLQYVDDILLAATSELDCQQGTRALLQTLGDLGYRASAKKAQICQKQVKYLGYLLREGQRWLTEARKETVMGQPVPKTPRQLREFLGKAGFCRLFIPGFAEMAAPLYPLTKPGTLFSWGPDQQKAYQEIKQALLTAPALGLPDLTKPFELFVDEKQGYAKGVLTQKLGPWRRPVAYLSKKLDPVAAGWPPCLRMVAAIAVLTKDAGKLTMGQPLVILAPHAVEALVKQPPDRWLSNARMTHYQAMLLDTDRVQFGPVVALNPATLLPLPEEGAPHDCLEILAETHGTRPDLTDQPIPDADHTWYTDGSSFLQEGQRKAGAAVTTETEVIWAGALPAGTSAQRAELIALTQALKMAEGKRLNVYTDSRYAFATAHIHGEIYRRRGWLTSEGREIKNKSEILALLKALFLPKRLSIIHCLGHQKGDSAEARGNRLADQAAREAAIKTPPDTSTLLIAGKRTADGSEFEKRTADGSEFESPKKKAKVE

SEQ ID NO: 6023 - protein, 2091 aa, synthetic construct
MPAAKRVKLDGGDKKYSIGLDIGTNSVGWAVITDEYKVPSKKFKVLGNTDRHSIKKNLIGALLFDSGETAEATRLKRTARRRYTRRKNRICYLQEIFSNEMAKVDDSFFHRLEESFLVEEDKKHERHPIFGNIVDEVAYHEKYPTIYHLRKKLVDSTDKADLRLIYLALAHMIKFRGHFLIEGDLNPDNSDVDKLFIQLVQTYNQLFEENPINASGVDAKAILSARLSKSRRLENLIAQLPGEKKNGLFGNLIALSLGLTPNFKSNFDLAEDAKLQLSKDTYDDDLDNLLAQIGDQYADLFLAAKNLSDAILLSDILRVNTEITKAPLSASMIKRYDEHHQDLTLLKALVRQQLPEKYKEIFFDQSKNGYAGYIDGGASQEEFYKFIKPILEKMDGTEELLVKLNREDLLRKQRTFDNGSIPHQIHLGELHAILRRQEDFYPFLKDNREKIEKILTFRIPYYVGPLARGNSRFAWMTRKSEETITPWNFEEVVDKGASAQSFIERMTNFDKNLPNEKVLPKHSLLYEYFTVYNELTKVKYVTEGMRKPAFLSGEQKKAIVDLLFKTNRKVTVKQLKEDYFKKIECFDSVEISGVEDRFNASLGTYHDLLKIIKDKDFLDNEENEDILEDIVLTLTLFEDREMIEERLKTYAHLFDDKVMKQLKRRRYTGWGRLSRKLINGIRDKQSGKTILDFLKSDGFANRNFMQLIHDDSLTFKEDIQKAQVSGQGDSLHEHIANLAGSPAIKKGILQTVKVVDELVKVMGRHKPENIVIEMARENQTTQKGQKNSRERMKRIEEGIKELGSQILKEHPVENTQLQNEKLYLYYLQNGRDMYVDQELDINRLSDYDVDHIVPQSFLKDDSIDNKVLTRSDKARGKSDNVPSEEVVKKMKNYWRQLLNAKLITQRKFDNLTKAERGGLSELDKAGFIKRQLVETRQITKHVAQILDSRMNTKYDENDKLIREVKVITLKSKLVSDFRKDFQFYKVREINNYHHAHDAYLNAVVGTALIKKYPKLESEFVYGDYKVYDVRKMIAKSEQEIGKATAKYFFYSNIMNFFKTEITLANGEIRKRPLIETNGETGEIVWDKGRDFATVRKVLSMPQVNIVKKTEVQTGGFSKESILPKRNSDKLIARKKDWDPKKYGGFDSPTVAYSVLVVAKVEKGKSKKLKSVKELLGITIMERSSFEKNPIDFLEAKGYKEVKKDLIIKLPKYSLFELENGRKRMLASAGELQKGNELALPSKYVNFLYLASHYEKLKGSPEDNEQKQLFVEQHKHYLDEIIEQISEFSKRVILADANLDKVLSAYNKHRDKPIREQAENIIHLFTLTNLGAPAAFKYFDTTIDRKRYTSTKEVLDATLIHQSITGLYETRIDLSQLGGDGGGGSGGSGGTLGIEDEYRLHETSTEPDVSLGSTWLSDFPQAWAETGGMGLAVRQAPLIIPLKATSTPVSIQQYPMSHEARLGIKPHIQRLLDQGILVPCQSPWNTPLLPVKKPGTNDYRPVQDLREVNKRVEDIHPTVPNPYNLLSGLPPSHQWYTVLDLKDAFFCLRLHPTSQPLFAFEWRDPGMGISGQLTWTRLPQGFKNSPTLFNEALHRDLADFRIQHPDLILLQYVDDILLAATSELDCQQGTRALLQTLGDLGYRASAKKAQICQKQVKYLGYLLREGQRWLTEARKETVMGQPVPKTPRQLREFLGTAGFCRLWIPGFAEMAAPLYPLTKPGTLFSWGPDQQKAYQEIKQALLTAPALGLPDLTKPFELFVDEKQGYAKGVLTQKLGPWRRPVAYLSKKLDPVAAGWPPCLRMVAAIAVLTKDAGKLTMGQPLVILAPHAVEALVKQPPDRWLSNARMTHYQAMLLDTDRVQFGPVVALNPATLLPLPEEGAPHDCLEILAETHGTRPDLTDQPIPDADHTWYTDGSSFLQEGQRKAGAAVTTETEVIWAGALPAGTSAQRAELIALTQALKMAEGKRLNVYTDSRYAFATAHIHGEIYRRRGWLTSEGREIKNKSEILALLKALFLPKRLSIIHCLGHQKGDSAEARGNRLADQAAREAAIKTPPDTSTLLAGKRTADGSEFEKRTADGSEFESPKKKAKVE

SEQ ID NO: 6024 - protein, 2091 aa, synthetic construct
MPAAKRVKLDGGDKKYSIGLDIGTNSVGWAVITDEYKVPSKKFKVLGNTDRHSIKKNLIGALLFDSGETAEATRLKRTARRRYTRRKNRICYLQEIFSNEMAKVDDSFFHRLEESFLVEEDKKHERHPIFGNIVDEVAYHEKYPTIYHLRKKLVDSTDKADLRLIYLALAHMIKFRGHFLIEGDLNPDNSDVDKLFIQLVQTYNQLFEENPINASGVDAKAILSARLSKSRRLENLIAQLPGEKKNGLFGNLIALSLGLTPNFKSNFDLAEDAKLQLSKDTYDDDLDNLLAQIGDQYADLFLAAKNLSDAILLSDILRVNTEITKAPLSASMIKRYDEHHQDLTLLKALVRQQLPEKYKEIFFDQSKNGYAGYIDGGASQEEFYKFIKPILEKMDGTEELLVKLNREDLLRKQRTFDNGSIPHQIHLGELHAILRRQEDFYPFLKDNREKIEKILTFRIPYYVGPLARGNSRFAWMTRKSEETITPWNFEEVVDKGASAQSFIERMTNFDKNLPNEKVLPKHSLLYEYFTVYNELTKVKYVTEGMRKPAFLSGEQKKAIVDLLFKTNRKVTVKQLKEDYFKKIECFDSVEISGVEDRFNASLGTYHDLLKIIKDKDFLDNEENEDILEDIVLTLTLFEDREMIEERLKTYAHLFDDKVMKQLKRRRYTGWGRLSRKLINGIRDKQSGKTILDFLKSDGFANRNFMQLIHDDSLTFKEDIQKAQVSGQGDSLHEHIANLAGSPAIKKGILQTVKVVDELVKVMGRHKPENIVIEMARENQTTQKGQKNSRERMKRIEEGIKELGSQILKEHPVENTQLQNEKLYLYYLQNGRDMYVDQELDINRLSDYDVDHIVPQSFLKDDSIDNKVLTRSDKARGKSDNVPSEEVVKKMKNYWRQLLNAKLITQRKFDNLTKAERGGLSELDKAGFIKRQLVETRQITKHVAQILDSRMNTKYDENDKLIREVKVITLKSKLVSDFRKDFQFYKVREINNYHHAHDAYLNAVVGTALIKKYPKLESEFVYGDYKVYDVRKMIAKSEQEIGKATAKYFFYSNIMNFFKTEITLANGEIRKRPLIETNGETGEIVWDKGRDFATVRKVLSMPQVNIVKKTEVQTGGFSKESILPKRNSDKLIARKKDWDPKKYGGFDSPTVAYSVLVVAKVEKGKSKKLKSVKELLGITIMERSSFEKNPIDFLEAKGYKEVKKDLIIKLPKYSLFELENGRKRMLASAGELQKGNELALPSKYVNFLYLASHYEKLKGSPEDNEQKQLFVEQHKHYLDEIIEQISEFSKRVILADANLDKVLSAYNKHRDKPIREQAENIIHLFTLTNLGAPAAFKYFDTTIDRKRYTSTKEVLDATLIHQSITGLYETRIDLSQLGGDGGGGSGGSGGTLNIEDEYRLHETSKEPDVSLGSTWLSDFPQAWAETGGMGLAVRQAPLIIPLKATSTPVSIKQYPMSQEARLGIKPHIQRLLDQGILVPCQSPWNTPLLPVKKPGTNDYRPVQDLREVNKRVEDIHPTVPNPYNLLSGLPPSHQWYTVLDLKDAFFCLRLHPTSQPLFAFEWRDPEMGISGQLTWTRLPQGFKNSPTLFNEALHRDLAGFRIQHPDLILLQYVDDLLLAATSELDCQQGTRALLQTLGDLGYRASAKKAQICQKQVKYLGYLLKEGQRWLTEARKETVMGQPIPKTPRQLREFLGTAGFCRLWIPGFAEMAAPLYPLTKPGTLFNWGPDQQKAFQEIKQALLTAPALGLPDLTKPFELFVDEKQGYAKGVLTQKLGPWRRPVAYLSKKLDPVAAGWPPCLRMVAAIAVLTKDAGKLTMGQPLVILAPHAVEALVKQPPDRWLSNARMTHYQALLLDTDRVQFGPVVALNPATLLPLPEEGLQHDCLDILAEAHGTRSDLMDQPLPDADHTWYTDGSSFLQEGQRKAGAAVTTETEVIWARALPAGTSAQRAELIALTQALKMAEGKKLNVYTDSRYAFATAHIHGEIYRRRGWLTSEGKEIKNKDEILALLKALFLPKRLSIIHCPGHQKGNSAEARGNRMADQAAREVATRETPETSTLLAGKRTADGSEFEKRTADGSEFESPKKKAKVE

SEQ ID NO: 6025 - protein, 2091 aa, synthetic construct
MPAAKRVKLDGGDKKYSIGLDIGTNSVGWAVITDEYKVPSKKFKVLGNTDRHSIKKNLIGALLFDSGETAEATRLKRTARRRYTRRKNRICYLQEIFSNEMAKVDDSFFHRLEESFLVEEDKKHERHPIFGNIVDEVAYHEKYPTIYHLRKKLVDSTDKADLRLIYLALAHMIKFRGHFLIEGDLNPDNSDVDKLFIQLVQTYNQLFEENPINASGVDAKAILSARLSKSRRLENLIAQLPGEKKNGLFGNLIALSLGLTPNFKSNFDLAEDAKLQLSKDTYDDDLDNLLAQIGDQYADLFLAAKNLSDAILLSDILRVNTEITKAPLSASMIKRYDEHHQDLTLLKALVRQQLPEKYKEIFFDQSKNGYAGYIDGGASQEEFYKFIKPILEKMDGTEELLVKLNREDLLRKQRTFDNGSIPHQIHLGELHAILRRQEDFYPFLKDNREKIEKILTFRIPYYVGPLARGNSRFAWMTRKSEETITPWNFEEVVDKGASAQSFIERMTNFDKNLPNEKVLPKHSLLYEYFTVYNELTKVKYVTEGMRKPAFLSGEQKKAIVDLLFKTNRKVTVKQLKEDYFKKIECFDSVEISGVEDRFNASLGTYHDLLKIIKDKDFLDNEENEDILEDIVLTLTLFEDREMIEERLKTYAHLFDDKVMKQLKRRRYTGWGRLSRKLINGIRDKQSGKTILDFLKSDGFANRNFMQLIHDDSLTFKEDIQKAQVSGQGDSLHEHIANLAGSPAIKKGILQTVKVVDELVKVMGRHKPENIVIEMARENQTTQKGQKNSRERMKRIEEGIKELGSQILKEHPVENTQLQNEKLYLYYLQNGRDMYVDQELDINRLSDYDVDHIVPQSFLKDDSIDNKVLTRSDKARGKSDNVPSEEVVKKMKNYWRQLLNAKLITQRKFDNLTKAERGGLSELDKAGFIKRQLVETRQITKHVAQILDSRMNTKYDENDKLIREVKVITLKSKLVSDFRKDFQFYKVREINNYHHAHDAYLNAVVGTALIKKYPKLESEFVYGDYKVYDVRKMIAKSEQEIGKATAKYFFYSNIMNFFKTEITLANGEIRKRPLIETNGETGEIVWDKGRDFATVRKVLSMPQVNIVKKTEVQTGGFSKESILPKRNSDKLIARKKDWDPKKYGGFDSPTVAYSVLVVAKVEKGKSKKLKSVKELLGITIMERSSFEKNPIDFLEAKGYKEVKKDLIIKLPKYSLFELENGRKRMLASAGELQKGNELALPSKYVNFLYLASHYEKLKGSPEDNEQKQLFVEQHKHYLDEIIEQISEFSKRVILADANLDKVLSAYNKHRDKPIREQAENIIHLFTLTNLGAPAAFKYFDTTIDRKRYTSTKEVLDATLIHQSITGLYETRIDLSQLGGDGGGGSGGSGGTLNIEDEHRLHETSKEPDVSLGSTWLSDFPQAWAETGGMGLAVRQAPLIIPLKATSTPVSIKQYPMSQEARLGIKPHIQRLLDQGILVPCQSPWNTPLLPVKKPGTNDYRPVQDLREVNKRVEDIHPTVPNPYNLLSGLPPSHQWYTVLDLKDAFFCLRLHPTSQPLFAFEWRDPEMGISGQLTWTRLPQGFKNSPTLFNEALHRDLADFRIQHPDLILLQYVDDLLLAATSELDCQQGTRALLQTLGNLGYRASAKKAQICQKQVKYLGYLLKEGQRWLTEARKETVMGQPTPKTPRQLREFLGTAGFCRLWIPGFAEMAAPLYPLTKPGTLFNWGPDQQKAYQEIKQALLTAPALGLPDLTKPFELFVDEKQGYAKGVLTQKLGPWRRPVAYLSKKLDPVAAGWPPCLRMVAAIAVLTKDAGKLTMGQPLVILAPHAVEALVKQPPDRWLSNARMTHYQALLLDTDRVQFGPVVALNPATLLPLPEEGLQHNCLDILAEAHGTRPDLTDQPLPDADHTWYTDGSSLLQEGQRKAGAAVTTETEVIWAKALPAGTSAQRAELIALTQALKMAEGKKLNVYTDSRYAFATAHIHGEIYRRRGWLTSEGKEIKNKDEILALLKALFLPKRLSIIHCPGHQKGHSAEARGNRMADQAARKAAITETPDTSTLLAGKRTADGSEFEKRTADGSEFESPKKKAKVE

SEQ ID NO: 6026 - protein, 2085 aa, synthetic construct
MPAAKRVKLDGGDKKYSIGLDIGTNSVGWAVITDEYKVPSKKFKVLGNTDRHSIKKNLIGALLFDSGETAEATRLKRTARRRYTRRKNRICYLQEIFSNEMAKVDDSFFHRLEESFLVEEDKKHERHPIFGNIVDEVAYHEKYPTIYHLRKKLVDSTDKADLRLIYLALAHMIKFRGHFLIEGDLNPDNSDVDKLFIQLVQTYNQLFEENPINASGVDAKAILSARLSKSRRLENLIAQLPGEKKNGLFGNLIALSLGLTPNFKSNFDLAEDAKLQLSKDTYDDDLDNLLAQIGDQYADLFLAAKNLSDAILLSDILRVNTEITKAPLSASMIKRYDEHHQDLTLLKALVRQQLPEKYKEIFFDQSKNGYAGYIDGGASQEEFYKFIKPILEKMDGTEELLVKLNREDLLRKQRTFDNGSIPHQIHLGELHAILRRQEDFYPFLKDNREKIEKILTFRIPYYVGPLARGNSRFAWMTRKSEETITPWNFEEVVDKGASAQSFIERMTNFDKNLPNEKVLPKHSLLYEYFTVYNELTKVKYVTEGMRKPAFLSGEQKKAIVDLLFKTNRKVTVKQLKEDYFKKIECFDSVEISGVEDRFNASLGTYHDLLKIIKDKDFLDNEENEDILEDIVLTLTLFEDREMIEERLKTYAHLFDDKVMKQLKRRRYTGWGRLSRKLINGIRDKQSGKTILDFLKSDGFANRNFMQLIHDDSLTFKEDIQKAQVSGQGDSLHEHIANLAGSPAIKKGILQTVKVVDELVKVMGRHKPENIVIEMARENQTTQKGQKNSRERMKRIEEGIKELGSQILKEHPVENTQLQNEKLYLYYLQNGRDMYVDQELDINRLSDYDVDHIVPQSFLKDDSIDNKVLTRSDKARGKSDNVPSEEVVKKMKNYWRQLLNAKLITQRKFDNLTKAERGGLSELDKAGFIKRQLVETRQITKHVAQILDSRMNTKYDENDKLIREVKVITLKSKLVSDFRKDFQFYKVREINNYHHAHDAYLNAVVGTALIKKYPKLESEFVYGDYKVYDVRKMIAKSEQEIGKATAKYFFYSNIMNFFKTEITLANGEIRKRPLIETNGETGEIVWDKGRDFATVRKVLSMPQVNIVKKTEVQTGGFSKESILPKRNSDKLIARKKDWDPKKYGGFDSPTVAYSVLVVAKVEKGKSKKLKSVKELLGITIMERSSFEKNPIDFLEAKGYKEVKKDLIIKLPKYSLFELENGRKRMLASAGELQKGNELALPSKYVNFLYLASHYEKLKGSPEDNEQKQLFVEQHKHYLDEIIEQISEFSKRVILADANLDKVLSAYNKHRDKPIREQAENIIHLFTLTNLGAPAAFKYFDTTIDRKRYTSTKEVLDATLIHQSITGLYETRIDLSQLGGDGGGGSGGSGGTLQLDDEYRLYSPLVKPDQNIQFWLEQFPQAWAETAGMGLAKQVPPQVIQLKASATPVSVRQYPLSKEAQEGIRPHVQRLIQQGILVPVQSPWNTPLLPVRKPGTNDYRPVQDLREVNKRVQDIHPTVPNPYNLLCALPPQRSWYTVLDLKDAFFCLRLHPTSQPLFAFEWRDPGTGRTGQLTWTRLPQGFKNSPTIFDEALHRDLANFRIQHPQVTLLQYVDDLLLAGATKQDCLEGTKALLLELSDLGYRASAKKAQICRREVTYLGYSLRDGQRWLTEARKKTVVQIPAPTTAKQVREFLGTAGFCRLWIPGFATLAAPLYPLTKEKGEFSWAPEHQKAFDAIKKALLSAPALALPDVTKPFTLYVDERKGVARGVLTQTLGPWRRPVAYLSKKLDPVASGWPVCLKAIAAVAILVKDADKLTLGQNITVIAPHALENIVRQPPDRWMTNARMTHYQSLLLTERVTFAPPAALNPATLLPEETDEPVTHDCHQLLIEETGVRKDLTDIPLTGEVLTWFTDGSSYVVEGKRMAGAAVVDGTRTIWASSLPEGTSAQKAELMALTQALRLAEGKSINIYTDSRYAFATAHVHGAIYKQRGLLTSAGREIKNKEEILSLLEALHLPKRLAIIHCPGHQKAKDPISRGNQMADRVAKQAAQGVNLLAGKRTADGSEFEKRTADGSEFESPKKKAKVE

SEQ ID NO: 6027 - protein, 2171 aa, synthetic construct
MPAAKRVKLDGGDKKYSIGLDIGTNSVGWAVITDEYKVPSKKFKVLGNTDRHSIKKNLIGALLFDSGETAEATRLKRTARRRYTRRKNRICYLQEIFSNEMAKVDDSFFHRLEESFLVEEDKKHERHPIFGNIVDEVAYHEKYPTIYHLRKKLVDSTDKADLRLIYLALAHMIKFRGHFLIEGDLNPDNSDVDKLFIQLVQTYNQLFEENPINASGVDAKAILSARLSKSRRLENLIAQLPGEKKNGLFGNLIALSLGLTPNFKSNFDLAEDAKLQLSKDTYDDDLDNLLAQIGDQYADLFLAAKNLSDAILLSDILRVNTEITKAPLSASMIKRYDEHHQDLTLLKALVRQQLPEKYKEIFFDQSKNGYAGYIDGGASQEEFYKFIKPILEKMDGTEELLVKLNREDLLRKQRTFDNGSIPHQIHLGELHAILRRQEDFYPFLKDNREKIEKILTFRIPYYVGPLARGNSRFAWMTRKSEETITPWNFEEVVDKGASAQSFIERMTNFDKNLPNEKVLPKHSLLYEYFTVYNELTKVKYVTEGMRKPAFLSGEQKKAIVDLLFKTNRKVTVKQLKEDYFKKIECFDSVEISGVEDRFNASLGTYHDLLKIIKDKDFLDNEENEDILEDIVLTLTLFEDREMIEERLKTYAHLFDDKVMKQLKRRRYTGWGRLSRKLINGIRDKQSGKTILDFLKSDGFANRNFMQLIHDDSLTFKEDIQKAQVSGQGDSLHEHIANLAGSPAIKKGILQTVKVVDELVKVMGRHKPENIVIEMARENQTTQKGQKNSRERMKRIEEGIKELGSQILKEHPVENTQLQNEKLYLYYLQNGRDMYVDQELDINRLSDYDVDHIVPQSFLKDDSIDNKVLTRSDKARGKSDNVPSEEVVKKMKNYWRQLLNAKLITQRKFDNLTKAERGGLSELDKAGFIKRQLVETRQITKHVAQILDSRMNTKYDENDKLIREVKVITLKSKLVSDFRKDFQFYKVREINNYHHAHDAYLNAVVGTALIKKYPKLESEFVYGDYKVYDVRKMIAKSEQEIGKATAKYFFYSNIMNFFKTEITLANGEIRKRPLIETNGETGEIVWDKGRDFATVRKVLSMPQVNIVKKTEVQTGGFSKESILPKRNSDKLIARKKDWDPKKYGGFDSPTVAYSVLVVAKVEKGKSKKLKSVKELLGITIMERSSFEKNPIDFLEAKGYKEVKKDLIIKLPKYSLFELENGRKRMLASAGELQKGNELALPSKYVNFLYLASHYEKLKGSPEDNEQKQLFVEQHKHYLDEIIEQISEFSKRVILADANLDKVLSAYNKHRDKPIREQAENIIHLFTLTNLGAPAAFKYFDTTIDRKRYTSTKEVLDATLIHQSITGLYETRIDLSQLGGDGGGGSGGSGGMDPLQLLQPLEAEIKGTKLKAHWNSGATITCVPQAFLEEEVPIKNIWIKTIHGEKEQPVYYLTFKIQGRKVEAEVISSPYDYILVSPSDIPWLMKKPLQLTTLVPLQEYEERLLKQTMLTGSYKEKLQSLFLKYDALWQHWENQVGHRRIKPHHIATGTVNPRPQKQYPINPKAKASIQTVINDLLKQGVLIQQNSIMNTPVYPVPKPDGKWRMVLDYREVNKTIPLIAAQNQHSAGILSSIFRGKYKTTLDLSNGFWAHSITPESYWLTAFTWLGQQYCWTRLPQGFLNSPALFNADVVDLLKEVPNVQVYVDDIYISHDDPREHLEQLEKVFSLLLNAGYVVSLKKSEIAQHEVEFLGFNITKEGRGLTETFKQKLLNITPPRDLKQLQSILGLLNFARNFIPNFSELVKPLYNIIATAPGKYITWTTDNSQQLQNIISMLNSAENLEERNPEVRLIMKVNTSPSAGYIRFYNEFAKRPIMYLNYVYTKAEVKFTNTEKLLTTIHKGLIKALDLGMGQEILVYSPIVSMTKIQKTPLPERKALPIRWITWMSYLEDPRIQFHYDKTLPELQQVPTVTDDIIAKIKHPSEFSMVFYTDGSAIKHPNVNKSHNAGMGIAQVQFKPEFTVINTWSIPLGDHTAQLAEVAAVEFACKKALKIDGPVLIVTDSFYVAESVNKELPYWQSNGFFNNKKKPLKHVSKWKSIADCIQLKPDIIIIHEKGHQPTASTFHTEGNNLADKLATQGSYVVNAGKRTADGSEFEKRTADGSEFESPKKKAKVE

SEQ ID NO: 6028 - protein, 2091 aa, synthetic construct
MPAAKRVKLDGGDKKYSIGLDIGTNSVGWAVITDEYKVPSKKFKVLGNTDRHSIKKNLIGALLFDSGETAEATRLKRTARRRYTRRKNRICYLQEIFSNEMAKVDDSFFHRLEESFLVEEDKKHERHPIFGNIVDEVAYHEKYPTIYHLRKKLVDSTDKADLRLIYLALAHMIKFRGHFLIEGDLNPDNSDVDKLFIQLVQTYNQLFEENPINASGVDAKAILSARLSKSRRLENLIAQLPGEKKNGLFGNLIALSLGLTPNFKSNFDLAEDAKLQLSKDTYDDDLDNLLAQIGDQYADLFLAAKNLSDAILLSDILRVNTEITKAPLSASMIKRYDEHHQDLTLLKALVRQQLPEKYKEIFFDQSKNGYAGYIDGGASQEEFYKFIKPILEKMDGTEELLVKLNREDLLRKQRTFDNGSIPHQIHLGELHAILRRQEDFYPFLKDNREKIEKILTFRIPYYVGPLARGNSRFAWMTRKSEETITPWNFEEVVDKGASAQSFIERMTNFDKNLPNEKVLPKHSLLYEYFTVYNELTKVKYVTEGMRKPAFLSGEQKKAIVDLLFKTNRKVTVKQLKEDYFKKIECFDSVEISGVEDRFNASLGTYHDLLKIIKDKDFLDNEENEDILEDIVLTLTLFEDREMIEERLKTYAHLFDDKVMKQLKRRRYTGWGRLSRKLINGIRDKQSGKTILDFLKSDGFANRNFMQLIHDDSLTFKEDIQKAQVSGQGDSLHEHIANLAGSPAIKKGILQTVKVVDELVKVMGRHKPENIVIEMARENQTTQKGQKNSRERMKRIEEGIKELGSQILKEHPVENTQLQNEKLYLYYLQNGRDMYVDQELDINRLSDYDVDHIVPQSFLKDDSIDNKVLTRSDKARGKSDNVPSEEVVKKMKNYWRQLLNAKLITQRKFDNLTKAERGGLSELDKAGFIKRQLVETRQITKHVAQILDSRMNTKYDENDKLIREVKVITLKSKLVSDFRKDFQFYKVREINNYHHAHDAYLNAVVGTALIKKYPKLESEFVYGDYKVYDVRKMIAKSEQEIGKATAKYFFYSNIMNFFKTEITLANGEIRKRPLIETNGETGEIVWDKGRDFATVRKVLSMPQVNIVKKTEVQTGGFSKESILPKRNSDKLIARKKDWDPKKYGGFDSPTVAYSVLVVAKVEKGKSKKLKSVKELLGITIMERSSFEKNPIDFLEAKGYKEVKKDLIIKLPKYSLFELENGRKRMLASAGELQKGNELALPSKYVNFLYLASHYEKLKGSPEDNEQKQLFVEQHKHYLDEIIEQISEFSKRVILADANLDKVLSAYNKHRDKPIREQAENIIHLFTLTNLGAPAAFKYFDTTIDRKRYTSTKEVLDATLIHQSITGLYETRIDLSQLGGDGGGGSGGSGGTLNIEDEYRLHETSKEPDVPLGSTWLSDFPQAWAETGGMGLAVRQAPLIIPLKATSTPVSIKQYPMSQEARLGIKPHIQRLLDQGILVPCQSPWNTPLLPVKKPGTNDYRPVQDLREVNKRVEDIHPTVPNPYNLLSGLPPSHQWYTVLDLKDAFFCLRLHPTSQPLFAFEWRDPEMGISGQLTWTRLPQGFKNSPTLFNEALHRDLADFRIQHPDLILLQYVDDLLLAATSEQDCQRGTRALLQTLGNLGYRASAKKAQICQKQVKYLGYLLKEGQRWLTEARKETVMGQPTPKTPRQLREFLGTAGFCRLWIPGFAEMAAPLYPLTKPGTLFNWGPDQQKAYQEIKQALLTAPALGLPDLTKPFELFVDEKQGYAKGVLTQKLGPWRRPVAYLSKKLDPVAAGWPPCLRMVAAIAVLTKDAGKLTMGQPLVILAPHAVEALVKQPPDRWLSNARMTHYQAMLLDTDRVQFGPVVALNPATLLPLPEKEAPHDCLEILAETHGTRPDLTDQPIPDADYTWYTDGSSFLQEGQRRAGAAVTTETEVIWARALPAGTSAQRAELIALTQALKMAEGKKLNVYTDSRYAFATAHVHGEIYRRRGWLTSEGREIKNKNEILALLKALFLPKRLSIIHCPGHQKGNSAEARGNRMADQAAREAAMKAVLETSTLLAGKRTADGSEFEKRTADGSEFESPKKKAKVE

SEQ ID NO: 6029 - protein, 2096 aa, synthetic construct
MPAAKRVKLDGGDKKYSIGLDIGTNSVGWAVITDEYKVPSKKFKVLGNTDRHSIKKNLIGALLFDSGETAEATRLKRTARRRYTRRKNRICYLQEIFSNEMAKVDDSFFHRLEESFLVEEDKKHERHPIFGNIVDEVAYHEKYPTIYHLRKKLVDSTDKADLRLIYLALAHMIKFRGHFLIEGDLNPDNSDVDKLFIQLVQTYNQLFEENPINASGVDAKAILSARLSKSRRLENLIAQLPGEKKNGLFGNLIALSLGLTPNFKSNFDLAEDAKLQLSKDTYDDDLDNLLAQIGDQYADLFLAAKNLSDAILLSDILRVNTEITKAPLSASMIKRYDEHHQDLTLLKALVRQQLPEKYKEIFFDQSKNGYAGYIDGGASQEEFYKFIKPILEKMDGTEELLVKLNREDLLRKQRTFDNGSIPHQIHLGELHAILRRQEDFYPFLKDNREKIEKILTFRIPYYVGPLARGNSRFAWMTRKSEETITPWNFEEVVDKGASAQSFIERMTNFDKNLPNEKVLPKHSLLYEYFTVYNELTKVKYVTEGMRKPAFLSGEQKKAIVDLLFKTNRKVTVKQLKEDYFKKIECFDSVEISGVEDRFNASLGTYHDLLKIIKDKDFLDNEENEDILEDIVLTLTLFEDREMIEERLKTYAHLFDDKVMKQLKRRRYTGWGRLSRKLINGIRDKQSGKTILDFLKSDGFANRNFMQLIHDDSLTFKEDIQKAQVSGQGDSLHEHIANLAGSPAIKKGILQTVKVVDELVKVMGRHKPENIVIEMARENQTTQKGQKNSRERMKRIEEGIKELGSQILKEHPVENTQLQNEKLYLYYLQNGRDMYVDQELDINRLSDYDVDHIVPQSFLKDDSIDNKVLTRSDKARGKSDNVPSEEVVKKMKNYWRQLLNAKLITQRKFDNLTKAERGGLSELDKAGFIKRQLVETRQITKHVAQILDSRMNTKYDENDKLIREVKVITLKSKLVSDFRKDFQFYKVREINNYHHAHDAYLNAVVGTALIKKYPKLESEFVYGDYKVYDVRKMIAKSEQEIGKATAKYFFYSNIMNFFKTEITLANGEIRKRPLIETNGETGEIVWDKGRDFATVRKVLSMPQVNIVKKTEVQTGGFSKESILPKRNSDKLIARKKDWDPKKYGGFDSPTVAYSVLVVAKVEKGKSKKLKSVKELLGITIMERSSFEKNPIDFLEAKGYKEVKKDLIIKLPKYSLFELENGRKRMLASAGELQKGNELALPSKYVNFLYLASHYEKLKGSPEDNEQKQLFVEQHKHYLDEIIEQISEFSKRVILADANLDKVLSAYNKHRDKPIREQAENIIHLFTLTNLGAPAAFKYFDTTIDRKRYTSTKEVLDATLIHQSITGLYETRIDLSQLGGDGGGGSGGSGGSGGTAPLEEEYRLFLEAPIQNVTLLEQWKREIPKVWAEINPPGLASTQAPIHVQLLSTALPVRVRQYPITLEAKRSLRETIRKFRAAGILRPVHSPWNTPLLPVRKSGTSEYRMVQDLREVNKRVETIHPTVPNPYTLLSLLPPDRIWYSVLDLKDAFFCIPLAPESQLIFAFEWADAEEGESGQLTWTRLPQGFKNSPTLFNEALNRDLQGFRLDHPSVSLLQYVDDLLIAADTQAACLSATRDLLMTLAELGYRVSGKKAQLCQEEVTYLGFKIHKGSRSLSNSRTQAILQIPVPKTKRQVREFLGTIGYCRLWIPGFAELAQPLYAATRPGNDPLVWGEKEEEAFQSLKLALTQPPALALPSLDKPFQLFVEETSGAAKGVLTQALGPWKRPVAYLSKRLDPVAAGWPRCLRAIAAAALLTREASKLTFGQDIEITSSHNLESLLRSPPDKWLTNARITQYQVLLLDPPRVRFKQTAALNPATLLPETDDTLPIHHCLDTLDSLTSTRPDLTDQPLAQAEATLFTDGSSYIRDGKRYAGAAVVTLDSVIWAEPLPIGTSAQKAELIALTKALEWSKDKSVNIYTDSRYAFATLHVHGMIYRERGWLTAGGKAIKNAPEILALLTAVWLPKRVAVMHCKGHQKDDAPTSTGNRRADEVAREVAIRPLSTQATISAGKRTADGSEFEKRTADGSEFESPKKKAKVE

SEQ ID NO: 6030 - protein, 2096 aa, synthetic construct; identical to SEQ ID NO: 4501

SEQ ID NO: 6031 - protein, 2093 aa, synthetic construct
MPAAKRVKLDGGDKKYSIGLDIGTNSVGWAVITDEYKVPSKKFKVLGNTDRHSIKKNLIGALLFDSGETAEATRLKRTARRRYTRRKNRICYLQEIFSNEMAKVDDSFFHRLEESFLVEEDKKHERHPIFGNIVDEVAYHEKYPTIYHLRKKLVDSTDKADLRLIYLALAHMIKFRGHFLIEGDLNPDNSDVDKLFIQLVQTYNQLFEENPINASGVDAKAILSARLSKSRRLENLIAQLPGEKKNGLFGNLIALSLGLTPNFKSNFDLAEDAKLQLSKDTYDDDLDNLLAQIGDQYADLFLAAKNLSDAILLSDILRVNTEITKAPLSASMIKRYDEHHQDLTLLKALVRQQLPEKYKEIFFDQSKNGYAGYIDGGASQEEFYKFIKPILEKMDGTEELLVKLNREDLLRKQRTFDNGSIPHQIHLGELHAILRRQEDFYPFLKDNREKIEKILTFRIPYYVGPLARGNSRFAWMTRKSEETITPWNFEEVVDKGASAQSFIERMTNFDKNLPNEKVLPKHSLLYEYFTVYNELTKVKYVTEGMRKPAFLSGEQKKAIVDLLFKTNRKVTVKQLKEDYFKKIECFDSVEISGVEDRFNASLGTYHDLLKIIKDKDFLDNEENEDILEDIVLTLTLFEDREMIEERLKTYAHLFDDKVMKQLKRRRYTGWGRLSRKLINGIRDKQSGKTILDFLKSDGFANRNFMQLIHDDSLTFKEDIQKAQVSGQGDSLHEHIANLAGSPAIKKGILQTVKVVDELVKVMGRHKPENIVIEMARENQTTQKGQKNSRERMKRIEEGIKELGSQILKEHPVENTQLQNEKLYLYYLQNGRDMYVDQELDINRLSDYDVDHIVPQSFLKDDSIDNKVLTRSDKARGKSDNVPSEEVVKKMKNYWRQLLNAKLITQRKFDNLTKAERGGLSELDKAGFIKRQLVETRQITKHVAQILDSRMNTKYDENDKLIREVKVITLKSKLVSDFRKDFQFYKVREINNYHHAHDAYLNAVVGTALIKKYPKLESEFVYGDYKVYDVRKMIAKSEQEIGKATAKYFFYSNIMNFFKTEITLANGEIRKRPLIETNGETGEIVWDKGRDFATVRKVLSMPQVNIVKKTEVQTGGFSKESILPKRNSDKLIARKKDWDPKKYGGFDSPTVAYSVLVVAKVEKGKSKKLKSVKELLGITIMERSSFEKNPIDFLEAKGYKEVKKDLIIKLPKYSLFELENGRKRMLASAGELQKGNELALPSKYVNFLYLASHYEKLKGSPEDNEQKQLFVEQHKHYLDEIIEQISEFSKRVILADANLDKVLSAYNKHRDKPIREQAENIIHLFTLTNLGAPAAFKYFDTTIDRKRYTSTKEVLDATLIHQSITGLYETRIDLSQLGGDGGGGSGGSGGSGGTLQLEEEYRLFEPESTQKQEMDIWLKNFPQAWAETGGMGTAHCQAPVLIQLKATATPISIRQYPMPHEAYQGIKPHIRRMLDQGILKPCQSPWNTPLLPVKKPGTEDYRPVQDLREVNKRVEDIHPTVPNPYNLLSTLPPSHPWYTVLDLKDAFFCLRLHSESQLLFAFEWRDPEIGLSGQLTWTRLPQGFKNSPTLFNEALHSDLADFRVRYPALVLLQYVDDLLLAAATRTECLEGTKALLETLGNKGYRASAKKAQICLQEVTYLGYSLKDGQRWLTKARKEAILSIPVPKNSRQVREFLGKAGYCRLFIPGFAELAAPLYPLTRPGTLFQWGTEQQLAFEDIKKALLSSPALGLPDITKPFELFIDENSGFAKGVLVQKLGPWKRPVAYLSKKLDTVASGWPPCLRMVAAIAILVKDAGKLTLGQPLTILTSHPVEALVRQPPNKWLSNARMTHYQAMLLDAERVHFGPTVSLNPATLLPLPSGGNHHDCLQILAETHGTRPDLTDQPLPDADLTWYTDGSSFIRNGEREAGAAVTTESEVIWAAPLPPGTSAQRAELIALTQALKMAEGKKLTVYTDSRYAFATTHVHGEIYRRRGWLTSEGKEIKNKNEILALLEALFLPKRLSIIHCPGHQKGDSPQAKGNRLADDTAKKAATETHSSLTVLPAGKRTADGSEFEKRTADGSEFESPKKKAKVE

SEQ ID NO: 6032 - protein, 2094 aa, synthetic construct
MPAAKRVKLDGGDKKYSIGLDIGTNSVGWAVITDEYKVPSKKFKVLGNTDRHSIKKNLIGALLFDSGETAEATRLKRTARRRYTRRKNRICYLQEIFSNEMAKVDDSFFHRLEESFLVEEDKKHERHPIFGNIVDEVAYHEKYPTIYHLRKKLVDSTDKADLRLIYLALAHMIKFRGHFLIEGDLNPDNSDVDKLFIQLVQTYNQLFEENPINASGVDAKAILSARLSKSRRLENLIAQLPGEKKNGLFGNLIALSLGLTPNFKSNFDLAEDAKLQLSKDTYDDDLDNLLAQIGDQYADLFLAAKNLSDAILLSDILRVNTEITKAPLSASMIKRYDEHHQDLTLLKALVRQQLPEKYKEIFFDQSKNGYAGYIDGGASQEEFYKFIKPILEKMDGTEELLVKLNREDLLRKQRTFDNGSIPHQIHLGELHAILRRQEDFYPFLKDNREKIEKILTFRIPYYVGPLARGNSRFAWMTRKSEETITPWNFEEVVDKGASAQSFIERMTNFDKNLPNEKVLPKHSLLYEYFTVYNELTKVKYVTEGMRKPAFLSGEQKKAIVDLLFKTNRKVTVKQLKEDYFKKIECFDSVEISGVEDRFNASLGTYHDLLKIIKDKDFLDNEENEDILEDIVLTLTLFEDREMIEERLKTYAHLFDDKVMKQLKRRRYTGWGRLSRKLINGIRDKQSGKTILDFLKSDGFANRNFMQLIHDDSLTFKEDIQKAQVSGQGDSLHEHIANLAGSPAIKKGILQTVKVVDELVKVMGRHKPENIVIEMARENQTTQKGQKNSRERMKRIEEGIKELGSQILKEHPVENTQLQNEKLYLYYLQNGRDMYVDQELDINRLSDYDVDHIVPQSFLKDDSIDNKVLTRSDKARGKSDNVPSEEVVKKMKNYWRQLLNAKLITQRKFDNLTKAERGGLSELDKAGFIKRQLVETRQITKHVAQILDSRMNTKYDENDKLIREVKVITLKSKLVSDFRKDFQFYKVREINNYHHAHDAYLNAVVGTALIKKYPKLESEFVYGDYKVYDVRKMIAKSEQEIGKATAKYFFYSNIMNFFKTEITLANGEIRKRPLIETNGETGEIVWDKGRDFATVRKVLSMPQVNIVKKTEVQTGGFSKESILPKRNSDKLIARKKDWDPKKYGGFDSPTVAYSVLVVAKVEKGKSKKLKSVKELLGITIMERSSFEKNPIDFLEAKGYKEVKKDLIIKLPKYSLFELENGRKRMLASAGELQKGNELALPSKYVNFLYLASHYEKLKGSPEDNEQKQLFVEQHKHYLDEIIEQISEFSKRVILADANLDKVLSAYNKHRDKPIREQAENIIHLFTLTNLGAPAAFKYFDTTIDRKRYTSTKEVLDATLIHQSITGLYETRIDLSQLGGDGGGGSGGSGGSGGTLNLEDEYRLYETSAEPEVSPGSTWLSDFPQAWAETGGMGLAVRQAPLIIPLKATSTPVSIKQYPMSQEAKLGIKPHIQRLLDQGILVPCQSPWNTPLLPVKKPGTNDYRPVQDLREVNKRVEDIHPTVPNPYNLLSGLPPSHRWYTVLDLKDAFFCLRLHPTSQPLFAFEWRDPGMGISGQLTWTRLPQGFKNSPTLFNEALHRDLADFRIQHPDLILLQYVDDILLAATSELDCQQGTRALLLTLGNLGYRASAKKAQLCQKQVKYLGYLLKEGQRWLTEARKETVMGQPTPKTPRQLREFLGTAGFCRLWIPGFAEMAAPLYPLTKPGTLFNWGPDQQKAYQEIKQALLTAPALGLPDLTKPFELFVDEKQGYAKGVLTQKLGPWRRPVAYLSKKLDPVAAGWPPCLRMVAAIAVLRKDAGKLTMGQPLVILAPHAVEALVKQPPDRWLSNARMTHYQAMLLDTDRVQFGPVVALNPATLLPLPEEGAPHDCLEILAETHGTRPDLTDQPIPDADHTWYTDGSSFLQEGQRKAGAAVTTETEVIWARALPAGTSAQRAELIALTQALKMAEGKRLNVYTDSRYAFATAHIHGEIYRRRGWLTSEGREIKNKSEILALLKALFLPKRLSIIHCLGHQKGDSAEARGNRLADQAAREAAIKTPPDTSTLLAGKRTADGSEFEKRTADGSEFESPKKKAKVE

SEQ ID NO: 6033 - protein, 2094 aa, synthetic construct
MPAAKRVKLDGGDKKYSIGLDIGTNSVGWAVITDEYKVPSKKFKVLGNTDRHSIKKNLIGALLFDSGETAEATRLKRTARRRYTRRKNRICYLQEIFSNEMAKVDDSFFHRLEESFLVEEDKKHERHPIFGNIVDEVAYHEKYPTIYHLRKKLVDSTDKADLRLIYLALAHMIKFRGHFLIEGDLNPDNSDVDKLFIQLVQTYNQLFEENPINASGVDAKAILSARLSKSRRLENLIAQLPGEKKNGLFGNLIALSLGLTPNFKSNFDLAEDAKLQLSKDTYDDDLDNLLAQIGDQYADLFLAAKNLSDAILLSDILRVNTEITKAPLSASMIKRYDEHHQDLTLLKALVRQQLPEKYKEIFFDQSKNGYAGYIDGGASQEEFYKFIKPILEKMDGTEELLVKLNREDLLRKQRTFDNGSIPHQIHLGELHAILRRQEDFYPFLKDNREKIEKILTFRIPYYVGPLARGNSRFAWMTRKSEETITPWNFEEVVDKGASAQSFIERMTNFDKNLPNEKVLPKHSLLYEYFTVYNELTKVKYVTEGMRKPAFLSGEQKKAIVDLLFKTNRKVTVKQLKEDYFKKIECFDSVEISGVEDRFNASLGTYHDLLKIIKDKDFLDNEENEDILEDIVLTLTLFEDREMIEERLKTYAHLFDDKVMKQLKRRRYTGWGRLSRKLINGIRDKQSGKTILDFLKSDGFANRNFMQLIHDDSLTFKEDIQKAQVSGQGDSLHEHIANLAGSPAIKKGILQTVKVVDELVKVMGRHKPENIVIEMARENQTTQKGQKNSRERMKRIEEGIKELGSQILKEHPVENTQLQNEKLYLYYLQNGRDMYVDQELDINRLSDYDVDHIVPQSFLKDDSIDNKVLTRSDKARGKSDNVPSEEVVKKMKNYWRQLLNAKLITQRKFDNLTKAERGGLSELDKAGFIKRQLVETRQITKHVAQILDSRMNTKYDENDKLIREVKVITLKSKLVSDFRKDFQFYKVREINNYHHAHDAYLNAVVGTALIKKYPKLESEFVYGDYKVYDVRKMIAKSEQEIGKATAKYFFYSNIMNFFKTEITLANGEIRKRPLIETNGETGEIVWDKGRDFATVRKVLSMPQVNIVKKTEVQTGGFSKESILPKRNSDKLIARKKDWDPKKYGGFDSPTVAYSVLVVAKVEKGKSKKLKSVKELLGITIMERSSFEKNPIDFLEAKGYKEVKKDLIIKLPKYSLFELENGRKRMLASAGELQKGNELALPSKYVNFLYLASHYEKLKGSPEDNEQKQLFVEQHKHYLDEIIEQISEFSKRVILADANLDKVLSAYNKHRDKPIREQAENIIHLFTLTNLGAPAAFKYFDTTIDRKRYTSTKEVLDATLIHQSITGLYETRIDLSQLGGDGGGGSGGSGGSGGTLNLEDEYRLYETSAEPEVSPGSTWLSDFPQAWAETGGMGLAVRQAPLIIPLKATSTPVSIKQYPMSQEAKLGIKPHIQRLLDQGILVPCQSPWNTPLLPVKKPGTNDYRPVQDLREVNKRVEDIHPTVPNPYNLLSGLPPSHRWYTVLDLKDAFFCLRLHPTSQPLFAFEWRDPGMGISGQLTWTRLPQGFKNSPTLFNEALHRDLADFRIQHPDLILLQYVDDILLAATSELDCQQGTRALLLTLGNLGYRASAKKAQLCQKQVKYLGYLLKEGQRWLTEARKETVMGQPTPKTPRQLREFLGKAGFCRLFIPGFAEMAAPLYPLTKPGTLFNWGPDQQKAYQEIKQALLTAPALGLPDLTKPFELFVDEKQGYAKGVLTQKLGPWRRPVAYLSKKLDPVAAGWPPCLRMVAAIAVLRKDAGKLTMGQPLVILAPHAVEALVKQPPDRWLSNARMTHYQAMLLDTDRVQFGPVVALNPATLLPLPEEGAPHDCLEILAETHGTRPDLTDQPIPDADHTWYTDGSSFLQEGQRKAGAAVTTETEVIWARALPAGTSAQRAELIALTQALKMAEGKRLNVYTDSRYAFATAHIHGEIYRRRGWLTSEGREIKNKSEILALLKALFLPKRLSIIHCLGHQKGDSAEARGNRLADQAAREAAIKTPPDTSTLLAGKRTADGSEFEKRTADGSEFESPKKKAKVE

SEQ ID NO: 6034 - protein, 2094 aa, synthetic construct
MPAAKRVKLDGGDKKYSIGLDIGTNSVGWAVITDEYKVPSKKFKVLGNTDRHSIKKNLIGALLFDSGETAEATRLKRTARRRYTRRKNRICYLQEIFSNEMAKVDDSFFHRLEESFLVEEDKKHERHPIFGNIVDEVAYHEKYPTIYHLRKKLVDSTDKADLRLIYLALAHMIKFRGHFLIEGDLNPDNSDVDKLFIQLVQTYNQLFEENPINASGVDAKAILSARLSKSRRLENLIAQLPGEKKNGLFGNLIALSLGLTPNFKSNFDLAEDAKLQLSKDTYDDDLDNLLAQIGDQYADLFLAAKNLSDAILLSDILRVNTEITKAPLSASMIKRYDEHHQDLTLLKALVRQQLPEKYKEIFFDQSKNGYAGYIDGGASQEEFYKFIKPILEKMDGTEELLVKLNREDLLRKQRTFDNGSIPHQIHLGELHAILRRQEDFYPFLKDNREKIEKILTFRIPYYVGPLARGNSRFAWMTRKSEETITPWNFEEVVDKGASAQSFIERMTNFDKNLPNEKVLPKHSLLYEYFTVYNELTKVKYVTEGMRKPAFLSGEQKKAIVDLLFKTNRKVTVKQLKEDYFKKIECFDSVEISGVEDRFNASLGTYHDLLKIIKDKDFLDNEENEDILEDIVLTLTLFEDREMIEERLKTYAHLFDDKVMKQLKRRRYTGWGRLSRKLINGIRDKQSGKTILDFLKSDGFANRNFMQLIHDDSLTFKEDIQKAQVSGQGDSLHEHIANLAGSPAIKKGILQTVKVVDELVKVMGRHKPENIVIEMARENQTTQKGQKNSRERMKRIEEGIKELGSQILKEHPVENTQLQNEKLYLYYLQNGRDMYVDQELDINRLSDYDVDHIVPQSFLKDDSIDNKVLTRSDKARGKSDNVPSEEVVKKMKNYWRQLLNAKLITQRKFDNLTKAERGGLSELDKAGFIKRQLVETRQITKHVAQILDSRMNTKYDENDKLIREVKVITLKSKLVSDFRKDFQFYKVREINNYHHAHDAYLNAVVGTALIKKYPKLESEFVYGDYKVYDVRKMIAKSEQEIGKATAKYFFYSNIMNFFKTEITLANGEIRKRPLIETNGETGEIVWDKGRDFATVRKVLSMPQVNIVKKTEVQTGGFSKESILPKRNSDKLIARKKDWDPKKYGGFDSPTVAYSVLVVAKVEKGKSKKLKSVKELLGITIMERSSFEKNPIDFLEAKGYKEVKKDLIIKLPKYSLFELENGRKRMLASAGELQKGNELALPSKYVNFLYLASHYEKLKGSPEDNEQKQLFVEQHKHYLDEIIEQISEFSKRVILADANLDKVLSAYNKHRDKPIREQAENIIHLFTLTNLGAPAAFKYFDTTIDRKRYTSTKEVLDATLIHQSITGLYETRIDLSQLGGDGGGGSGGSGGSGGLGIEDEYRLHETSTEPDVSLGSTWLSDFPQAWAETGGMGLAVRQAPLIIPLKATSTPVSIQQYPMSHEARLGIKPHIQRLLDQGILVPCQSPWNTPLLPVKKPGTNDYRPVQDLREVNKRVEDIHPTVPNPYNLLSGLPPSHQWYTVLDLKDAFFCLRLHPTSQPLFAFEWRDPGMGISGQLTWTRLPQGFKNSPTLFNEALHRDLADFRIQHPDLILLQYVDDILLAATSELDCQQGTRALLQTLGDLGYRASAKKAQICQKQVKYLGYLLREGQRWLTEARKETVMGQPVPKTPRQLREFLGKAGFCRLFIPGFAEMAAPLYPLTKPGTLFSWGPDQQKAYQEIKQALLTAPALGLPDLTKPFELFVDEKQGYAKGVLTQKLGPWRRPVAYLSKKLDPVAAGWPPCLRMVAAIAVLTKDAGKLTMGQPLVILAPHAVEALVKQPPDRWLSNARMTHYQAMLLDTDRVQFGPVVALNPATLLPLPEEGAPHDCLEILAETHGTRPDLTDQPIPDADHTWYTDGSSFLQEGQRKAGAAVTTETEVIWAGALPAGTSAQRAELIALTQALKMAEGKRLNVYTDSRYAFATAHIHGEIYRRRGWLTSEGREIKNKSEILALLKALFLPKRLSIIHCLGHQKGDSAEARGNRLADQAAREAAIKTPPDTSTLLIAGKRTADGSEFEKRTADGSEFESPKKKAKVE

SEQ ID NO: 6035 - protein, 2094 aa, synthetic construct
MPAAKRVKLDGGDKKYSIGLDIGTNSVGWAVITDEYKVPSKKFKVLGNTDRHSIKKNLIGALLFDSGETAEATRLKRTARRRYTRRKNRICYLQEIFSNEMAKVDDSFFHRLEESFLVEEDKKHERHPIFGNIVDEVAYHEKYPTIYHLRKKLVDSTDKADLRLIYLALAHMIKFRGHFLIEGDLNPDNSDVDKLFIQLVQTYNQLFEENPINASGVDAKAILSARLSKSRRLENLIAQLPGEKKNGLFGNLIALSLGLTPNFKSNFDLAEDAKLQLSKDTYDDDLDNLLAQIGDQYADLFLAAKNLSDAILLSDILRVNTEITKAPLSASMIKRYDEHHQDLTLLKALVRQQLPEKYKEIFFDQSKNGYAGYIDGGASQEEFYKFIKPILEKMDGTEELLVKLNREDLLRKQRTFDNGSIPHQIHLGELHAILRRQEDFYPFLKDNREKIEKILTFRIPYYVGPLARGNSRFAWMTRKSEETITPWNFEEVVDKGASAQSFIERMTNFDKNLPNEKVLPKHSLLYEYFTVYNELTKVKYVTEGMRKPAFLSGEQKKAIVDLLFKTNRKVTVKQLKEDYFKKIECFDSVEISGVEDRFNASLGTYHDLLKIIKDKDFLDNEENEDILEDIVLTLTLFEDREMIEERLKTYAHLFDDKVMKQLKRRRYTGWGRLSRKLINGIRDKQSGKTILDFLKSDGFANRNFMQLIHDDSLTFKEDIQKAQVSGQGDSLHEHIANLAGSPAIKKGILQTVKVVDELVKVMGRHKPENIVIEMARENQTTQKGQKNSRERMKRIEEGIKELGSQILKEHPVENTQLQNEKLYLYYLQNGRDMYVDQELDINRLSDYDVDHIVPQSFLKDDSIDNKVLTRSDKARGKSDNVPSEEVVKKMKNYWRQLLNAKLITQRKFDNLTKAERGGLSELDKAGFIKRQLVETRQITKHVAQILDSRMNTKYDENDKLIREVKVITLKSKLVSDFRKDFQFYKVREINNYHHAHDAYLNAVVGTALIKKYPKLESEFVYGDYKVYDVRKMIAKSEQEIGKATAKYFFYSNIMNFFKTEITLANGEIRKRPLIETNGETGEIVWDKGRDFATVRKVLSMPQVNIVKKTEVQTGGFSKESILPKRNSDKLIARKKDWDPKKYGGFDSPTVAYSVLVVAKVEKGKSKKLKSVKELLGITIMERSSFEKNPIDFLEAKGYKEVKKDLIIKLPKYSLFELENGRKRMLASAGELQKGNELALPSKYVNFLYLASHYEKLKGSPEDNEQKQLFVEQHKHYLDEIIEQISEFSKRVILADANLDKVLSAYNKHRDKPIREQAENIIHLFTLTNLGAPAAFKYFDTTIDRKRYTSTKEVLDATLIHQSITGLYETRIDLSQLGGDGGGGSGGSGGSGGTLGIEDEYRLHETSTEPDVSLGSTWLSDFPQAWAETGGMGLAVRQAPLIIPLKATSTPVSIQQYPMSHEARLGIKPHIQRLLDQGILVPCQSPWNTPLLPVKKPGTNDYRPVQDLREVNKRVEDIHPTVPNPYNLLSGLPPSHQWYTVLDLKDAFFCLRLHPTSQPLFAFEWRDPGMGISGQLTWTRLPQGFKNSPTLFNEALHRDLADFRIQHPDLILLQYVDDILLAATSELDCQQGTRALLQTLGDLGYRASAKKAQICQKQVKYLGYLLREGQRWLTEARKETVMGQPVPKTPRQLREFLGTAGFCRLWIPGFAEMAAPLYPLTKPGTLFSWGPDQQKAYQEIKQALLTAPALGLPDLTKPFELFVDEKQGYAKGVLTQKLGPWRRPVAYLSKKLDPVAAGWPPCLRMVAAIAVLTKDAGKLTMGQPLVILAPHAVEALVKQPPDRWLSNARMTHYQAMLLDTDRVQFGPVVALNPATLLPLPEEGAPHDCLEILAETHGTRPDLTDQPIPDADHTWYTDGSSFLQEGQRKAGAAVTTETEVIWAGALPAGTSAQRAELIALTQALKMAEGKRLNVYTDSRYAFATAHIHGEIYRRRGWLTSEGREIKNKSEILALLKALFLPKRLSIIHCLGHQKGDSAEARGNRLADQAAREAAIKTPPDTSTLLAGKRTADGSEFEKRTADGSEFESPKKKAKVE

SEQ ID NO: 6036 - protein, 2094 aa, synthetic construct; identical to SEQ ID NO: 6034

SEQ ID NO: 6037 - protein, 2094 aa, synthetic construct
MPAAKRVKLDGGDKKYSIGLDIGTNSVGWAVITDEYKVPSKKFKVLGNTDRHSIKKNLIGALLFDSGETAEATRLKRTARRRYTRRKNRICYLQEIFSNEMAKVDDSFFHRLEESFLVEEDKKHERHPIFGNIVDEVAYHEKYPTIYHLRKKLVDSTDKADLRLIYLALAHMIKFRGHFLIEGDLNPDNSDVDKLFIQLVQTYNQLFEENPINASGVDAKAILSARLSKSRRLENLIAQLPGEKKNGLFGNLIALSLGLTPNFKSNFDLAEDAKLQLSKDTYDDDLDNLLAQIGDQYADLFLAAKNLSDAILLSDILRVNTEITKAPLSASMIKRYDEHHQDLTLLKALVRQQLPEKYKEIFFDQSKNGYAGYIDGGASQEEFYKFIKPILEKMDGTEELLVKLNREDLLRKQRTFDNGSIPHQIHLGELHAILRRQEDFYPFLKDNREKIEKILTFRIPYYVGPLARGNSRFAWMTRKSEETITPWNFEEVVDKGASAQSFIERMTNFDKNLPNEKVLPKHSLLYEYFTVYNELTKVKYVTEGMRKPAFLSGEQKKAIVDLLFKTNRKVTVKQLKEDYFKKIECFDSVEISGVEDRFNASLGTYHDLLKIIKDKDFLDNEENEDILEDIVLTLTLFEDREMIEERLKTYAHLFDDKVMKQLKRRRYTGWGRLSRKLINGIRDKQSGKTILDFLKSDGFANRNFMQLIHDDSLTFKEDIQKAQVSGQGDSLHEHIANLAGSPAIKKGILQTVKVVDELVKVMGRHKPENIVIEMARENQTTQKGQKNSRERMKRIEEGIKELGSQILKEHPVENTQLQNEKLYLYYLQNGRDMYVDQELDINRLSDYDVDHIVPQSFLKDDSIDNKVLTRSDKARGKSDNVPSEEVVKKMKNYWRQLLNAKLITQRKFDNLTKAERGGLSELDKAGFIKRQLVETRQITKHVAQILDSRMNTKYDENDKLIREVKVITLKSKLVSDFRKDFQFYKVREINNYHHAHDAYLNAVVGTALIKKYPKLESEFVYGDYKVYDVRKMIAKSEQEIGKATAKYFFYSNIMNFFKTEITLANGEIRKRPLIETNGETGEIVWDKGRDFATVRKVLSMPQVNIVKKTEVQTGGFSKESILPKRNSDKLIARKKDWDPKKYGGFDSPTVAYSVLVVAKVEKGKSKKLKSVKELLGITIMERSSFEKNPIDFLEAKGYKEVKKDLIIKLPKYSLFELENGRKRMLASAGELQKGNELALPSKYVNFLYLASHYEKLKGSPEDNEQKQLFVEQHKHYLDEIIEQISEFSKRVILADANLDKVLSAYNKHRDKPIREQAENIIHLFTLTNLGAPAAFKYFDTTIDRKRYTSTKEVLDATLIHQSITGLYETRIDLSQLGGDGGGGSGGSGGSGGTLGIEDEYRLHETSTEPDVSLGSTWLSDFPQAWAETGGMGLAVRQAPLIIPLKATSTPVSIQQYPMSHEARLGIKPHIQRLLDQGILVPCQSPWNTPLLPVKKPGTNDYRPVQDLREVNKRVEDIHPTVPNPYNLLSGLPPSHQWYTVLDLKDAFFCLRLHPTSQPLFAFEWRDPGMGISGQLTWTRLPQGFKNSPTLFDEALHRDLADFRIQHPDLILLQYVDDILLAATSELDCQQGTRALLQTLGDLGYRASAKKAQICQKQVKYLGYLLREGQRWLTEARKETVMGQPVPKTPRQLREFLGTAGFCRLWIPGFAEMAAPLYPLTKTGTLFSWGPDQQKAYQEIKQALLTAPALGLPDLTKPFELFVDEKQGYAKGVLTQKLGPWRRPVAYLSKKLDPVAAGWPPCLRMVAAIAVLTKDAGKLTMGQPLVILAPHAVEALVKQPPDRWLSNARMTHYQAMLLDTDRVQFGPVVALNPATLLPLPEEGAPHDCLEILAETHGTRPDLTDQPIPDADHTWYTDGSSFLQEGQRKAGAAVTTETEVIWAGALPAGTSAQRAELIALTQALKMAEGKRLNVYTDSRYAFATAHIHGEIYRRRGLLTSEGREIKNKSEILALLKALFLPKRLSIIHCLGHQKGDSAEARGNRLADQAAREAAIKTPPDTSTLLAGKRTADGSEFEKRTADGSEFESPKKKAKVE

SEQ ID NO: 6038 - protein, 2094 aa, synthetic construct; identical to SEQ ID NO: 6035

SEQ ID NO: 6039 - protein, 2094 aa, synthetic construct
MPAAKRVKLDGGDKKYSIGLDIGTNSVGWAVITDEYKVPSKKFKVLGNTDRHSIKKNLIGALLFDSGETAEATRLKRTARRRYTRRKNRICYLQEIFSNEMAKVDDSFFHRLEESFLVEEDKKHERHPIFGNIVDEVAYHEKYPTIYHLRKKLVDSTDKADLRLIYLALAHMIKFRGHFLIEGDLNPDNSDVDKLFIQLVQTYNQLFEENPINASGVDAKAILSARLSKSRRLENLIAQLPGEKKNGLFGNLIALSLGLTPNFKSNFDLAEDAKLQLSKDTYDDDLDNLLAQIGDQYADLFLAAKNLSDAILLSDILRVNTEITKAPLSASMIKRYDEHHQDLTLLKALVRQQLPEKYKEIFFDQSKNGYAGYIDGGASQEEFYKFIKPILEKMDGTEELLVKLNREDLLRKQRTFDNGSIPHQIHLGELHAILRRQEDFYPFLKDNREKIEKILTFRIPYYVGPLARGNSRFAWMTRKSEETITPWNFEEVVDKGASAQSFIERMTNFDKNLPNEKVLPKHSLLYEYFTVYNELTKVKYVTEGMRKPAFLSGEQKKAIVDLLFKTNRKVTVKQLKEDYFKKIECFDSVEISGVEDRFNASLGTYHDLLKIIKDKDFLDNEENEDILEDIVLTLTLFEDREMIEERLKTYAHLFDDKVMKQLKRRRYTGWGRLSRKLINGIRDKQSGKTILDFLKSDGFANRNFMQLIHDDSLTFKEDIQKAQVSGQGDSLHEHIANLAGSPAIKKGILQTVKVVDELVKVMGRHKPENIVIEMARENQTTQKGQKNSRERMKRIEEGIKELGSQILKEHPVENTQLQNEKLYLYYLQNGRDMYVDQELDINRLSDYDVDHIVPQSFLKDDSIDNKVLTRSDKARGKSDNVPSEEVVKKMKNYWRQLLNAKLITQRKFDNLTKAERGGLSELDKAGFIKRQLVETRQITKHVAQILDSRMNTKYDENDKLIREVKVITLKSKLVSDFRKDFQFYKVREINNYHHAHDAYLNAVVGTALIKKYPKLESEFVYGDYKVYDVRKMIAKSEQEIGKATAKYFFYSNIMNFFKTEITLANGEIRKRPLIETNGETGEIVWDKGRDFATVRKVLSMPQVNIVKKTEVQTGGFSKESILPKRNSDKLIARKKDWDPKKYGGFDSPTVAYSVLVVAKVEKGKSKKLKSVKELLGITIMERSSFEKNPIDFLEAKGYKEVKKDLIIKLPKYSLFELENGRKRMLASAGELQKGNELALPSKYVNFLYLASHYEKLKGSPEDNEQKQLFVEQHKHYLDEIIEQISEFSKRVILADANLDKVLSAYNKHRDKPIREQAENIIHLFTLTNLGAPAAFKYFDTTIDRKRYTSTKEVLDATLIHQSITGLYETRIDLSQLGGDGGGGSGGSGGSGGTLNIEDEYRLHETSKGPDVPLGSTWLSDFPQAWAETGGMGLAFRQAPLIISLKATSTPVSIKQYPMSQEARLGIKPHIQRLLDQGILVPCQSPWNTPLLPVKKPGTNDYRPVQDLREVNKRVEDIHPTVPNPYNLLSGLPPSHQWYTVLDLKDAFFCLRLHPTSQSLFAFEWKDPEMGISGQLTWTRLPQGFKNSPTLFNEALHRDLADFRIQHPDLILLQYVDDLLLAATSELDCQQGTRALLQTLGDLGYRASAKKAQICQKQVKYLGYLLKEGQRWLTEARKETVMGQPTPKTPRQLREFLGKAGLCRLFIPGFAEMAAPLYPLTKPGTLFKWGPDQQKAYQEIKQALLTAPALGLPDLTKPFELFVDEKQGYAKGVLTQKLGPWRRPVAYLSKKLDPVAAGWPPCLRMVAAIAVLTKDVGKLTMGQPLVILAPHAVEALVKQPPDRWLSNARMTHYQALLLDTDRVQFGPIVALNPATLLPLPEEGLQHDCLDILAEAHGTRPDLTDQPLPDADHTWYTDGSSFLQEGQRRAGAAVTTETEVIWAKALPAGTSAQRAELIALTQALKMAAGKKLNVYTDSRYAFATAHIHGEIYRRRGWLTSEGKEIKNKDEILALLKALFLPKRLSIIHCPGHQKGNHAEARGNRMADQAAREVATRETPETSTLLAGKRTADGSEFEKRTADGSEFESPKKKAKVE

SEQ ID NO: 6040 - protein, 2094 aa, synthetic construct
MPAAKRVKLDGGDKKYSIGLDIGTNSVGWAVITDEYKVPSKKFKVLGNTDRHSIKKNLIGALLFDSGETAEATRLKRTARRRYTRRKNRICYLQEIFSNEMAKVDDSFFHRLEESFLVEEDKKHERHPIFGNIVDEVAYHEKYPTIYHLRKKLVDSTDKADLRLIYLALAHMIKFRGHFLIEGDLNPDNSDVDKLFIQLVQTYNQLFEENPINASGVDAKAILSARLSKSRRLENLIAQLPGEKKNGLFGNLIALSLGLTPNFKSNFDLAEDAKLQLSKDTYDDDLDNLLAQIGDQYADLFLAAKNLSDAILLSDILRVNTEITKAPLSASMIKRYDEHHQDLTLLKALVRQQLPEKYKEIFFDQSKNGYAGYIDGGASQEEFYKFIKPILEKMDGTEELLVKLNREDLLRKQRTFDNGSIPHQIHLGELHAILRRQEDFYPFLKDNREKIEKILTFRIPYYVGPLARGNSRFAWMTRKSEETITPWNFEEVVDKGASAQSFIERMTNFDKNLPNEKVLPKHSLLYEYFTVYNELTKVKYVTEGMRKPAFLSGEQKKAIVDLLFKTNRKVTVKQLKEDYFKKIECFDSVEISGVEDRFNASLGTYHDLLKIIKDKDFLDNEENEDILEDIVLTLTLFEDREMIEERLKTYAHLFDDKVMKQLKRRRYTGWGRLSRKLINGIRDKQSGKTILDFLKSDGFANRNFMQLIHDDSLTFKEDIQKAQVSGQGDSLHEHIANLAGSPAIKKGILQTVKVVDELVKVMGRHKPENIVIEMARENQTTQKGQKNSRERMKRIEEGIKELGSQILKEHPVENTQLQNEKLYLYYLQNGRDMYVDQELDINRLSDYDVDHIVPQSFLKDDSIDNKVLTRSDKARGKSDNVPSEEVVKKMKNYWRQLLNAKLITQRKFDNLTKAERGGLSELDKAGFIKRQLVETRQITKHVAQILDSRMNTKYDENDKLIREVKVITLKSKLVSDFRKDFQFYKVREINNYHHAHDAYLNAVVGTALIKKYPKLESEFVYGDYKVYDVRKMIAKSEQEIGKATAKYFFYSNIMNFFKTEITLANGEIRKRPLIETNGETGEIVWDKGRDFATVRKVLSMPQVNIVKKTEVQTGGFSKESILPKRNSDKLIARKKDWDPKKYGGFDSPTVAYSVLVVAKVEKGKSKKLKSVKELLGITIMERSSFEKNPIDFLEAKGYKEVKKDLIIKLPKYSLFELENGRKRMLASAGELQKGNELALPSKYVNFLYLASHYEKLKGSPEDNEQKQLFVEQHKHYLDEIIEQISEFSKRVILADANLDKVLSAYNKHRDKPIREQAENIIHLFTLTNLGAPAAFKYFDTTIDRKRYTSTKEVLDATLIHQSITGLYETRIDLSQLGGDGGGGSGGSGGSGGTLNIEDEYRLHETSKGPDVPLGSTWLSDFPQAWAETGGMGLAVRQAPLIIPLKATSTPVSIKQYPMSQEARLGIKPHIQRLLDQGILVPCQSPWNTPLLPVKKPGTNDYRPVQDLREVNKRVEDIHPTVPNPYNLLSGLPPSHQWYTVLDLKDAFFCLRLHPTSQSLFAFEWRDPEMGISGQLTWTRLPQGFKNSPTLFDEALHRDLADFRIQHPDLILLQYVDDLLLAATSELDCQQGTRALLQTLGDLGYRASAKKAQICQKQVKYLGYLLKEGQRWLTEARKETVMGQPTPKTPRQLREFLGTAGFCRLWIPGFAEMAAPLYPLTKTGTLFEWGPDQQKAYQEIKQALLTAPALGLPDLTKPFELFVDEKQGYAKGVLTQKLGPWRRPVAYLSKKLDPVAAGWPPCLRMVAAIAVLTKDAGKLTMGQPLVILAPHAVEALVKQPPDRWLSNARMTHYQALLLDTDRVQFGPIVALNPATLLPLPEEGLQHDCLDILAEAHGTRPDLTDQPLPDADHTWYTDGSSFLQEGQRKAGAAVTTETEVVWAKALPAGTSAQRAELIALTQALKMAEGKKLNVYTDSRYAFATAHIHGEIYRRRGLLTSEGKEIKNKDEILALLKALFLPKRLSIIHCPGHQKGNRAEARGNRMADQAAREVATRETPETSTLLAGKRTADGSEFEKRTADGSEFESPKKKAKVE

SEQ ID NO: 6041 - protein, 2094 aa, synthetic construct
MPAAKRVKLDGGDKKYSIGLDIGTNSVGWAVITDEYKVPSKKFKVLGNTDRHSIKKNLIGALLFDSGETAEATRLKRTARRRYTRRKNRICYLQEIFSNEMAKVDDSFFHRLEESFLVEEDKKHERHPIFGNIVDEVAYHEKYPTIYHLRKKLVDSTDKADLRLIYLALAHMIKFRGHFLIEGDLNPDNSDVDKLFIQLVQTYNQLFEENPINASGVDAKAILSARLSKSRRLENLIAQLPGEKKNGLFGNLIALSLGLTPNFKSNFDLAEDAKLQLSKDTYDDDLDNLLAQIGDQYADLFLAAKNLSDAILLSDILRVNTEITKAPLSASMIKRYDEHHQDLTLLKALVRQQLPEKYKEIFFDQSKNGYAGYIDGGASQEEFYKFIKPILEKMDGTEELLVKLNREDLLRKQRTFDNGSIPHQIHLGELHAILRRQEDFYPFLKDNREKIEKILTFRIPYYVGPLARGNSRFAWMTRKSEETITPWNFEEVVDKGASAQSFIERMTNFDKNLPNEKVLPKHSLLYEYFTVYNELTKVKYVTEGMRKPAFLSGEQKKAIVDLLFKTNRKVTVKQLKEDYFKKIECFDSVEISGVEDRFNASLGTYHDLLKIIKDKDFLDNEENEDILEDIVLTLTLFEDREMIEERLKTYAHLFDDKVMKQLKRRRYTGWGRLSRKLINGIRDKQSGKTILDFLKSDGFANRNFMQLIHDDSLTFKEDIQKAQVSGQGDSLHEHIANLAGSPAIKKGILQTVKVVDELVKVMGRHKPENIVIEMARENQTTQKGQKNSRERMKRIEEGIKELGSQILKEHPVENTQLQNEKLYLYYLQNGRDMYVDQELDINRLSDYDVDHIVPQSFLKDDSIDNKVLTRSDKARGKSDNVPSEEVVKKMKNYWRQLLNAKLITQRKFDNLTKAERGGLSELDKAGFIKRQLVETRQITKHVAQILDSRMNTKYDENDKLIREVKVITLKSKLVSDFRKDFQFYKVREINNYHHAHDAYLNAVVGTALIKKYPKLESEFVYGDYKVYDVRKMIAKSEQEIGKATAKYFFYSNIMNFFKTEITLANGEIRKRPLIETNGETGEIVWDKGRDFATVRKVLSMPQVNIVKKTEVQTGGFSKESILPKRNSDKLIARKKDWDPKKYGGFDSPTVAYSVLVVAKVEKGKSKKLKSVKELLGITIMERSSFEKNPIDFLEAKGYKEVKKDLIIKLPKYSLFELENGRKRMLASAGELQKGNELALPSKYVNFLYLASHYEKLKGSPEDNEQKQLFVEQHKHYLDEIIEQISEFSKRVILADANLDKVLSAYNKHRDKPIREQAENIIHLFTLTNLGAPAAFKYFDTTIDRKRYTSTKEVLDATLIHQSITGLYETRIDLSQLGGDGGGGSGGSGGSGGTLNIEDEHRLHETSKEPDVSLGSTWLSDFPQAWAETGGMGLAVRQAPLIIPLKATSTPVSIKQYPMSQEARLGIKPHIQRLLDQGILVPCQSPWNTPLLPVKKPGTNDYRPVQDLREVNKRVEDIHPTVPNPYNLLSGLPPSHQWYTVLDLKDAFFCLRLHPTSQPLFAFEWRDPEMGISGQLTWTRLPQGFKNSPTLFNEALHRDLADFRIQHPDLILLQYVDDLLLAATSELDCQQGTRALLQTLGNLGYRASAKKAQICQKQVKYLGYLLKEGQRWLTEARKETVMGQPTPKTPRQLREFLGTAGFCRLWIPGFAEMAAPLYPLTKPGTLFNWGPDQQKAYQEIKQALLTAPALGLPDLTKPFELFVDEKQGYAKGVLTQKLGPWRRPVAYLSKKLDPVAAGWPPCLRMVAAIAVLTKDAGKLTMGQPLVILAPHAVEALVKQPPDRWLSNARMTHYQALLLDTDRVQFGPVVALNPATLLPLPEEGLQHNCLDILAEAHGTRPDLTDQPLPDADHTWYTDGSSLLQEGQRKAGAAVTTETEVIWAKALPAGTSAQRAELIALTQALKMAEGKKLNVYTDSRYAFATAHIHGEIYRRRGWLTSEGKEIKNKDEILALLKALFLPKRLSIIHCPGHQKGHSAEARGNRMADQAARKAAITETPDTSTLLAGKRTADGSEFEKRTADGSEFESPKKKAKVE

SEQ ID NO: 6042 - protein, 2094 aa, synthetic construct
MPAAKRVKLDGGDKKYSIGLDIGTNSVGWAVITDEYKVPSKKFKVLGNTDRHSIKKNLIGALLFDSGETAEATRLKRTARRRYTRRKNRICYLQEIFSNEMAKVDDSFFHRLEESFLVEEDKKHERHPIFGNIVDEVAYHEKYPTIYHLRKKLVDSTDKADLRLIYLALAHMIKFRGHFLIEGDLNPDNSDVDKLFIQLVQTYNQLFEENPINASGVDAKAILSARLSKSRRLENLIAQLPGEKKNGLFGNLIALSLGLTPNFKSNFDLAEDAKLQLSKDTYDDDLDNLLAQIGDQYADLFLAAKNLSDAILLSDILRVNTEITKAPLSASMIKRYDEHHQDLTLLKALVRQQLPEKYKEIFFDQSKNGYAGYIDGGASQEEFYKFIKPILEKMDGTEELLVKLNREDLLRKQRTFDNGSIPHQIHLGELHAILRRQEDFYPFLKDNREKIEKILTFRIPYYVGPLARGNSRFAWMTRKSEETITPWNFEEVVDKGASAQSFIERMTNFDKNLPNEKVLPKHSLLYEYFTVYNELTKVKYVTEGMRKPAFLSGEQKKAIVDLLFKTNRKVTVKQLKEDYFKKIECFDSVEISGVEDRFNASLGTYHDLLKIIKDKDFLDNEENEDILEDIVLTLTLFEDREMIEERLKTYAHLFDDKVMKQLKRRRYTGWGRLSRKLINGIRDKQSGKTILDFLKSDGFANRNFMQLIHDDSLTFKEDIQKAQVSGQGDSLHEHIANLAGSPAIKKGILQTVKVVDELVKVMGRHKPENIVIEMARENQTTQKGQKNSRERMKRIEEGIKELGSQILKEHPVENTQLQNEKLYLYYLQNGRDMYVDQELDINRLSDYDVDHIVPQSFLKDDSIDNKVLTRSDKARGKSDNVPSEEVVKKMKNYWRQLLNAKLITQRKFDNLTKAERGGLSELDKAGFIKRQLVETRQITKHVAQILDSRMNTKYDENDKLIREVKVITLKSKLVSDFRKDFQFYKVREINNYHHAHDAYLNAVVGTALIKKYPKLESEFVYGDYKVYDVRKMIAKSEQEIGKATAKYFFYSNIMNFFKTEITLANGEIRKRPLIETNGETGEIVWDKGRDFATVRKVLSMPQVNIVKKTEVQTGGFSKESILPKRNSDKLIARKKDWDPKKYGGFDSPTVAYSVLVVAKVEKGKSKKLKSVKELLGITIMERSSFEKNPIDFLEAKGYKEVKKDLIIKLPKYSLFELENGRKRMLASAGELQKGNELALPSKYVNFLYLASHYEKLKGSPEDNEQKQLFVEQHKHYLDEIIEQISEFSKRVILADANLDKVLSAYNKHRDKPIREQAENIIHLFTLTNLGAPAAFKYFDTTIDRKRYTSTKEVLDATLIHQSITGLYETRIDLSQLGGDGGGGSGGSGGSGGTLNIEDEHRLHETSKEPDVSLGSTWLSDFPQAWAETGGMGLAVRQAPLIIPLKATSTPVSIKQYPMSQEARLGIKPHIQRLLDQGILVPCQSPWNTPLLPVKKPGTNDYRPVQDLREVNKRVEDIHPTVPNPYNLLSGLPPSHQWYTVLDLKDAFFCLRLHPTSQPLFAFEWRDPEMGISGQLTWTRLPQGFKNSPTLFDEALHRDLADFRIQHPDLILLQYVDDLLLAATSELDCQQGTRALLQTLGNLGYRASAKKAQICQKQVKYLGYLLKEGQRWLTEARKETVMGQPTPKTPRQLREFLGTAGFCRLWIPGFAEMAAPLYPLTKTGTLFNWGPDQQKAYQEIKQALLTAPALGLPDLTKPFELFVDEKQGYAKGVLTQKLGPWRRPVAYLSKKLDPVAAGWPPCLRMVAAIAVLTKDAGKLTMGQPLVILAPHAVEALVKQPPDRWLSNARMTHYQALLLDTDRVQFGPVVALNPATLLPLPEEGLQHNCLDILAEAHGTRPDLTDQPLPDADHTWYTDGSSLLQEGQRKAGAAVTTETEVIWAKALPAGTSAQRAELIALTQALKMAEGKKLNVYTDSRYAFATAHIHGEIYRRRGLLTSEGKEIKNKDEILALLKALFLPKRLSIIHCPGHQKGHSAEARGNRMADQAARKAAITETPDTSTLLAGKRTADGSEFEKRTADGSEFESPKKKAKVE

SEQ ID NO: 6043 - protein, 2094 aa, synthetic construct; identical to SEQ ID NO: 6041

SEQ ID NO: 6044 - protein, 2092 aa, synthetic construct
MPAAKRVKLDGGDKKYSIGLDIGTNSVGWAVITDEYKVPSKKFKVLGNTDRHSIKKNLIGALLFDSGETAEATRLKRTARRRYTRRKNRICYLQEIFSNEMAKVDDSFFHRLEESFLVEEDKKHERHPIFGNIVDEVAYHEKYPTIYHLRKKLVDSTDKADLRLIYLALAHMIKFRGHFLIEGDLNPDNSDVDKLFIQLVQTYNQLFEENPINASGVDAKAILSARLSKSRRLENLIAQLPGEKKNGLFGNLIALSLGLTPNFKSNFDLAEDAKLQLSKDTYDDDLDNLLAQIGDQYADLFLAAKNLSDAILLSDILRVNTEITKAPLSASMIKRYDEHHQDLTLLKALVRQQLPEKYKEIFFDQSKNGYAGYIDGGASQEEFYKFIKPILEKMDGTEELLVKLNREDLLRKQRTFDNGSIPHQIHLGELHAILRRQEDFYPFLKDNREKIEKILTFRIPYYVGPLARGNSRFAWMTRKSEETITPWNFEEVVDKGASAQSFIERMTNFDKNLPNEKVLPKHSLLYEYFTVYNELTKVKYVTEGMRKPAFLSGEQKKAIVDLLFKTNRKVTVKQLKEDYFKKIECFDSVEISGVEDRFNASLGTYHDLLKIIKDKDFLDNEENEDILEDIVLTLTLFEDREMIEERLKTYAHLFDDKVMKQLKRRRYTGWGRLSRKLINGIRDKQSGKTILDFLKSDGFANRNFMQLIHDDSLTFKEDIQKAQVSGQGDSLHEHIANLAGSPAIKKGILQTVKVVDELVKVMGRHKPENIVIEMARENQTTQKGQKNSRERMKRIEEGIKELGSQILKEHPVENTQLQNEKLYLYYLQNGRDMYVDQELDINRLSDYDVDHIVPQSFLKDDSIDNKVLTRSDKARGKSDNVPSEEVVKKMKNYWRQLLNAKLITQRKFDNLTKAERGGLSELDKAGFIKRQLVETRQITKHVAQILDSRMNTKYDENDKLIREVKVITLKSKLVSDFRKDFQFYKVREINNYHHAHDAYLNAVVGTALIKKYPKLESEFVYGDYKVYDVRKMIAKSEQEIGKATAKYFFYSNIMNFFKTEITLANGEIRKRPLIETNGETGEIVWDKGRDFATVRKVLSMPQVNIVKKTEVQTGGFSKESILPKRNSDKLIARKKDWDPKKYGGFDSPTVAYSVLVVAKVEKGKSKKLKSVKELLGITIMERSSFEKNPIDFLEAKGYKEVKKDLIIKLPKYSLFELENGRKRMLASAGELQKGNELALPSKYVNFLYLASHYEKLKGSPEDNEQKQLFVEQHKHYLDEIIEQISEFSKRVILADANLDKVLSAYNKHRDKPIREQAENIIHLFTLTNLGAPAAFKYFDTTIDRKRYTSTKEVLDATLIHQSITGLYETRIDLSQLGGDGGGGSGGSGGSGGVLNLEEEYRLHEKPVPSSIDPSWLQLFPTVWAERAGMGLANQVPPVVVELRSGASPVAVRQYPMSKEAREGIRPHIQRFLDLGVLVPCQSPWNTPLLPVKKPGTNDYRPVQDLREINKRVQDIHPTVPNPYNLLSSLPPSHTWYSVLDLKDAFFCLKLHPNSQPLFAFEWRDPEKGNTGQLTWTRLPQGFKNSPTLFDEALHRDLAPFRALNPQVVLLQYVDDLLVAAPTYRDCKEGTQKLLQELSKLGYRVSAKKAQLCQKEVTYLGYLLKEGKRWLTPARKATVMKIPPPTTPRQVREFLGTAGFCRLWIPGFASLAAPLYPLTKESIPFIWTEEHQKAFDRIKEALLSAPALALPDLTKPFTLYVDERAGVARGVLTQTLGPWRRPVAYLSKKLDPVASGWPTCLKAVAAVALLLKDADKLTLGQNVTVIASHSLESIVRQPPDRWMTNARMTHYQSLLLNERVSFAPPAVLNPATLLPVESEATPVHRCSEILAEETGTRRDLKDQPLPGVPAWYTDGSSFIAEGKRRAGAAIVDGKRTVWASSLPEGTSAQKAELVALTQALRLAEGKDINIYTDSRYAFATAHIHGAIYKQRGLLTSAGKDIKNKEEILALLEAIHLPKRVAIIHCPGHQKGNDPVATGNRRADEAAKQAALSTRVLAETTKPAGKRTADGSEFEKRTADGSEFESPKKKAKVE

SEQ ID NO: 6045 - protein, 2099 aa, synthetic construct
MPAAKRVKLDGGDKKYSIGLDIGTNSVGWAVITDEYKVPSKKFKVLGNTDRHSIKKNLIGALLFDSGETAEATRLKRTARRRYTRRKNRICYLQEIFSNEMAKVDDSFFHRLEESFLVEEDKKHERHPIFGNIVDEVAYHEKYPTIYHLRKKLVDSTDKADLRLIYLALAHMIKFRGHFLIEGDLNPDNSDVDKLFIQLVQTYNQLFEENPINASGVDAKAILSARLSKSRRLENLIAQLPGEKKNGLFGNLIALSLGLTPNFKSNFDLAEDAKLQLSKDTYDDDLDNLLAQIGDQYADLFLAAKNLSDAILLSDILRVNTEITKAPLSASMIKRYDEHHQDLTLLKALVRQQLPEKYKEIFFDQSKNGYAGYIDGGASQEEFYKFIKPILEKMDGTEELLVKLNREDLLRKQRTFDNGSIPHQIHLGELHAILRRQEDFYPFLKDNREKIEKILTFRIPYYVGPLARGNSRFAWMTRKSEETITPWNFEEVVDKGASAQSFIERMTNFDKNLPNEKVLPKHSLLYEYFTVYNELTKVKYVTEGMRKPAFLSGEQKKAIVDLLFKTNRKVTVKQLKEDYFKKIECFDSVEISGVEDRFNASLGTYHDLLKIIKDKDFLDNEENEDILEDIVLTLTLFEDREMIEERLKTYAHLFDDKVMKQLKRRRYTGWGRLSRKLINGIRDKQSGKTILDFLKSDGFANRNFMQLIHDDSLTFKEDIQKAQVSGQGDSLHEHIANLAGSPAIKKGILQTVKVVDELVKVMGRHKPENIVIEMARENQTTQKGQKNSRERMKRIEEGIKELGSQILKEHPVENTQLQNEKLYLYYLQNGRDMYVDQELDINRLSDYDVDHIVPQSFLKDDSIDNKVLTRSDKARGKSDNVPSEEVVKKMKNYWRQLLNAKLITQRKFDNLTKAERGGLSELDKAGFIKRQLVETRQITKHVAQILDSRMNTKYDENDKLIREVKVITLKSKLVSDFRKDFQFYKVREINNYHHAHDAYLNAVVGTALIKKYPKLESEFVYGDYKVYDVRKMIAKSEQEIGKATAKYFFYSNIMNFFKTEITLANGEIRKRPLIETNGETGEIVWDKGRDFATVRKVLSMPQVNIVKKTEVQTGGFSKESILPKRNSDKLIARKKDWDPKKYGGFDSPTVAYSVLVVAKVEKGKSKKLKSVKELLGITIMERSSFEKNPIDFLEAKGYKEVKKDLIIKLPKYSLFELENGRKRMLASAGELQKGNELALPSKYVNFLYLASHYEKLKGSPEDNEQKQLFVEQHKHYLDEIIEQISEFSKRVILADANLDKVLSAYNKHRDKPIREQAENIIHLFTLTNLGAPAAFKYFDTTIDRKRYTSTKEVLDATLIHQSITGLYETRIDLSQLGGDGGGGSGGSGGSGGSGGTAPLEEEYRLFLEAPIQNVTLLEQWKREIPKVWAEINPPGLASTQAPIHVQLLSTALPVRVRQYPITLEAKRSLRETIRKFRAAGILRPVHSPWNTPLLPVRKSGTSEYRMVQDLREVNKRVETIHPTVPNPYTLLSLLPPDRIWYSVLDLKDAFFCIPLAPESQLIFAFEWADAEEGESGQLTWTRLPQGFKNSPTLFNEALNRDLQGFRLDHPSVSLLQYVDDLLIAADTQAACLSATRDLLMTLAELGYRVSGKKAQLCQEEVTYLGFKIHKGSRSLSNSRTQAILQIPVPKTKRQVREFLGTIGYCRLWIPGFAELAQPLYAATRPGNDPLVWGEKEEEAFQSLKLALTQPPALALPSLDKPFQLFVEETSGAAKGVLTQALGPWKRPVAYLSKRLDPVAAGWPRCLRAIAAAALLTREASKLTFGQDIEITSSHNLESLLRSPPDKWLTNARITQYQVLLLDPPRVRFKQTAALNPATLLPETDDTLPIHHCLDTLDSLTSTRPDLTDQPLAQAEATLFTDGSSYIRDGKRYAGAAVVTLDSVIWAEPLPIGTSAQKAELIALTKALEWSKDKSVNIYTDSRYAFATLHVHGMIYRERGWLTAGGKAIKNAPEILALLTAVWLPKRVAVMHCKGHQKDDAPTSTGNRRADEVAREVAIRPLSTQATISAGKRTADGSEFEKRTADGSEFESPKKKAKVE

SEQ ID NO: 6046 - protein, 2103 aa, synthetic construct
MPAAKRVKLDGGDKKYSIGLDIGTNSVGWAVITDEYKVPSKKFKVLGNTDRHSIKKNLIGALLFDSGETAEATRLKRTARRRYTRRKNRICYLQEIFSNEMAKVDDSFFHRLEESFLVEEDKKHERHPIFGNIVDEVAYHEKYPTIYHLRKKLVDSTDKADLRLIYLALAHMIKFRGHFLIEGDLNPDNSDVDKLFIQLVQTYNQLFEENPINASGVDAKAILSARLSKSRRLENLIAQLPGEKKNGLFGNLIALSLGLTPNFKSNFDLAEDAKLQLSKDTYDDDLDNLLAQIGDQYADLFLAAKNLSDAILLSDILRVNTEITKAPLSASMIKRYDEHHQDLTLLKALVRQQLPEKYKEIFFDQSKNGYAGYIDGGASQEEFYKFIKPILEKMDGTEELLVKLNREDLLRKQRTFDNGSIPHQIHLGELHAILRRQEDFYPFLKDNREKIEKILTFRIPYYVGPLARGNSRFAWMTRKSEETITPWNFEEVVDKGASAQSFIERMTNFDKNLPNEKVLPKHSLLYEYFTVYNELTKVKYVTEGMRKPAFLSGEQKKAIVDLLFKTNRKVTVKQLKEDYFKKIECFDSVEISGVEDRFNASLGTYHDLLKIIKDKDFLDNEENEDILEDIVLTLTLFEDREMIEERLKTYAHLFDDKVMKQLKRRRYTGWGRLSRKLINGIRDKQSGKTILDFLKSDGFANRNFMQLIHDDSLTFKEDIQKAQVSGQGDSLHEHIANLAGSPAIKKGILQTVKVVDELVKVMGRHKPENIVIEMARENQTTQKGQKNSRERMKRIEEGIKELGSQILKEHPVENTQLQNEKLYLYYLQNGRDMYVDQELDINRLSDYDVDHIVPQSFLKDDSIDNKVLTRSDKARGKSDNVPSEEVVKKMKNYWRQLLNAKLITQRKFDNLTKAERGGLSELDKAGFIKRQLVETRQITKHVAQILDSRMNTKYDENDKLIREVKVITLKSKLVSDFRKDFQFYKVREINNYHHAHDAYLNAVVGTALIKKYPKLESEFVYGDYKVYDVRKMIAKSEQEIGKATAKYFFYSNIMNFFKTEITLANGEIRKRPLIETNGETGEIVWDKGRDFATVRKVLSMPQVNIVKKTEVQTGGFSKESILPKRNSDKLIARKKDWDPKKYGGFDSPTVAYSVLVVAKVEKGKSKKLKSVKELLGITIMERSSFEKNPIDFLEAKGYKEVKKDLIIKLPKYSLFELENGRKRMLASAGELQKGNELALPSKYVNFLYLASHYEKLKGSPEDNEQKQLFVEQHKHYLDEIIEQISEFSKRVILADANLDKVLSAYNKHRDKPIREQAENIIHLFTLTNLGAPAAFKYFDTTIDRKRYTSTKEVLDATLIHQSITGLYETRIDLSQLGGDGGGGSGGSGGSGGSGGTVSLQDEHRLFDIPVTTSLPDVWLQDFPQAWAETGGLGRAKCQAPIIIDLKPTAVPVSIKQYPMSLEAHMGIRQHIIKFLELGVLRPCRSPWNTPLLPVKKPGTQDYRPVQDLREINKRTVDIHPTVPNPYNLLSTLKPDYSWYTVLDLKDAFFCLPLAPQSQELFAFEWKDPERGISGQLTWTRLPQGFKNSPTLFNEALHRDLTDFRTQHPEVTLLQYVDDLLLAAPTKKACTQGTRHLLQELGEKGYRASAKKAQICQTKVTYLGYILSEGKRWLTPGRIETVARIPPPRNPREVREFLGTAGFCRLWIPGFAELAAPLYALTKPSTPFTWQTEHQLAFEALKKALLSAPALGLPDTSKPFTLFLDERQGIAKGVLTQKLGPWKRPVAYLSKKLDPVAAGWPPCLRIMAATAMLVKDSAKLTLGQPLTVITPHTLEAIVRQPPDRWITNARLTHYQALLLDTDRVQFGPPVTLNPATLLPVPENQPSPHDCRQVLAETHGTREDLKDQELPDADHTWYTDGSSYLDSGTRRAGAAVVDGHNTIWAQSLPPGTSAQKAELIALTKALELSKGKKANIYTDSRYAFATAHTHGSIYERRGWLTSEGKEIKNKAEIIALLKALFLPQEVAIIHCPGHQKGQDPVAVGNRQADRVARQAAMAEVLTLATEPDNTSHITAGKRTADGSEFEKRTADGSEFESPKKKAKVE

SEQ ID NO: 6047 - protein, 2088 aa, synthetic construct
MPAAKRVKLDGGDKKYSIGLDIGTNSVGWAVITDEYKVPSKKFKVLGNTDRHSIKKNLIGALLFDSGETAEATRLKRTARRRYTRRKNRICYLQEIFSNEMAKVDDSFFHRLEESFLVEEDKKHERHPIFGNIVDEVAYHEKYPTIYHLRKKLVDSTDKADLRLIYLALAHMIKFRGHFLIEGDLNPDNSDVDKLFIQLVQTYNQLFEENPINASGVDAKAILSARLSKSRRLENLIAQLPGEKKNGLFGNLIALSLGLTPNFKSNFDLAEDAKLQLSKDTYDDDLDNLLAQIGDQYADLFLAAKNLSDAILLSDILRVNTEITKAPLSASMIKRYDEHHQDLTLLKALVRQQLPEKYKEIFFDQSKNGYAGYIDGGASQEEFYKFIKPILEKMDGTEELLVKLNREDLLRKQRTFDNGSIPHQIHLGELHAILRRQEDFYPFLKDNREKIEKILTFRIPYYVGPLARGNSRFAWMTRKSEETITPWNFEEVVDKGASAQSFIERMTNFDKNLPNEKVLPKHSLLYEYFTVYNELTKVKYVTEGMRKPAFLSGEQKKAIVDLLFKTNRKVTVKQLKEDYFKKIECFDSVEISGVEDRFNASLGTYHDLLKIIKDKDFLDNEENEDILEDIVLTLTLFEDREMIEERLKTYAHLFDDKVMKQLKRRRYTGWGRLSRKLINGIRDKQSGKTILDFLKSDGFANRNFMQLIHDDSLTFKEDIQKAQVSGQGDSLHEHIANLAGSPAIKKGILQTVKVVDELVKVMGRHKPENIVIEMARENQTTQKGQKNSRERMKRIEEGIKELGSQILKEHPVENTQLQNEKLYLYYLQNGRDMYVDQELDINRLSDYDVDHIVPQSFLKDDSIDNKVLTRSDKARGKSDNVPSEEVVKKMKNYWRQLLNAKLITQRKFDNLTKAERGGLSELDKAGFIKRQLVETRQITKHVAQILDSRMNTKYDENDKLIREVKVITLKSKLVSDFRKDFQFYKVREINNYHHAHDAYLNAVVGTALIKKYPKLESEFVYGDYKVYDVRKMIAKSEQEIGKATAKYFFYSNIMNFFKTEITLANGEIRKRPLIETNGETGEIVWDKGRDFATVRKVLSMPQVNIVKKTEVQTGGFSKESILPKRNSDKLIARKKDWDPKKYGGFDSPTVAYSVLVVAKVEKGKSKKLKSVKELLGITIMERSSFEKNPIDFLEAKGYKEVKKDLIIKLPKYSLFELENGRKRMLASAGELQKGNELALPSKYVNFLYLASHYEKLKGSPEDNEQKQLFVEQHKHYLDEIIEQISEFSKRVILADANLDKVLSAYNKHRDKPIREQAENIIHLFTLTNLGAPAAFKYFDTTIDRKRYTSTKEVLDATLIHQSITGLYETRIDLSQLGGDGGGGSGGSGGSGGSGGVPWLTQQPLQLTILVPLQEYQEKILSKTALPEDQKQQLKTLFVKYDNLWQHWENQVGHRKIRPHNIATGDYPPRPQKQYPINPKAKPSIQIVIDDLLKQGVLTPQNSTMNTPVYPVPKPDGRWRMVLDYREVNKTIPLTAAQNQHSAGILATIVRQKYKTTLDLANGFWAHPITPESYWLTAFTWQGKQYCWTRLPQGFLNSPALFTADVVDLLKEIPNVQVYVDDIYLSHDDPKEHVQQLEKVFQILLQAGYVVSLKKSEIGQKTVEFLGFNITKEGRGLTDTFKTKLLNITPPKDLKQLQSILGLLNFARNFIPNFAELVQPLYNLIASAKGKYIEWSEENTKQLNMVIEALNTASNLEERLPEQRLVIKVNTSPSAGYVRYYNETGKKPIMYLNYVFSKAELKFSMLEKLLTTMHKALIKAMDLAMGQEILVYSPIVSMTKIQKTPLPERKALPIRWITWMTYLEDPRIQFHYDKTLPELKHIPDVYTSSQSPVKHPSQYEGVFYTDGSAIKSPDPTKSNNAGMGIVHATYKPEYQVLNQWSIPLGNHTAQMAEIAAVEFACKKALKIPGPVLVITDSFYVAESANKELPYWKSNGFVNNKKKPLKHISKWKSIAECLSMKPDITIQHEKGISLQIPVFILKGNALADKLATQGSYVVNAGKRTADGSEFEKRTADGSEFESPKKKAKVE

SEQ ID NO: 6048 - protein, 2128 aa, synthetic construct
MPAAKRVKLDGGDKKYSIGLDIGTNSVGWAVITDEYKVPSKKFKVLGNTDRHSIKKNLIGALLFDSGETAEATRLKRTARRRYTRRKNRICYLQEIFSNEMAKVDDSFFHRLEESFLVEEDKKHERHPIFGNIVDEVAYHEKYPTIYHLRKKLVDSTDKADLRLIYLALAHMIKFRGHFLIEGDLNPDNSDVDKLFIQLVQTYNQLFEENPINASGVDAKAILSARLSKSRRLENLIAQLPGEKKNGLFGNLIALSLGLTPNFKSNFDLAEDAKLQLSKDTYDDDLDNLLAQIGDQYADLFLAAKNLSDAILLSDILRVNTEITKAPLSASMIKRYDEHHQDLTLLKALVRQQLPEKYKEIFFDQSKNGYAGYIDGGASQEEFYKFIKPILEKMDGTEELLVKLNREDLLRKQRTFDNGSIPHQIHLGELHAILRRQEDFYPFLKDNREKIEKILTFRIPYYVGPLARGNSRFAWMTRKSEETITPWNFEEVVDKGASAQSFIERMTNFDKNLPNEKVLPKHSLLYEYFTVYNELTKVKYVTEGMRKPAFLSGEQKKAIVDLLFKTNRKVTVKQLKEDYFKKIECFDSVEISGVEDRFNASLGTYHDLLKIIKDKDFLDNEENEDILEDIVLTLTLFEDREMIEERLKTYAHLFDDKVMKQLKRRRYTGWGRLSRKLINGIRDKQSGKTILDFLKSDGFANRNFMQLIHDDSLTFKEDIQKAQVSGQGDSLHEHIANLAGSPAIKKGILQTVKVVDELVKVMGRHKPENIVIEMARENQTTQKGQKNSRERMKRIEEGIKELGSQILKEHPVENTQLQNEKLYLYYLQNGRDMYVDQELDINRLSDYDVDHIVPQSFLKDDSIDNKVLTRSDKARGKSDNVPSEEVVKKMKNYWRQLLNAKLITQRKFDNLTKAERGGLSELDKAGFIKRQLVETRQITKHVAQILDSRMNTKYDENDKLIREVKVITLKSKLVSDFRKDFQFYKVREINNYHHAHDAYLNAVVGTALIKKYPKLESEFVYGDYKVYDVRKMIAKSEQEIGKATAKYFFYSNIMNFFKTEITLANGEIRKRPLIETNGETGEIVWDKGRDFATVRKVLSMPQVNIVKKTEVQTGGFSKESILPKRNSDKLIARKKDWDPKKYGGFDSPTVAYSVLVVAKVEKGKSKKLKSVKELLGITIMERSSFEKNPIDFLEAKGYKEVKKDLIIKLPKYSLFELENGRKRMLASAGELQKGNELALPSKYVNFLYLASHYEKLKGSPEDNEQKQLFVEQHKHYLDEIIEQISEFSKRVILADANLDKVLSAYNKHRDKPIREQAENIIHLFTLTNLGAPAAFKYFDTTIDRKRYTSTKEVLDATLIHQSITGLYETRIDLSQLGGDGGGGSGGSGGSGGSGGLLGRDLLTKLKAQIQFSTEGPQVTWEDRPAMCLVLNLEEEYRLHEKPVPPSIDPSWLQLFPMVWAEKAGMGLANQVPPVVVELKSDASPVAVRQYPMSKEAREGIRPHIQRFLDLGILVPCQSPWNTPLLPVKKPGTNDYRPVQDLREVNKRVQDIHPTVPNPYNLLSSLPPSHTWYSVLDLKDAFFCLKLHPNSQPLFAFEWRDPEKGNTGQLTWTRLPQGFKNSPTLFNEALHRDLASFRALNPQVVMLQYVDDLLVAAPTYRDCKEGTRRLLQELSKLGYRVSAKKAQLCREEVTYLGYLLKGGKRWLTPARKATVMKIPTPTTPRQVREFLGTAGFCRLWIPGFASLAAPLYPLTRPKVPFTWTEAHQEAFGRIKEALLSAPALALPDLTKPFALYVDEKEGVARGVLTQTLGPWRRPVAYLSKKLDPVASGWPTCLKAIAAVALLLKDADKLTLGQNVLVIAPHNLESIVRQPPDRWMTNARMTHYQSLLLNERVSFAPPAILNPATLLPVESDDTPIHICSEILAEETGTRPDLRDQPLPGVPAWYTDGSSFIMDGRRQAGAAIVDNKRTVWASNLPEGTSAQKAELIALTQALRLAEGKSINIYTDSRYAFATAHVHGAIYKQRGWLTSAGKDIKNKEEILALLEAIHLPKRVAIIHCPGHQRGTDPVATGNRKADEAAKQAAQSTRILTETTKNAGKRTADGSEFEKRTADGSEFESPKKKAKVE

SEQ ID NO: 6049 - protein, 2219 aa, synthetic construct
MPAAKRVKLDGGDKKYSIGLDIGTNSVGWAVITDEYKVPSKKFKVLGNTDRHSIKKNLIGALLFDSGETAEATRLKRTARRRYTRRKNRICYLQEIFSNEMAKVDDSFFHRLEESFLVEEDKKHERHPIFGNIVDEVAYHEKYPTIYHLRKKLVDSTDKADLRLIYLALAHMIKFRGHFLIEGDLNPDNSDVDKLFIQLVQTYNQLFEENPINASGVDAKAILSARLSKSRRLENLIAQLPGEKKNGLFGNLIALSLGLTPNFKSNFDLAEDAKLQLSKDTYDDDLDNLLAQIGDQYADLFLAAKNLSDAILLSDILRVNTEITKAPLSASMIKRYDEHHQDLTLLKALVRQQLPEKYKEIFFDQSKNGYAGYIDGGASQEEFYKFIKPILEKMDGTEELLVKLNREDLLRKQRTFDNGSIPHQIHLGELHAILRRQEDFYPFLKDNREKIEKILTFRIPYYVGPLARGNSRFAWMTRKSEETITPWNFEEVVDKGASAQSFIERMTNFDKNLPNEKVLPKHSLLYEYFTVYNELTKVKYVTEGMRKPAFLSGEQKKAIVDLLFKTNRKVTVKQLKEDYFKKIECFDSVEISGVEDRFNASLGTYHDLLKIIKDKDFLDNEENEDILEDIVLTLTLFEDREMIEERLKTYAHLFDDKVMKQLKRRRYTGWGRLSRKLINGIRDKQSGKTILDFLKSDGFANRNFMQLIHDDSLTFKEDIQKAQVSGQGDSLHEHIANLAGSPAIKKGILQTVKVVDELVKVMGRHKPENIVIEMARENQTTQKGQKNSRERMKRIEEGIKELGSQILKEHPVENTQLQNEKLYLYYLQNGRDMYVDQELDINRLSDYDVDHIVPQSFLKDDSIDNKVLTRSDKARGKSDNVPSEEVVKKMKNYWRQLLNAKLITQRKFDNLTKAERGGLSELDKAGFIKRQLVETRQITKHVAQILDSRMNTKYDENDKLIREVKVITLKSKLVSDFRKDFQFYKVREINNYHHAHDAYLNAVVGTALIKKYPKLESEFVYGDYKVYDVRKMIAKSEQEIGKATAKYFFYSNIMNFFKTEITLANGEIRKRPLIETNGETGEIVWDKGRDFATVRKVLSMPQVNIVKKTEVQTGGFSKESILPKRNSDKLIARKKDWDPKKYGGFDSPTVAYSVLVVAKVEKGKSKKLKSVKELLGITIMERSSFEKNPIDFLEAKGYKEVKKDLIIKLPKYSLFELENGRKRMLASAGELQKGNELALPSKYVNFLYLASHYEKLKGSPEDNEQKQLFVEQHKHYLDEIIEQISEFSKRVILADANLDKVLSAYNKHRDKPIREQAENIIHLFTLTNLGAPAAFKYFDTTIDRKRYTSTKEVLDATLIHQSITGLYETRIDLSQLGGDGGGGSGGSGGSGGSGGTLGDQGSRGSDPLPEPRVTLTVEGIPTEFLVNTGAEHSVLTKPMGKMGSKRTVVAGATGSKVYPWTTKRLLKIGQKQVTHSFLVIPECPAPLLGRDLLTKLKAQIQFSTEGPQVTWEDRPAMCLVLNLEEEYRLHEKPVPPSIDPSWLQLFPMVWAEKAGMGLANQVPPVVVELKSDASPVAVRQYPMSKEAREGIRPHIQRFLDLGILVPCQSPWNTPLLPVKKPGTNDYRPVQDLREVNKRVQDIHPTVPNPYNLLSSLPPSHTWYSVLDLKDAFFCLKLHPNSQPLFAFEWRDPEKGNTGQLTWTRLPQGFKNSPTLFNEALHRDLASFRALNPQVVMLQYVDDLLVAAPTYRDCKEGTRRLLQELSKLGYRVSAKKAQLCREEVTYLGYLLKGGKRWLTPARKATVMKIPTPTTPRQVREFLGKAGFCRLFIPGFASLAAPLYPLTRPKVPFTWTEAHQEAFGRIKEALLSAPALALPDLTKPFALYVDEKEGVARGVLTQTLGPWRRPVAYLSKKLDPVASGWPTCLKAIAAVALLLKDADKLTLGQNVLVIAPHNLESIVRQPPDRWMTNARMTHYQSLLLNERVSFAPPAILNPATLLPVESDDTPIHICSEILAEETGTRPDLRDQPLPGVPAWYTDGSSFIMDGRRQAGAAIVDNKRTVWASNLPEGTSAQKAELIALTQALRLAEGKSINIYTDSRYAFATAHVHGAIYKQRGWLTSAGKDIKNKEEILALLEAIHLPKRVAIIHCPGHQRGTDPVATGNRKADEAAKQAAQSTRILTETTKNAGKRTADGSEFEKRTADGSEFESPKKKAKVE

SEQ ID NO: 6050 - protein, 2097 aa, synthetic construct
MPAAKRVKLDGGDKKYSIGLDIGTNSVGWAVITDEYKVPSKKFKVLGNTDRHSIKKNLIGALLFDSGETAEATRLKRTARRRYTRRKNRICYLQEIFSNEMAKVDDSFFHRLEESFLVEEDKKHERHPIFGNIVDEVAYHEKYPTIYHLRKKLVDSTDKADLRLIYLALAHMIKFRGHFLIEGDLNPDNSDVDKLFIQLVQTYNQLFEENPINASGVDAKAILSARLSKSRRLENLIAQLPGEKKNGLFGNLIALSLGLTPNFKSNFDLAEDAKLQLSKDTYDDDLDNLLAQIGDQYADLFLAAKNLSDAILLSDILRVNTEITKAPLSASMIKRYDEHHQDLTLLKALVRQQLPEKYKEIFFDQSKNGYAGYIDGGASQEEFYKFIKPILEKMDGTEELLVKLNREDLLRKQRTFDNGSIPHQIHLGELHAILRRQEDFYPFLKDNREKIEKILTFRIPYYVGPLARGNSRFAWMTRKSEETITPWNFEEVVDKGASAQSFIERMTNFDKNLPNEKVLPKHSLLYEYFTVYNELTKVKYVTEGMRKPAFLSGEQKKAIVDLLFKTNRKVTVKQLKEDYFKKIECFDSVEISGVEDRFNASLGTYHDLLKIIKDKDFLDNEENEDILEDIVLTLTLFEDREMIEERLKTYAHLFDDKVMKQLKRRRYTGWGRLSRKLINGIRDKQSGKTILDFLKSDGFANRNFMQLIHDDSLTFKEDIQKAQVSGQGDSLHEHIANLAGSPAIKKGILQTVKVVDELVKVMGRHKPENIVIEMARENQTTQKGQKNSRERMKRIEEGIKELGSQILKEHPVENTQLQNEKLYLYYLQNGRDMYVDQELDINRLSDYDVDHIVPQSFLKDDSIDNKVLTRSDKARGKSDNVPSEEVVKKMKNYWRQLLNAKLITQRKFDNLTKAERGGLSELDKAGFIKRQLVETRQITKHVAQILDSRMNTKYDENDKLIREVKVITLKSKLVSDFRKDFQFYKVREINNYHHAHDAYLNAVVGTALIKKYPKLESEFVYGDYKVYDVRKMIAKSEQEIGKATAKYFFYSNIMNFFKTEITLANGEIRKRPLIETNGETGEIVWDKGRDFATVRKVLSMPQVNIVKKTEVQTGGFSKESILPKRNSDKLIARKKDWDPKKYGGFDSPTVAYSVLVVAKVEKGKSKKLKSVKELLGITIMERSSFEKNPIDFLEAKGYKEVKKDLIIKLPKYSLFELENGRKRMLASAGELQKGNELALPSKYVNFLYLASHYEKLKGSPEDNEQKQLFVEQHKHYLDEIIEQISEFSKRVILADANLDKVLSAYNKHRDKPIREQAENIIHLFTLTNLGAPAAFKYFDTTIDRKRYTSTKEVLDATLIHQSITGLYETRIDLSQLGGDGGGGSGGSGGSGGSGGTLNIEDEYRLHETSKGPDVPLGSTWLSDFPQAWAETGGMGLAVRQAPLIIPLKATSTPVSIKQYPMSQEARLGIKPHIQRLLDQGILVPCQSPWNTPLLPVKKPGTNDYRPVQDLREVNKRVEDIHPTVPNPYNLLSGLPPSHQWYTVLDLKDAFFCLRLHPTSQSLFAFEWRDPEMGISGQLTWTRLPQGFKNSPTLFNEALHRDLADFRIQHPDLILLQYVDDLLLAATSELDCQQGTRALLQTLGDLGYRASAKKAQICQKQVKYLGYLLKEGQRWLTEARKETVMGQPTPKTPRQLREFLGTAGFCRLWIPGFAEMAAPLYPLTKPGTLFEWGPDQQKAYQEIKQALLTAPALGLPDLTKPFELFVDEKQGYAKGVLTQKLGPWRRPVAYLSKKLDPVAAGWPPCLRMVAAIAVLTKDAGKLTMGQPLVILAPHAVEALVKQPPDRWLSNARMTHYQALLLDTDRVQFGPIVALNPATLLPLPEEGLQHDCLDILAEAHGTRPDLTDQPLPDADHTWYTDGSSFLQEGQRKAGAAVTTETEVVWAKALPAGTSAQRAELIALTQALKMAEGKKLNVYTDSRYAFATAHIHGEIYRRRGWLTSEGKEIKNKDEILALLKALFLPKRLSIIHCPGHQKGNRAEARGNRMADQAAREVATRETPETSTLLAGKRTADGSEFEKRTADGSEFESPKKKAKVE

SEQ ID NO: 6051 - protein, 2088 aa, synthetic construct
MPAAKRVKLDGGDKKYSIGLDIGTNSVGWAVITDEYKVPSKKFKVLGNTDRHSIKKNLIGALLFDSGETAEATRLKRTARRRYTRRKNRICYLQEIFSNEMAKVDDSFFHRLEESFLVEEDKKHERHPIFGNIVDEVAYHEKYPTIYHLRKKLVDSTDKADLRLIYLALAHMIKFRGHFLIEGDLNPDNSDVDKLFIQLVQTYNQLFEENPINASGVDAKAILSARLSKSRRLENLIAQLPGEKKNGLFGNLIALSLGLTPNFKSNFDLAEDAKLQLSKDTYDDDLDNLLAQIGDQYADLFLAAKNLSDAILLSDILRVNTEITKAPLSASMIKRYDEHHQDLTLLKALVRQQLPEKYKEIFFDQSKNGYAGYIDGGASQEEFYKFIKPILEKMDGTEELLVKLNREDLLRKQRTFDNGSIPHQIHLGELHAILRRQEDFYPFLKDNREKIEKILTFRIPYYVGPLARGNSRFAWMTRKSEETITPWNFEEVVDKGASAQSFIERMTNFDKNLPNEKVLPKHSLLYEYFTVYNELTKVKYVTEGMRKPAFLSGEQKKAIVDLLFKTNRKVTVKQLKEDYFKKIECFDSVEISGVEDRFNASLGTYHDLLKIIKDKDFLDNEENEDILEDIVLTLTLFEDREMIEERLKTYAHLFDDKVMKQLKRRRYTGWGRLSRKLINGIRDKQSGKTILDFLKSDGFANRNFMQLIHDDSLTFKEDIQKAQVSGQGDSLHEHIANLAGSPAIKKGILQTVKVVDELVKVMGRHKPENIVIEMARENQTTQKGQKNSRERMKRIEEGIKELGSQILKEHPVENTQLQNEKLYLYYLQNGRDMYVDQELDINRLSDYDVDHIVPQSFLKDDSIDNKVLTRSDKARGKSDNVPSEEVVKKMKNYWRQLLNAKLITQRKFDNLTKAERGGLSELDKAGFIKRQLVETRQITKHVAQILDSRMNTKYDENDKLIREVKVITLKSKLVSDFRKDFQFYKVREINNYHHAHDAYLNAVVGTALIKKYPKLESEFVYGDYKVYDVRKMIAKSEQEIGKATAKYFFYSNIMNFFKTEITLANGEIRKRPLIETNGETGEIVWDKGRDFATVRKVLSMPQVNIVKKTEVQTGGFSKESILPKRNSDKLIARKKDWDPKKYGGFDSPTVAYSVLVVAKVEKGKSKKLKSVKELLGITIMERSSFEKNPIDFLEAKGYKEVKKDLIIKLPKYSLFELENGRKRMLASAGELQKGNELALPSKYVNFLYLASHYEKLKGSPEDNEQKQLFVEQHKHYLDEIIEQISEFSKRVILADANLDKVLSAYNKHRDKPIREQAENIIHLFTLTNLGAPAAFKYFDTTIDRKRYTSTKEVLDATLIHQSITGLYETRIDLSQLGGDGGGGSGGSGGSGGSGGIPWLMKKPLQLTTLVPLQEYEERLLKQTMLTGSYKEKLQSLFLKYDALWQHWENQVGHRRIKPHHIATGTVNPRPQKQYPINPKAKASIQTVINDLLKQGVLIQQNSIMNTPVYPVPKPDGKWRMVLDYREVNKTIPLIAAQNQHSAGILSSIFRGKYKTTLDLSNGFWAHSITPESYWLTAFTWLGQQYCWTRLPQGFLNSPALFNADVVDLLKEVPNVQVYVDDIYISHDDPREHLEQLEKVFSLLLNAGYVVSLKKSEIAQHEVEFLGFNITKEGRGLTETFKQKLLNITPPRDLKQLQSILGKLNFARNFIPNFSELVKPLYNIIATAPGKYITWTTDNSQQLQNIISMLNSAENLEERNPEVRLIMKVNTSPSAGYIRFYNEFAKRPIMYLNYVYTKAEVKFTNTEKLLTTIHKGLIKALDLGMGQEILVYSPIVSMTKIQKTPLPERKALPIRWITWMSYLEDPRIQFHYDKTLPELQQVPTVTDDIIAKIKHPSEFSMVFYTDGSAIKHPNVNKSHNAGMGIAQVQFKPEFTVINTWSIPLGDHTAQLAEVAAVEFACKKALKIDGPVLIVTDSFYVAESVNKELPYWQSNGFFNNKKKPLKHVSKWKSIADCIQLKPDIIIIHEKGHQPTASTFHTEGNNLADKLATQGSYVVNAGKRTADGSEFEKRTADGSEFESPKKKAKVE

SEQ ID NO: 6052 - protein, 2177 aa, synthetic construct
MPAAKRVKLDGGDKKYSIGLDIGTNSVGWAVITDEYKVPSKKFKVLGNTDRHSIKKNLIGALLFDSGETAEATRLKRTARRRYTRRKNRICYLQEIFSNEMAKVDDSFFHRLEESFLVEEDKKHERHPIFGNIVDEVAYHEKYPTIYHLRKKLVDSTDKADLRLIYLALAHMIKFRGHFLIEGDLNPDNSDVDKLFIQLVQTYNQLFEENPINASGVDAKAILSARLSKSRRLENLIAQLPGEKKNGLFGNLIALSLGLTPNFKSNFDLAEDAKLQLSKDTYDDDLDNLLAQIGDQYADLFLAAKNLSDAILLSDILRVNTEITKAPLSASMIKRYDEHHQDLTLLKALVRQQLPEKYKEIFFDQSKNGYAGYIDGGASQEEFYKFIKPILEKMDGTEELLVKLNREDLLRKQRTFDNGSIPHQIHLGELHAILRRQEDFYPFLKDNREKIEKILTFRIPYYVGPLARGNSRFAWMTRKSEETITPWNFEEVVDKGASAQSFIERMTNFDKNLPNEKVLPKHSLLYEYFTVYNELTKVKYVTEGMRKPAFLSGEQKKAIVDLLFKTNRKVTVKQLKEDYFKKIECFDSVEISGVEDRFNASLGTYHDLLKIIKDKDFLDNEENEDILEDIVLTLTLFEDREMIEERLKTYAHLFDDKVMKQLKRRRYTGWGRLSRKLINGIRDKQSGKTILDFLKSDGFANRNFMQLIHDDSLTFKEDIQKAQVSGQGDSLHEHIANLAGSPAIKKGILQTVKVVDELVKVMGRHKPENIVIEMARENQTTQKGQKNSRERMKRIEEGIKELGSQILKEHPVENTQLQNEKLYLYYLQNGRDMYVDQELDINRLSDYDVDHIVPQSFLKDDSIDNKVLTRSDKARGKSDNVPSEEVVKKMKNYWRQLLNAKLITQRKFDNLTKAERGGLSELDKAGFIKRQLVETRQITKHVAQILDSRMNTKYDENDKLIREVKVITLKSKLVSDFRKDFQFYKVREINNYHHAHDAYLNAVVGTALIKKYPKLESEFVYGDYKVYDVRKMIAKSEQEIGKATAKYFFYSNIMNFFKTEITLANGEIRKRPLIETNGETGEIVWDKGRDFATVRKVLSMPQVNIVKKTEVQTGGFSKESILPKRNSDKLIARKKDWDPKKYGGFDSPTVAYSVLVVAKVEKGKSKKLKSVKELLGITIMERSSFEKNPIDFLEAKGYKEVKKDLIIKLPKYSLFELENGRKRMLASAGELQKGNELALPSKYVNFLYLASHYEKLKGSPEDNEQKQLFVEQHKHYLDEIIEQISEFSKRVILADANLDKVLSAYNKHRDKPIREQAENIIHLFTLTNLGAPAAFKYFDTTIDRKRYTSTKEVLDATLIHQSITGLYETRIDLSQLGGDGGGGSGGSGGSGGSGGMDPLQLLQPLEAEIKGTKLKAHWNSGATITCVPQAFLEEEVPIKNIWIKTIHGEKEQPVYYLTFKIQGRKVEAEVISSPYDYILVSPSDIPWLMKKPLQLTTLVPLQEYEERLLKQTMLTGSYKEKLQSLFLKYDALWQHWENQVGHRRIKPHHIATGTVNPRPQKQYPINPKAKASIQTVINDLLKQGVLIQQNSIMNTPVYPVPKPDGKWRMVLDYREVNKTIPLIAAQNQHSAGILSSIFRGKYKTTLDLSNGFWAHSITPESYWLTAFTWLGQQYCWTRLPQGFLNSPALFNADVVDLLKEVPNVQVYVDDIYISHDDPREHLEQLEKVFSLLLNAGYVVSLKKSEIAQHEVEFLGFNITKEGRGLTETFKQKLLNITPPRDLKQLQSILGKLNFARNFIPNFSELVKPLYNIIATAPGKYITWTTDNSQQLQNIISMLNSAENLEERNPEVRLIMKVNTSPSAGYIRFYNEFAKRPIMYLNYVYTKAEVKFTNTEKLLTTIHKGLIKALDLGMGQEILVYSPIVSMTKIQKTPLPERKALPIRWITWMSYLEDPRIQFHYDKTLPELQQVPTVTDDIIAKIKHPSEFSMVFYTDGSAIKHPNVNKSHNAGMGIAQVQFKPEFTVINTWSIPLGDHTAQLAEVAAVEFACKKALKIDGPVLIVTDSFYVAESVNKELPYWQSNGFFNNKKKPLKHVSKWKSIADCIQLKPDIIIIHEKGHQPTASTFHTEGNNLADKLATQGSYVVNAGKRTADGSEFEKRTADGSEFESPKKKAKVE

SEQ ID NO: 6053 - protein, 2095 aa, synthetic construct
MPAAKRVKLDGGDKKYSIGLDIGTNSVGWAVITDEYKVPSKKFKVLGNTDRHSIKKNLIGALLFDSGETAEATRLKRTARRRYTRRKNRICYLQEIFSNEMAKVDDSFFHRLEESFLVEEDKKHERHPIFGNIVDEVAYHEKYPTIYHLRKKLVDSTDKADLRLIYLALAHMIKFRGHFLIEGDLNPDNSDVDKLFIQLVQTYNQLFEENPINASGVDAKAILSARLSKSRRLENLIAQLPGEKKNGLFGNLIALSLGLTPNFKSNFDLAEDAKLQLSKDTYDDDLDNLLAQIGDQYADLFLAAKNLSDAILLSDILRVNTEITKAPLSASMIKRYDEHHQDLTLLKALVRQQLPEKYKEIFFDQSKNGYAGYIDGGASQEEFYKFIKPILEKMDGTEELLVKLNREDLLRKQRTFDNGSIPHQIHLGELHAILRRQEDFYPFLKDNREKIEKILTFRIPYYVGPLARGNSRFAWMTRKSEETITPWNFEEVVDKGASAQSFIERMTNFDKNLPNEKVLPKHSLLYEYFTVYNELTKVKYVTEGMRKPAFLSGEQKKAIVDLLFKTNRKVTVKQLKEDYFKKIECFDSVEISGVEDRFNASLGTYHDLLKIIKDKDFLDNEENEDILEDIVLTLTLFEDREMIEERLKTYAHLFDDKVMKQLKRRRYTGWGRLSRKLINGIRDKQSGKTILDFLKSDGFANRNFMQLIHDDSLTFKEDIQKAQVSGQGDSLHEHIANLAGSPAIKKGILQTVKVVDELVKVMGRHKPENIVIEMARENQTTQKGQKNSRERMKRIEEGIKELGSQILKEHPVENTQLQNEKLYLYYLQNGRDMYVDQELDINRLSDYDVDHIVPQSFLKDDSIDNKVLTRSDKARGKSDNVPSEEVVKKMKNYWRQLLNAKLITQRKFDNLTKAERGGLSELDKAGFIKRQLVETRQITKHVAQILDSRMNTKYDENDKLIREVKVITLKSKLVSDFRKDFQFYKVREINNYHHAHDAYLNAVVGTALIKKYPKLESEFVYGDYKVYDVRKMIAKSEQEIGKATAKYFFYSNIMNFFKTEITLANGEIRKRPLIETNGETGEIVWDKGRDFATVRKVLSMPQVNIVKKTEVQTGGFSKESILPKRNSDKLIARKKDWDPKKYGGFDSPTVAYSVLVVAKVEKGKSKKLKSVKELLGITIMERSSFEKNPIDFLEAKGYKEVKKDLIIKLPKYSLFELENGRKRMLASAGELQKGNELALPSKYVNFLYLASHYEKLKGSPEDNEQKQLFVEQHKHYLDEIIEQISEFSKRVILADANLDKVLSAYNKHRDKPIREQAENIIHLFTLTNLGAPAAFKYFDTTIDRKRYTSTKEVLDATLIHQSITGLYETRIDLSQLGGDGGGGSGGSGGSGGSGGVLNLEEEYRLHEKPVPSSIDPSWLQLFPTVWAERAGMGLANQVPPVVVELRSGASPVAVRQYPMSKEAREGIRPHIQRFLDLGVLVPCQSPWNTPLLPVKKPGTNDYRPVQDLREINKRVQDIHPTVPNPYNLLSSLPPSHTWYSVLDLKDAFFCLKLHPNSQPLFAFEWRDPEKGNTGQLTWTRLPQGFKNSPTLFDEALHRDLAPFRALNPQVVLLQYVDDLLVAAPTYRDCKEGTQKLLQELSKLGYRVSAKKAQLCQKEVTYLGYLLKEGKRWLTPARKATVMKIPPPTTPRQVREFLGTAGFCRLWIPGFASLAAPLYPLTKESIPFIWTEEHQKAFDRIKEALLSAPALALPDLTKPFTLYVDERAGVARGVLTQTLGPWRRPVAYLSKKLDPVASGWPTCLKAVAAVALLLKDADKLTLGQNVTVIASHSLESIVRQPPDRWMTNARMTHYQSLLLNERVSFAPPAVLNPATLLPVESEATPVHRCSEILAEETGTRRDLKDQPLPGVPAWYTDGSSFIAEGKRRAGAAIVDGKRTVWASSLPEGTSAQKAELVALTQALRLAEGKDINIYTDSRYAFATAHIHGAIYKQRGLLTSAGKDIKNKEEILALLEAIHLPKRVAIIHCPGHQKGNDPVATGNRRADEAAKQAALSTRVLAETTKPAGKRTADGSEFEKRTADGSEFESPKKKAKVE

SEQ ID NO: 6054 - protein, 2097 aa, synthetic construct
MPAAKRVKLDGGDKKYSIGLDIGTNSVGWAVITDEYKVPSKKFKVLGNTDRHSIKKNLIGALLFDSGETAEATRLKRTARRRYTRRKNRICYLQEIFSNEMAKVDDSFFHRLEESFLVEEDKKHERHPIFGNIVDEVAYHEKYPTIYHLRKKLVDSTDKADLRLIYLALAHMIKFRGHFLIEGDLNPDNSDVDKLFIQLVQTYNQLFEENPINASGVDAKAILSARLSKSRRLENLIAQLPGEKKNGLFGNLIALSLGLTPNFKSNFDLAEDAKLQLSKDTYDDDLDNLLAQIGDQYADLFLAAKNLSDAILLSDILRVNTEITKAPLSASMIKRYDEHHQDLTLLKALVRQQLPEKYKEIFFDQSKNGYAGYIDGGASQEEFYKFIKPILEKMDGTEELLVKLNREDLLRKQRTFDNGSIPHQIHLGELHAILRRQEDFYPFLKDNREKIEKILTFRIPYYVGPLARGNSRFAWMTRKSEETITPWNFEEVVDKGASAQSFIERMTNFDKNLPNEKVLPKHSLLYEYFTVYNELTKVKYVTEGMRKPAFLSGEQKKAIVDLLFKTNRKVTVKQLKEDYFKKIECFDSVEISGVEDRFNASLGTYHDLLKIIKDKDFLDNEENEDILEDIVLTLTLFEDREMIEERLKTYAHLFDDKVMKQLKRRRYTGWGRLSRKLINGIRDKQSGKTILDFLKSDGFANRNFMQLIHDDSLTFKEDIQKAQVSGQGDSLHEHIANLAGSPAIKKGILQTVKVVDELVKVMGRHKPENIVIEMARENQTTQKGQKNSRERMKRIEEGIKELGSQILKEHPVENTQLQNEKLYLYYLQNGRDMYVDQELDINRLSDYDVDHIVPQSFLKDDSIDNKVLTRSDKARGKSDNVPSEEVVKKMKNYWRQLLNAKLITQRKFDNLTKAERGGLSELDKAGFIKRQLVETRQITKHVAQILDSRMNTKYDENDKLIREVKVITLKSKLVSDFRKDFQFYKVREINNYHHAHDAYLNAVVGTALIKKYPKLESEFVYGDYKVYDVRKMIAKSEQEIGKATAKYFFYSNIMNFFKTEITLANGEIRKRPLIETNGETGEIVWDKGRDFATVRKVLSMPQVNIVKKTEVQTGGFSKESILPKRNSDKLIARKKDWDPKKYGGFDSPTVAYSVLVVAKVEKGKSKKLKSVKELLGITIMERSSFEKNPIDFLEAKGYKEVKKDLIIKLPKYSLFELENGRKRMLASAGELQKGNELALPSKYVNFLYLASHYEKLKGSPEDNEQKQLFVEQHKHYLDEIIEQISEFSKRVILADANLDKVLSAYNKHRDKPIREQAENIIHLFTLTNLGAPAAFKYFDTTIDRKRYTSTKEVLDATLIHQSITGLYETRIDLSQLGGDGGGGSGGSGGSGGSGGTLNIEDEYRLHETSKEPDVPLGSTWLSDFPQAWAETGGMGLAVRQAPLIIPLKATSTPVSIKQYPMSQEARLGIKPHIQRLLDQGILVPCQSPWNTPLLPVKKPGTNDYRPVQDLREVNKRVEDIHPTVPNPYNLLSGLPPSHQWYTVLDLKDAFFCLRLHPTSQPLFAFEWRDPEMGISGQLTWTRLPQGFKNSPTLFNEALHRDLADFRIQHPDLILLQYVDDLLLAATSEQDCQRGTRALLQTLGNLGYRASAKKAQICQKQVKYLGYLLKEGQRWLTEARKETVMGQPTPKTPRQLREFLGTAGFCRLWIPGFAEMAAPLYPLTKPGTLFNWGPDQQKAYQEIKQALLTAPALGLPDLTKPFELFVDEKQGYAKGVLTQKLGPWRRPVAYLSKKLDPVAAGWPPCLRMVAAIAVLTKDAGKLTMGQPLVILAPHAVEALVKQPPDRWLSNARMTHYQAMLLDTDRVQFGPVVALNPATLLPLPEKEAPHDCLEILAETHGTRPDLTDQPIPDADYTWYTDGSSFLQEGQRRAGAAVTTETEVIWARALPAGTSAQRAELIALTQALKMAEGKKLNVYTDSRYAFATAHVHGEIYRRRGWLTSEGREIKNKNEILALLKALFLPKRLSIIHCPGHQKGNSAEARGNRMADQAAREAAMKAVLETSTLLAGKRTADGSEFEKRTADGSEFESPKKKAKVE

SEQ ID NO: 6055 - protein, 2005 aa, synthetic construct
MPAAKRVKLDGGDKKYSIGLDIGTNSVGWAVITDEYKVPSKKFKVLGNTDRHSIKKNLIGALLFDSGETAEATRLKRTARRRYTRRKNRICYLQEIFSNEMAKVDDSFFHRLEESFLVEEDKKHERHPIFGNIVDEVAYHEKYPTIYHLRKKLVDSTDKADLRLIYLALAHMIKFRGHFLIEGDLNPDNSDVDKLFIQLVQTYNQLFEENPINASGVDAKAILSARLSKSRRLENLIAQLPGEKKNGLFGNLIALSLGLTPNFKSNFDLAEDAKLQLSKDTYDDDLDNLLAQIGDQYADLFLAAKNLSDAILLSDILRVNTEITKAPLSASMIKRYDEHHQDLTLLKALVRQQLPEKYKEIFFDQSKNGYAGYIDGGASQEEFYKFIKPILEKMDGTEELLVKLNREDLLRKQRTFDNGSIPHQIHLGELHAILRRQEDFYPFLKDNREKIEKILTFRIPYYVGPLARGNSRFAWMTRKSEETITPWNFEEVVDKGASAQSFIERMTNFDKNLPNEKVLPKHSLLYEYFTVYNELTKVKYVTEGMRKPAFLSGEQKKAIVDLLFKTNRKVTVKQLKEDYFKKIECFDSVEISGVEDRFNASLGTYHDLLKIIKDKDFLDNEENEDILEDIVLTLTLFEDREMIEERLKTYAHLFDDKVMKQLKRRRYTGWGRLSRKLINGIRDKQSGKTILDFLKSDGFANRNFMQLIHDDSLTFKEDIQKAQVSGQGDSLHEHIANLAGSPAIKKGILQTVKVVDELVKVMGRHKPENIVIEMARENQTTQKGQKNSRERMKRIEEGIKELGSQILKEHPVENTQLQNEKLYLYYLQNGRDMYVDQELDINRLSDYDVDHIVPQSFLKDDSIDNKVLTRSDKARGKSDNVPSEEVVKKMKNYWRQLLNAKLITQRKFDNLTKAERGGLSELDKAGFIKRQLVETRQITKHVAQILDSRMNTKYDENDKLIREVKVITLKSKLVSDFRKDFQFYKVREINNYHHAHDAYLNAVVGTALIKKYPKLESEFVYGDYKVYDVRKMIAKSEQEIGKATAKYFFYSNIMNFFKTEITLANGEIRKRPLIETNGETGEIVWDKGRDFATVRKVLSMPQVNIVKKTEVQTGGFSKESILPKRNSDKLIARKKDWDPKKYGGFDSPTVAYSVLVVAKVEKGKSKKLKSVKELLGITIMERSSFEKNPIDFLEAKGYKEVKKDLIIKLPKYSLFELENGRKRMLASAGELQKGNELALPSKYVNFLYLASHYEKLKGSPEDNEQKQLFVEQHKHYLDEIIEQISEFSKRVILADANLDKVLSAYNKHRDKPIREQAENIIHLFTLTNLGAPAAFKYFDTTIDRKRYTSTKEVLDATLIHQSITGLYETRIDLSQLGGDGGGGSGGSGGSGGSGGSGGGVLDTPPSHIGLEHLPPPPEVPQFPLNLERLQALQDLVHRSLEAGYISPWDGPGNNPVFPVRKPNGAWRFVHDLRATNALTKPIPALSPGPPDLTAPPTHPPHIICLDLKDAFFQIPVEDRFRFYLSFTLPSPGGLQPHRRFAWRVLPQGFINSPALFQRALQEPLRQVSAAFSQSLLVSYMDDILYASPTEEQRSQCYQALAARLRDLGFQVASEKTSQTPSPVPFLGQMVHEQIVTYQSLPTLQISSPISLHQLQAVLGDLQWVSRGTPTTRRPLQLLYSSLKRHHDPRAIIQLSPEQLQGIAELRQALSHNARSRYNEQEPLLAYVHLTRAGSTLVLFQKGAQFPLAYFQTPLTDNQASPWGLLLLLGCQYLQTQALSSYAKPILKYYHNLPKTSLDNWIQSSEDPRVQELLQLWPQISSQGIQPPGPWKTLITRAEVFLTPQFSPDPIPAALCLFSDGATGRGAYCLWKDHLLDFQAVPAPESAQKGELAGLLAGLAAAPPEPVNIWVDSKYLYSLLRTWVLGAWLQPDPVPSYALLYKSLLRHPAIVVGHVRSHSSASHPIASLNNYVDQLAGKRTADGSEFEKRTADGSEFESPKKKAKVE

SEQ ID NO: 6056 - protein, 2177 aa, synthetic construct
MPAAKRVKLDGGDKKYSIGLDIGTNSVGWAVITDEYKVPSKKFKVLGNTDRHSIKKNLIGALLFDSGETAEATRLKRTARRRYTRRKNRICYLQEIFSNEMAKVDDSFFHRLEESFLVEEDKKHERHPIFGNIVDEVAYHEKYPTIYHLRKKLVDSTDKADLRLIYLALAHMIKFRGHFLIEGDLNPDNSDVDKLFIQLVQTYNQLFEENPINASGVDAKAILSARLSKSRRLENLIAQLPGEKKNGLFGNLIALSLGLTPNFKSNFDLAEDAKLQLSKDTYDDDLDNLLAQIGDQYADLFLAAKNLSDAILLSDILRVNTEITKAPLSASMIKRYDEHHQDLTLLKALVRQQLPEKYKEIFFDQSKNGYAGYIDGGASQEEFYKFIKPILEKMDGTEELLVKLNREDLLRKQRTFDNGSIPHQIHLGELHAILRRQEDFYPFLKDNREKIEKILTFRIPYYVGPLARGNSRFAWMTRKSEETITPWNFEEVVDKGASAQSFIERMTNFDKNLPNEKVLPKHSLLYEYFTVYNELTKVKYVTEGMRKPAFLSGEQKKAIVDLLFKTNRKVTVKQLKEDYFKKIECFDSVEISGVEDRFNASLGTYHDLLKIIKDKDFLDNEENEDILEDIVLTLTLFEDREMIEERLKTYAHLFDDKVMKQLKRRRYTGWGRLSRKLINGIRDKQSGKTILDFLKSDGFANRNFMQLIHDDSLTFKEDIQKAQVSGQGDSLHEHIANLAGSPAIKKGILQTVKVVDELVKVMGRHKPENIVIEMARENQTTQKGQKNSRERMKRIEEGIKELGSQILKEHPVENTQLQNEKLYLYYLQNGRDMYVDQELDINRLSDYDVDHIVPQSFLKDDSIDNKVLTRSDKARGKSDNVPSEEVVKKMKNYWRQLLNAKLITQRKFDNLTKAERGGLSELDKAGFIKRQLVETRQITKHVAQILDSRMNTKYDENDKLIREVKVITLKSKLVSDFRKDFQFYKVREINNYHHAHDAYLNAVVGTALIKKYPKLESEFVYGDYKVYDVRKMIAKSEQEIGKATAKYFFYSNIMNFFKTEITLANGEIRKRPLIETNGETGEIVWDKGRDFATVRKVLSMPQVNIVKKTEVQTGGFSKESILPKRNSDKLIARKKDWDPKKYGGFDSPTVAYSVLVVAKVEKGKSKKLKSVKELLGITIMERSSFEKNPIDFLEAKGYKEVKKDLIIKLPKYSLFELENGRKRMLASAGELQKGNELALPSKYVNFLYLASHYEKLKGSPEDNEQKQLFVEQHKHYLDEIIEQISEFSKRVILADANLDKVLSAYNKHRDKPIREQAENIIHLFTLTNLGAPAAFKYFDTTIDRKRYTSTKEVLDATLIHQSITGLYETRIDLSQLGGDGGGGSGGSGGSGGSGGSGGMDLLKPLTVERKGVKIKGYWNSQADITCVPKDLLQGEEPVRQQNVTTIHGTQEGDVYYVNLKIDGRRINTEVIGTTLDYAIITPGDVPWILKKPLELTIKLDLEEQQGTLLNNSILSKKGKEELKQLFEKYSALWQSWENQVGHRRIRPHKIATGTVKPTPQKQYHINPKAKPDIQIVINDLLKQGVLIQKESTMNTPVYPVPKPNGRWRMVLDYRAVNKVTPLIAVQNQHSYGILGSLFKGRYKTTIDLSNGFWAHPIVPEDYWITAFTWQGKQYCWTVLPQGFLNSPGLFTGDVVDLLQGIPNVEVYVDDVYISHDSEKEHLEYLDILFNRLKEAGYIISLKKSNIANSIVDFLGFQITNEGRGLTDTFKEKLENITAPTTLKQLQSILGLLNFARNFIPDFTELIAPLYALIPKSTKNYVPWQIEHSTTLETLITKLNGAEYLQGRKGDKTLIMKVNASYTTGYIRYYNEGEKKPISYVSIVFSKTELKFTELEKLLTTVHKGLLKALDLSMGQNIHVYSPIVSMQNIQKTPQTAKKALASRWLSWLSYLEDPRIRFFYDPQMPALKDLPAVDTGKDNKKHPSNFQHIFYTDGSAITSPTKEGHLNAGMGIVYFINKDGNLQKQQEWSISLGNHTAQFAEIAAFEFALKKCLPLGGNILVVTDSNYVAKAYNEELDVWASNGFVNNRKKPLKHISKWKSVADLKRLRPDVVVTHEPGHQKLDSSPHAYGNNLADQLATQASFKVHAGKRTADGSEFEKRTADGSEFESPKKKAKVE

SEQ ID NO: 6057 - protein, 2177 aa, synthetic construct
MPAAKRVKLDGGDKKYSIGLDIGTNSVGWAVITDEYKVPSKKFKVLGNTDRHSIKKNLIGALLFDSGETAEATRLKRTARRRYTRRKNRICYLQEIFSNEMAKVDDSFFHRLEESFLVEEDKKHERHPIFGNIVDEVAYHEKYPTIYHLRKKLVDSTDKADLRLIYLALAHMIKFRGHFLIEGDLNPDNSDVDKLFIQLVQTYNQLFEENPINASGVDAKAILSARLSKSRRLENLIAQLPGEKKNGLFGNLIALSLGLTPNFKSNFDLAEDAKLQLSKDTYDDDLDNLLAQIGDQYADLFLAAKNLSDAILLSDILRVNTEITKAPLSASMIKRYDEHHQDLTLLKALVRQQLPEKYKEIFFDQSKNGYAGYIDGGASQEEFYKFIKPILEKMDGTEELLVKLNREDLLRKQRTFDNGSIPHQIHLGELHAILRRQEDFYPFLKDNREKIEKILTFRIPYYVGPLARGNSRFAWMTRKSEETITPWNFEEVVDKGASAQSFIERMTNFDKNLPNEKVLPKHSLLYEYFTVYNELTKVKYVTEGMRKPAFLSGEQKKAIVDLLFKTNRKVTVKQLKEDYFKKIECFDSVEISGVEDRFNASLGTYHDLLKIIKDKDFLDNEENEDILEDIVLTLTLFEDREMIEERLKTYAHLFDDKVMKQLKRRRYTGWGRLSRKLINGIRDKQSGKTILDFLKSDGFANRNFMQLIHDDSLTFKEDIQKAQVSGQGDSLHEHIANLAGSPAIKKGILQTVKVVDELVKVMGRHKPENIVIEMARENQTTQKGQKNSRERMKRIEEGIKELGSQILKEHPVENTQLQNEKLYLYYLQNGRDMYVDQELDINRLSDYDVDHIVPQSFLKDDSIDNKVLTRSDKARGKSDNVPSEEVVKKMKNYWRQLLNAKLITQRKFDNLTKAERGGLSELDKAGFIKRQLVETRQITKHVAQILDSRMNTKYDENDKLIREVKVITLKSKLVSDFRKDFQFYKVREINNYHHAHDAYLNAVVGTALIKKYPKLESEFVYGDYKVYDVRKMIAKSEQEIGKATAKYFFYSNIMNFFKTEITLANGEIRKRPLIETNGETGEIVWDKGRDFATVRKVLSMPQVNIVKKTEVQTGGFSKESILPKRNSDKLIARKKDWDPKKYGGFDSPTVAYSVLVVAKVEKGKSKKLKSVKELLGITIMERSSFEKNPIDFLEAKGYKEVKKDLIIKLPKYSLFELENGRKRMLASAGELQKGNELALPSKYVNFLYLASHYEKLKGSPEDNEQKQLFVEQHKHYLDEIIEQISEFSKRVILADANLDKVLSAYNKHRDKPIREQAENIIHLFTLTNLGAPAAFKYFDTTIDRKRYTSTKEVLDATLIHQSITGLYETRIDLSQLGGDGGGGSGGSGGSGGSGGSGGMDLLKPLTVERKGVKIKGYWNSQADITCVPKDLLQGEEPVRQQNVTTIHGTQEGDVYYVNLKIDGRRINTEVIGTTLDYAIITPGDVPWILKKPLELTIKLDLEEQQGTLLNNSILSKKGKEELKQLFEKYSALWQSWENQVGHRRIRPHKIATGTVKPTPQKQYHINPKAKPDIQIVINDLLKQGVLIQKESTMNTPVYPVPKPNGRWRMVLDYRAVNKVTPLIAVQNQHSYGILGSLFKGRYKTTIDLSNGFWAHPIVPEDYWITAFTWQGKQYCWTVLPQGFLNSPGLFNGDVVDLLQGIPNVEVYVDDVYISHDSEKEHLEYLDILFNRLKEAGYIISLKKSNIANSIVDFLGFQITNEGRGLTDTFKEKLENITAPTTLKQLQSILGLLNFARNFIPDFTELIAPLYALIPKSPKNYVPWQIEHSTTLETLITKLNGAEYLQGRKGDKTLIMKVNASYTTGYIRYYNEGEKKPISYVSIVFSKTELKFTELEKLLTTVHKGLLKALDLSMGQNIHVYSPIVSMQNIQKTPQTAKKALASRWLSWLSYLEDPRIRFFYDPQMPALKDLPAVDTGKDNKKHPSNFQHIFYTDGSAITSPTKEGHLNAGMGIVYFINKDGNLQKQQEWSISLGNHTAQFAEIAAFEFALKKCLPLGGNILVVTDSNYVAKAYNEELDVWASNGFVNNRKKPLKHISKWKSVADLKRLRPDVVVTHEPGHQKLDSSPHAYGNNLADQLATQASFKVHAGKRTADGSEFEKRTADGSEFESPKKKAKVE

SEQ ID NO: 6058 - protein, 2099 aa, synthetic construct
MPAAKRVKLDGGDKKYSIGLDIGTNSVGWAVITDEYKVPSKKFKVLGNTDRHSIKKNLIGALLFDSGETAEATRLKRTARRRYTRRKNRICYLQEIFSNEMAKVDDSFFHRLEESFLVEEDKKHERHPIFGNIVDEVAYHEKYPTIYHLRKKLVDSTDKADLRLIYLALAHMIKFRGHFLIEGDLNPDNSDVDKLFIQLVQTYNQLFEENPINASGVDAKAILSARLSKSRRLENLIAQLPGEKKNGLFGNLIALSLGLTPNFKSNFDLAEDAKLQLSKDTYDDDLDNLLAQIGDQYADLFLAAKNLSDAILLSDILRVNTEITKAPLSASMIKRYDEHHQDLTLLKALVRQQLPEKYKEIFFDQSKNGYAGYIDGGASQEEFYKFIKPILEKMDGTEELLVKLNREDLLRKQRTFDNGSIPHQIHLGELHAILRRQEDFYPFLKDNREKIEKILTFRIPYYVGPLARGNSRFAWMTRKSEETITPWNFEEVVDKGASAQSFIERMTNFDKNLPNEKVLPKHSLLYEYFTVYNELTKVKYVTEGMRKPAFLSGEQKKAIVDLLFKTNRKVTVKQLKEDYFKKIECFDSVEISGVEDRFNASLGTYHDLLKIIKDKDFLDNEENEDILEDIVLTLTLFEDREMIEERLKTYAHLFDDKVMKQLKRRRYTGWGRLSRKLINGIRDKQSGKTILDFLKSDGFANRNFMQLIHDDSLTFKEDIQKAQVSGQGDSLHEHIANLAGSPAIKKGILQTVKVVDELVKVMGRHKPENIVIEMARENQTTQKGQKNSRERMKRIEEGIKELGSQILKEHPVENTQLQNEKLYLYYLQNGRDMYVDQELDINRLSDYDVDHIVPQSFLKDDSIDNKVLTRSDKARGKSDNVPSEEVVKKMKNYWRQLLNAKLITQRKFDNLTKAERGGLSELDKAGFIKRQLVETRQITKHVAQILDSRMNTKYDENDKLIREVKVITLKSKLVSDFRKDFQFYKVREINNYHHAHDAYLNAVVGTALIKKYPKLESEFVYGDYKVYDVRKMIAKSEQEIGKATAKYFFYSNIMNFFKTEITLANGEIRKRPLIETNGETGEIVWDKGRDFATVRKVLSMPQVNIVKKTEVQTGGFSKESILPKRNSDKLIARKKDWDPKKYGGFDSPTVAYSVLVVAKVEKGKSKKLKSVKELLGITIMERSSFEKNPIDFLEAKGYKEVKKDLIIKLPKYSLFELENGRKRMLASAGELQKGNELALPSKYVNFLYLASHYEKLKGSPEDNEQKQLFVEQHKHYLDEIIEQISEFSKRVILADANLDKVLSAYNKHRDKPIREQAENIIHLFTLTNLGAPAAFKYFDTTIDRKRYTSTKEVLDATLIHQSITGLYETRIDLSQLGGDGGGGSGGSGGSGGSGGSGGTLQLEEEYRLFEPESTQKQEMDIWLKNFPQAWAETGGMGTAHCQAPVLIQLKATATPISIRQYPMPHEAYQGIKPHIRRMLDQGILKPCQSPWNTPLLPVKKPGTEDYRPVQDLREVNKRVEDIHPTVPNPYNLLSTLPPSHPWYTVLDLKDAFFCLRLHSESQLLFAFEWRDPEIGLSGQLTWTRLPQGFKNSPTLFNEALHSDLADFRVRYPALVLLQYVDDLLLAAATRTECLEGTKALLETLGNKGYRASAKKAQICLQEVTYLGYSLKDGQRWLTKARKEAILSIPVPKNSRQVREFLGTAGYCRLWIPGFAELAAPLYPLTRPGTLFQWGTEQQLAFEDIKKALLSSPALGLPDITKPFELFIDENSGFAKGVLVQKLGPWKRPVAYLSKKLDTVASGWPPCLRMVAAIAILVKDAGKLTLGQPLTILTSHPVEALVRQPPNKWLSNARMTHYQAMLLDAERVHFGPTVSLNPATLLPLPSGGNHHDCLQILAETHGTRPDLTDQPLPDADLTWYTDGSSFIRNGEREAGAAVTTESEVIWAAPLPPGTSAQRAELIALTQALKMAEGKKLTVYTDSRYAFATTHVHGEIYRRRGWLTSEGKEIKNKNEILALLEALFLPKRLSIIHCPGHQKGDSPQAKGNRLADDTAKKAATETHSSLTVLPAGKRTADGSEFEKRTADGSEFESPKKKAKVE

SEQ ID NO: 6059 - protein, 2099 aa, synthetic construct
MPAAKRVKLDGGDKKYSIGLDIGTNSVGWAVITDEYKVPSKKFKVLGNTDRHSIKKNLIGALLFDSGETAEATRLKRTARRRYTRRKNRICYLQEIFSNEMAKVDDSFFHRLEESFLVEEDKKHERHPIFGNIVDEVAYHEKYPTIYHLRKKLVDSTDKADLRLIYLALAHMIKFRGHFLIEGDLNPDNSDVDKLFIQLVQTYNQLFEENPINASGVDAKAILSARLSKSRRLENLIAQLPGEKKNGLFGNLIALSLGLTPNFKSNFDLAEDAKLQLSKDTYDDDLDNLLAQIGDQYADLFLAAKNLSDAILLSDILRVNTEITKAPLSASMIKRYDEHHQDLTLLKALVRQQLPEKYKEIFFDQSKNGYAGYIDGGASQEEFYKFIKPILEKMDGTEELLVKLNREDLLRKQRTFDNGSIPHQIHLGELHAILRRQEDFYPFLKDNREKIEKILTFRIPYYVGPLARGNSRFAWMTRKSEETITPWNFEEVVDKGASAQSFIERMTNFDKNLPNEKVLPKHSLLYEYFTVYNELTKVKYVTEGMRKPAFLSGEQKKAIVDLLFKTNRKVTVKQLKEDYFKKIECFDSVEISGVEDRFNASLGTYHDLLKIIKDKDFLDNEENEDILEDIVLTLTLFEDREMIEERLKTYAHLFDDKVMKQLKRRRYTGWGRLSRKLINGIRDKQSGKTILDFLKSDGFANRNFMQLIHDDSLTFKEDIQKAQVSGQGDSLHEHIANLAGSPAIKKGILQTVKVVDELVKVMGRHKPENIVIEMARENQTTQKGQKNSRERMKRIEEGIKELGSQILKEHPVENTQLQNEKLYLYYLQNGRDMYVDQELDINRLSDYDVDHIVPQSFLKDDSIDNKVLTRSDKARGKSDNVPSEEVVKKMKNYWRQLLNAKLITQRKFDNLTKAERGGLSELDKAGFIKRQLVETRQITKHVAQILDSRMNTKYDENDKLIREVKVITLKSKLVSDFRKDFQFYKVREINNYHHAHDAYLNAVVGTALIKKYPKLESEFVYGDYKVYDVRKMIAKSEQEIGKATAKYFFYSNIMNFFKTEITLANGEIRKRPLIETNGETGEIVWDKGRDFATVRKVLSMPQVNIVKKTEVQTGGFSKESILPKRNSDKLIARKKDWDPKKYGGFDSPTVAYSVLVVAKVEKGKSKKLKSVKELLGITIMERSSFEKNPIDFLEAKGYKEVKKDLIIKLPKYSLFELENGRKRMLASAGELQKGNELALPSKYVNFLYLASHYEKLKGSPEDNEQKQLFVEQHKHYLDEIIEQISEFSKRVILADANLDKVLSAYNKHRDKPIREQAENIIHLFTLTNLGAPAAFKYFDTTIDRKRYTSTKEVLDATLIHQSITGLYETRIDLSQLGGDGGGGSGGSGGSGGSGGSGGTLQLEEEYRLFEPESTQKQEMDIWLKNFPQAWAETGGMGTAHCQAPVLIQLKATATPISIRQYPMPHEAYQGIKPHIRRMLDQGILKPCQSPWNTPLLPVKKPGTEDYRPVQDLREVNKRVEDIHPTVPNPYNLLSTLPPSHPWYTVLDLKDAFFCLRLHSESQLLFAFEWRDPEIGLSGQLTWTRLPQGFKNSPTLFNEALHSDLADFRVRYPALVLLQYVDDLLLAAATRTECLEGTKALLETLGNKGYRASAKKAQICLQEVTYLGYSLKDGQRWLTKARKEAILSIPVPKNSRQVREFLGKAGYCRLFIPGFAELAAPLYPLTRPGTLFQWGTEQQLAFEDIKKALLSSPALGLPDITKPFELFIDENSGFAKGVLVQKLGPWKRPVAYLSKKLDTVASGWPPCLRMVAAIAILVKDAGKLTLGQPLTILTSHPVEALVRQPPNKWLSNARMTHYQAMLLDAERVHFGPTVSLNPATLLPLPSGGNHHDCLQILAETHGTRPDLTDQPLPDADLTWYTDGSSFIRNGEREAGAAVTTESEVIWAAPLPPGTSAQRAELIALTQALKMAEGKKLTVYTDSRYAFATTHVHGEIYRRRGWLTSEGKEIKNKNEILALLEALFLPKRLSIIHCPGHQKGDSPQAKGNRLADDTAKKAATETHSSLTVLPAGKRTADGSEFEKRTADGSEFESPKKKAKVE

SEQ ID NO: 6060 - protein, 2180 aa, synthetic construct
MPAAKRVKLDGGDKKYSIGLDIGTNSVGWAVITDEYKVPSKKFKVLGNTDRHSIKKNLIGALLFDSGETAEATRLKRTARRRYTRRKNRICYLQEIFSNEMAKVDDSFFHRLEESFLVEEDKKHERHPIFGNIVDEVAYHEKYPTIYHLRKKLVDSTDKADLRLIYLALAHMIKFRGHFLIEGDLNPDNSDVDKLFIQLVQTYNQLFEENPINASGVDAKAILSARLSKSRRLENLIAQLPGEKKNGLFGNLIALSLGLTPNFKSNFDLAEDAKLQLSKDTYDDDLDNLLAQIGDQYADLFLAAKNLSDAILLSDILRVNTEITKAPLSASMIKRYDEHHQDLTLLKALVRQQLPEKYKEIFFDQSKNGYAGYIDGGASQEEFYKFIKPILEKMDGTEELLVKLNREDLLRKQRTFDNGSIPHQIHLGELHAILRRQEDFYPFLKDNREKIEKILTFRIPYYVGPLARGNSRFAWMTRKSEETITPWNFEEVVDKGASAQSFIERMTNFDKNLPNEKVLPKHSLLYEYFTVYNELTKVKYVTEGMRKPAFLSGEQKKAIVDLLFKTNRKVTVKQLKEDYFKKIECFDSVEISGVEDRFNASLGTYHDLLKIIKDKDFLDNEENEDILEDIVLTLTLFEDREMIEERLKTYAHLFDDKVMKQLKRRRYTGWGRLSRKLINGIRDKQSGKTILDFLKSDGFANRNFMQLIHDDSLTFKEDIQKAQVSGQGDSLHEHIANLAGSPAIKKGILQTVKVVDELVKVMGRHKPENIVIEMARENQTTQKGQKNSRERMKRIEEGIKELGSQILKEHPVENTQLQNEKLYLYYLQNGRDMYVDQELDINRLSDYDVDHIVPQSFLKDDSIDNKVLTRSDKARGKSDNVPSEEVVKKMKNYWRQLLNAKLITQRKFDNLTKAERGGLSELDKAGFIKRQLVETRQITKHVAQILDSRMNTKYDENDKLIREVKVITLKSKLVSDFRKDFQFYKVREINNYHHAHDAYLNAVVGTALIKKYPKLESEFVYGDYKVYDVRKMIAKSEQEIGKATAKYFFYSNIMNFFKTEITLANGEIRKRPLIETNGETGEIVWDKGRDFATVRKVLSMPQVNIVKKTEVQTGGFSKESILPKRNSDKLIARKKDWDPKKYGGFDSPTVAYSVLVVAKVEKGKSKKLKSVKELLGITIMERSSFEKNPIDFLEAKGYKEVKKDLIIKLPKYSLFELENGRKRMLASAGELQKGNELALPSKYVNFLYLASHYEKLKGSPEDNEQKQLFVEQHKHYLDEIIEQISEFSKRVILADANLDKVLSAYNKHRDKPIREQAENIIHLFTLTNLGAPAAFKYFDTTIDRKRYTSTKEVLDATLIHQSITGLYETRIDLSQLGGDGGGGSGGSGGSGGSGGSGGMNPLQLLQPLPAEIKGTKLLAHWNSGATITCIPESFLEDEQPIKKTLIKTIHGEKQQNVYYVTFKVKGRKVEAEVIASPYEYILLSPTDVPWLTQQPLQLTILVPLQEYQEKILSKTALPEDQKQQLKTLFVKYDNLWQHWENQVGHRKIRPHNIATGDYPPRPQKQYPINPKAKPSIQIVIDDLLKQGVLTPQNSTMNTPVYPVPKPDGRWRMVLDYREVNKTIPLTAAQNQHSAGILATIVRQKYKTTLDLANGFWAHPITPESYWLTAFTWQGKQYCWTRLPQGFLNSPALFNADVVDLLKEIPNVQVYVDDIYLSHDDPKEHVQQLEKVFQILLQAGYVVSLKKSEIGQKTVEFLGFNITKEGRGLTDTFKTKLLNITPPKDLKQLQSILGKLNFARNFIPNFAELVQPLYNLIAPAKGKYIEWSEENTKQLNMVIEALNTASNLEERLPEQRLVIKVNTSPSAGYVRYYNETGKKPIMYLNYVFSKAELKFSMLEKLLTTMHKALIKAMDLAMGQEILVYSPIVSMTKIQKTPLPERKALPIRWITWMTYLEDPRIQFHYDKTLPELKHIPDVYTSSQSPVKHPSQYEGVFYTDGSAIKSPDPTKSNNAGMGIVHATYKPEYQVLNQWSIPLGNHTAQMAEIAAVEFACKKALKIPGPVLVITDSFYVAESANKELPYWKSNGFVNNKKKPLKHISKWKSIAECLSMKPDITIQHEKGISLQIPVFILKGNALADKLATQGSYVVNAGKRTADGSEFEKRTADGSEFESPKKKAKVE

SEQ ID NO: 6061 - protein, 2098 aa, synthetic construct
MPAAKRVKLDGGDKKYSIGLDIGTNSVGWAVITDEYKVPSKKFKVLGNTDRHSIKKNLIGALLFDSGETAEATRLKRTARRRYTRRKNRICYLQEIFSNEMAKVDDSFFHRLEESFLVEEDKKHERHPIFGNIVDEVAYHEKYPTIYHLRKKLVDSTDKADLRLIYLALAHMIKFRGHFLIEGDLNPDNSDVDKLFIQLVQTYNQLFEENPINASGVDAKAILSARLSKSRRLENLIAQLPGEKKNGLFGNLIALSLGLTPNFKSNFDLAEDAKLQLSKDTYDDDLDNLLAQIGDQYADLFLAAKNLSDAILLSDILRVNTEITKAPLSASMIKRYDEHHQDLTLLKALVRQQLPEKYKEIFFDQSKNGYAGYIDGGASQEEFYKFIKPILEKMDGTEELLVKLNREDLLRKQRTFDNGSIPHQIHLGELHAILRRQEDFYPFLKDNREKIEKILTFRIPYYVGPLARGNSRFAWMTRKSEETITPWNFEEVVDKGASAQSFIERMTNFDKNLPNEKVLPKHSLLYEYFTVYNELTKVKYVTEGMRKPAFLSGEQKKAIVDLLFKTNRKVTVKQLKEDYFKKIECFDSVEISGVEDRFNASLGTYHDLLKIIKDKDFLDNEENEDILEDIVLTLTLFEDREMIEERLKTYAHLFDDKVMKQLKRRRYTGWGRLSRKLINGIRDKQSGKTILDFLKSDGFANRNFMQLIHDDSLTFKEDIQKAQVSGQGDSLHEHIANLAGSPAIKKGILQTVKVVDELVKVMGRHKPENIVIEMARENQTTQKGQKNSRERMKRIEEGIKELGSQILKEHPVENTQLQNEKLYLYYLQNGRDMYVDQELDINRLSDYDVDHIVPQSFLKDDSIDNKVLTRSDKARGKSDNVPSEEVVKKMKNYWRQLLNAKLITQRKFDNLTKAERGGLSELDKAGFIKRQLVETRQITKHVAQILDSRMNTKYDENDKLIREVKVITLKSKLVSDFRKDFQFYKVREINNYHHAHDAYLNAVVGTALIKKYPKLESEFVYGDYKVYDVRKMIAKSEQEIGKATAKYFFYSNIMNFFKTEITLANGEIRKRPLIETNGETGEIVWDKGRDFATVRKVLSMPQVNIVKKTEVQTGGFSKESILPKRNSDKLIARKKDWDPKKYGGFDSPTVAYSVLVVAKVEKGKSKKLKSVKELLGITIMERSSFEKNPIDFLEAKGYKEVKKDLIIKLPKYSLFELENGRKRMLASAGELQKGNELALPSKYVNFLYLASHYEKLKGSPEDNEQKQLFVEQHKHYLDEIIEQISEFSKRVILADANLDKVLSAYNKHRDKPIREQAENIIHLFTLTNLGAPAAFKYFDTTIDRKRYTSTKEVLDATLIHQSITGLYETRIDLSQLGGDGGGGSGGSGGSGGSGGSGGVLNLEEEYRLHEKPVPSSIDPSWLQLFPTVWAERAGMGLANQVPPVVVELRSGASPVAVRQYPMSKEAREGIRPHIQKFLDLGVLVPCRSPWNTPLLPVKKPGTNDYRPVQDLREINKRVQDIHPTVPNPYNLLSSLPPSYTWYSVLDLKDAFFCLRLHPNSQPLFAFEWKDPEKGNTGQLTWTRLPQGFKNSPTLFNEALHRDLAPFRALNPQVVLLQYVDDLLVAAPTYEDCKKGTQKLLQELSKLGYRVSAKKAQLCQREVTYLGYLLKEGKRWLTPARKATVMKIPVPTTPRQVREFLGKAGFCRLFIPGFASLAAPLYPLTKPSIPFIWTEEHQQAFDHIKKALLSAPALALPDLTKPFTLYIDERAGVARGVLTQTLGPWRRPVAYLSKKLDPVASGWPTCLKAVAAVALLLKDADKLTLGQNVTVIASHSLESIVRQPPDRWMTNARMTHYQSLLLNERVSFAPPAVLNPATLLPVESEATPVHRCSEILAEETGTRRDLEDQPLPGVPTWYTDGSSFITEGKRRAGAPIVDGKRTVWASSLPEGTSAQKAELVALTQALRLAEGKNINIYTDSRYAFATAHIHGAIYKQRGWLTSAGKDIKNKEEILALLEAIHLPRRVAIIHCPGHQRGSNPVATGNRRADEAAKQAALSTRVLAGTTKPAGKRTADGSEFEKRTADGSEFESPKKKAKVE

SEQ ID NO: 6062 - protein, 2010 aa, synthetic construct
MPAAKRVKLDGGDKKYSIGLDIGTNSVGWAVITDEYKVPSKKFKVLGNTDRHSIKKNLIGALLFDSGETAEATRLKRTARRRYTRRKNRICYLQEIFSNEMAKVDDSFFHRLEESFLVEEDKKHERHPIFGNIVDEVAYHEKYPTIYHLRKKLVDSTDKADLRLIYLALAHMIKFRGHFLIEGDLNPDNSDVDKLFIQLVQTYNQLFEENPINASGVDAKAILSARLSKSRRLENLIAQLPGEKKNGLFGNLIALSLGLTPNFKSNFDLAEDAKLQLSKDTYDDDLDNLLAQIGDQYADLFLAAKNLSDAILLSDILRVNTEITKAPLSASMIKRYDEHHQDLTLLKALVRQQLPEKYKEIFFDQSKNGYAGYIDGGASQEEFYKFIKPILEKMDGTEELLVKLNREDLLRKQRTFDNGSIPHQIHLGELHAILRRQEDFYPFLKDNREKIEKILTFRIPYYVGPLARGNSRFAWMTRKSEETITPWNFEEVVDKGASAQSFIERMTNFDKNLPNEKVLPKHSLLYEYFTVYNELTKVKYVTEGMRKPAFLSGEQKKAIVDLLFKTNRKVTVKQLKEDYFKKIECFDSVEISGVEDRFNASLGTYHDLLKIIKDKDFLDNEENEDILEDIVLTLTLFEDREMIEERLKTYAHLFDDKVMKQLKRRRYTGWGRLSRKLINGIRDKQSGKTILDFLKSDGFANRNFMQLIHDDSLTFKEDIQKAQVSGQGDSLHEHIANLAGSPAIKKGILQTVKVVDELVKVMGRHKPENIVIEMARENQTTQKGQKNSRERMKRIEEGIKELGSQILKEHPVENTQLQNEKLYLYYLQNGRDMYVDQELDINRLSDYDVDHIVPQSFLKDDSIDNKVLTRSDKARGKSDNVPSEEVVKKMKNYWRQLLNAKLITQRKFDNLTKAERGGLSELDKAGFIKRQLVETRQITKHVAQILDSRMNTKYDENDKLIREVKVITLKSKLVSDFRKDFQFYKVREINNYHHAHDAYLNAVVGTALIKKYPKLESEFVYGDYKVYDVRKMIAKSEQEIGKATAKYFFYSNIMNFFKTEITLANGEIRKRPLIETNGETGEIVWDKGRDFATVRKVLSMPQVNIVKKTEVQTGGFSKESILPKRNSDKLIARKKDWDPKKYGGFDSPTVAYSVLVVAKVEKGKSKKLKSVKELLGITIMERSSFEKNPIDFLEAKGYKEVKKDLIIKLPKYSLFELENGRKRMLASAGELQKGNELALPSKYVNFLYLASHYEKLKGSPEDNEQKQLFVEQHKHYLDEIIEQISEFSKRVILADANLDKVLSAYNKHRDKPIREQAENIIHLFTLTNLGAPAAFKYFDTTIDRKRYTSTKEVLDATLIHQSITGLYETRIDLSQLGGDGGGGSGGSGGSGGSGGSGGPLGTSDSPVTHADPIDWKSEEPVWVDQWPLTQEKLSAAQQLVQEQLRLGHIEPSTSAWNSPIFVIKKKSGKWRLLQDLRKVNETMMHMGALQPGLPTPSAIPDKSYIIVIDLKDCFYTIPLAPQDCKRFAFSLPSVNFKEPMQRYQWRVLPQGMTNSPTLCQKFVATAIAPVRQRFPQLYLVHYMDDILLAHTDEHLLYQAFSILKQHLSLNGLVIADEKIQTHFPYNYLGFSLYPRVYNTQLVKLQTDHLKTLNDFQKLLGDINWIRPYLKLPTYTLQPLFDILKGDSDPASPRTLSLEGRTALQSIEEAIRQQQITYCDYQRSWGLYILPTPRAPTGVLYQDKPLRWIYLSATPTKHLLPYYELVAKIIAKGRHEAIQYFGMEPPFICVPYALEQQDWLFQFSDNWSIAFANYPGQITHHYPSDKLLQFASSHAFIFPKIVRRQPIPEATLIFTDGSSNGTAALIINHQTYYAQTSFSSAQVVELFAVHQALLTVPTSFNLFTDSSYVVGALQMIETVPIIGTTSPEVLNLFTLIQQVLHCRQHPCFFGHIRAHSTLPGALVQGNHTADVLTKQVFFQSAGKRTADGSEFEKRTADGSEFESPKKKAKVE

SEQ ID NO: 6063 - protein, 2131 aa, synthetic construct
MPAAKRVKLDGGDKKYSIGLDIGTNSVGWAVITDEYKVPSKKFKVLGNTDRHSIKKNLIGALLFDSGETAEATRLKRTARRRYTRRKNRICYLQEIFSNEMAKVDDSFFHRLEESFLVEEDKKHERHPIFGNIVDEVAYHEKYPTIYHLRKKLVDSTDKADLRLIYLALAHMIKFRGHFLIEGDLNPDNSDVDKLFIQLVQTYNQLFEENPINASGVDAKAILSARLSKSRRLENLIAQLPGEKKNGLFGNLIALSLGLTPNFKSNFDLAEDAKLQLSKDTYDDDLDNLLAQIGDQYADLFLAAKNLSDAILLSDILRVNTEITKAPLSASMIKRYDEHHQDLTLLKALVRQQLPEKYKEIFFDQSKNGYAGYIDGGASQEEFYKFIKPILEKMDGTEELLVKLNREDLLRKQRTFDNGSIPHQIHLGELHAILRRQEDFYPFLKDNREKIEKILTFRIPYYVGPLARGNSRFAWMTRKSEETITPWNFEEVVDKGASAQSFIERMTNFDKNLPNEKVLPKHSLLYEYFTVYNELTKVKYVTEGMRKPAFLSGEQKKAIVDLLFKTNRKVTVKQLKEDYFKKIECFDSVEISGVEDRFNASLGTYHDLLKIIKDKDFLDNEENEDILEDIVLTLTLFEDREMIEERLKTYAHLFDDKVMKQLKRRRYTGWGRLSRKLINGIRDKQSGKTILDFLKSDGFANRNFMQLIHDDSLTFKEDIQKAQVSGQGDSLHEHIANLAGSPAIKKGILQTVKVVDELVKVMGRHKPENIVIEMARENQTTQKGQKNSRERMKRIEEGIKELGSQILKEHPVENTQLQNEKLYLYYLQNGRDMYVDQELDINRLSDYDVDHIVPQSFLKDDSIDNKVLTRSDKARGKSDNVPSEEVVKKMKNYWRQLLNAKLITQRKFDNLTKAERGGLSELDKAGFIKRQLVETRQITKHVAQILDSRMNTKYDENDKLIREVKVITLKSKLVSDFRKDFQFYKVREINNYHHAHDAYLNAVVGTALIKKYPKLESEFVYGDYKVYDVRKMIAKSEQEIGKATAKYFFYSNIMNFFKTEITLANGEIRKRPLIETNGETGEIVWDKGRDFATVRKVLSMPQVNIVKKTEVQTGGFSKESILPKRNSDKLIARKKDWDPKKYGGFDSPTVAYSVLVVAKVEKGKSKKLKSVKELLGITIMERSSFEKNPIDFLEAKGYKEVKKDLIIKLPKYSLFELENGRKRMLASAGELQKGNELALPSKYVNFLYLASHYEKLKGSPEDNEQKQLFVEQHKHYLDEIIEQISEFSKRVILADANLDKVLSAYNKHRDKPIREQAENIIHLFTLTNLGAPAAFKYFDTTIDRKRYTSTKEVLDATLIHQSITGLYETRIDLSQLGGDGGGGSGGSGGSGGSGGSGGLLGRDLLTKLKAQIQFSTEGPQVTWEDRPAMCLVLNLEEEYRLHEKPVPPSIDPSWLQLFPMVWAEKAGMGLANQVPPVVVELKSDASPVAVRQYPMSKEAREGIRPHIQRFLDLGILVPCQSPWNTPLLPVKKPGTNDYRPVQDLREVNKRVQDIHPTVPNPYNLLSSLPPSHTWYSVLDLKDAFFCLKLHPNSQPLFAFEWRDPEKGNTGQLTWTRLPQGFKNSPTLFNEALHRDLASFRALNPQVVMLQYVDDLLVAAPTYRDCKEGTRRLLQELSKLGYRVSAKKAQLCREEVTYLGYLLKGGKRWLTPARKATVMKIPTPTTPRQVREFLGTAGFCRLWIPGFASLAAPLYPLTRPKVPFTWTEAHQEAFGRIKEALLSAPALALPDLTKPFALYVDEKEGVARGVLTQTLGPWRRPVAYLSKKLDPVASGWPTCLKAIAAVALLLKDADKLTLGQNVLVIAPHNLESIVRQPPDRWMTNARMTHYQSLLLNERVSFAPPAILNPATLLPVESDDTPIHICSEILAEETGTRPDLRDQPLPGVPAWYTDGSSFIMDGRRQAGAAIVDNKRTVWASNLPEGTSAQKAELIALTQALRLAEGKSINIYTDSRYAFATAHVHGAIYKQRGWLTSAGKDIKNKEEILALLEAIHLPKRVAIIHCPGHQRGTDPVATGNRKADEAAKQAAQSTRILTETTKNAGKRTADGSEFEKRTADGSEFESPKKKAKVE

SEQ ID NO: 6064 - protein, 2222 aa, synthetic construct
MPAAKRVKLDGGDKKYSIGLDIGTNSVGWAVITDEYKVPSKKFKVLGNTDRHSIKKNLIGALLFDSGETAEATRLKRTARRRYTRRKNRICYLQEIFSNEMAKVDDSFFHRLEESFLVEEDKKHERHPIFGNIVDEVAYHEKYPTIYHLRKKLVDSTDKADLRLIYLALAHMIKFRGHFLIEGDLNPDNSDVDKLFIQLVQTYNQLFEENPINASGVDAKAILSARLSKSRRLENLIAQLPGEKKNGLFGNLIALSLGLTPNFKSNFDLAEDAKLQLSKDTYDDDLDNLLAQIGDQYADLFLAAKNLSDAILLSDILRVNTEITKAPLSASMIKRYDEHHQDLTLLKALVRQQLPEKYKEIFFDQSKNGYAGYIDGGASQEEFYKFIKPILEKMDGTEELLVKLNREDLLRKQRTFDNGSIPHQIHLGELHAILRRQEDFYPFLKDNREKIEKILTFRIPYYVGPLARGNSRFAWMTRKSEETITPWNFEEVVDKGASAQSFIERMTNFDKNLPNEKVLPKHSLLYEYFTVYNELTKVKYVTEGMRKPAFLSGEQKKAIVDLLFKTNRKVTVKQLKEDYFKKIECFDSVEISGVEDRFNASLGTYHDLLKIIKDKDFLDNEENEDILEDIVLTLTLFEDREMIEERLKTYAHLFDDKVMKQLKRRRYTGWGRLSRKLINGIRDKQSGKTILDFLKSDGFANRNFMQLIHDDSLTFKEDIQKAQVSGQGDSLHEHIANLAGSPAIKKGILQTVKVVDELVKVMGRHKPENIVIEMARENQTTQKGQKNSRERMKRIEEGIKELGSQILKEHPVENTQLQNEKLYLYYLQNGRDMYVDQELDINRLSDYDVDHIVPQSFLKDDSIDNKVLTRSDKARGKSDNVPSEEVVKKMKNYWRQLLNAKLITQRKFDNLTKAERGGLSELDKAGFIKRQLVETRQITKHVAQILDSRMNTKYDENDKLIREVKVITLKSKLVSDFRKDFQFYKVREINNYHHAHDAYLNAVVGTALIKKYPKLESEFVYGDYKVYDVRKMIAKSEQEIGKATAKYFFYSNIMNFFKTEITLANGEIRKRPLIETNGETGEIVWDKGRDFATVRKVLSMPQVNIVKKTEVQTGGFSKESILPKRNSDKLIARKKDWDPKKYGGFDSPTVAYSVLVVAKVEKGKSKKLKSVKELLGITIMERSSFEKNPIDFLEAKGYKEVKKDLIIKLPKYSLFELENGRKRMLASAGELQKGNELALPSKYVNFLYLASHYEKLKGSPEDNEQKQLFVEQHKHYLDEIIEQISEFSKRVILADANLDKVLSAYNKHRDKPIREQAENIIHLFTLTNLGAPAAFKYFDTTIDRKRYTSTKEVLDATLIHQSITGLYETRIDLSQLGGDGGGGSGGSGGSGGSGGSGGTLGDQGSRGSDPLPEPRVTLTVEGIPTEFLVNTGAEHSVLTKPMGKMGSKRTVVAGATGSKVYPWTTKRLLKIGQKQVTHSFLVIPECPAPLLGRDLLTKLKAQIQFSTEGPQVTWEDRPAMCLVLNLEEEYRLHEKPVPPSIDPSWLQLFPMVWAEKAGMGLANQVPPVVVELKSDASPVAVRQYPMSKEAREGIRPHIQRFLDLGILVPCQSPWNTPLLPVKKPGTNDYRPVQDLREVNKRVQDIHPTVPNPYNLLSSLPPSHTWYSVLDLKDAFFCLKLHPNSQPLFAFEWRDPEKGNTGQLTWTRLPQGFKNSPTLFNEALHRDLASFRALNPQVVMLQYVDDLLVAAPTYRDCKEGTRRLLQELSKLGYRVSAKKAQLCREEVTYLGYLLKGGKRWLTPARKATVMKIPTPTTPRQVREFLGTAGFCRLWIPGFASLAAPLYPLTRPKVPFTWTEAHQEAFGRIKEALLSAPALALPDLTKPFALYVDEKEGVARGVLTQTLGPWRRPVAYLSKKLDPVASGWPTCLKAIAAVALLLKDADKLTLGQNVLVIAPHNLESIVRQPPDRWMTNARMTHYQSLLLNERVSFAPPAILNPATLLPVESDDTPIHICSEILAEETGTRPDLRDQPLPGVPAWYTDGSSFIMDGRRQAGAAIVDNKRTVWASNLPEGTSAQKAELIALTQALRLAEGKSINIYTDSRYAFATAHVHGAIYKQRGWLTSAGKDIKNKEEILALLEAIHLPKRVAIIHCPGHQRGTDPVATGNRKADEAAKQAAQSTRILTETTKNAGKRTADGSEFEKRTADGSEFESPKKKAKVE

SEQ ID NO: 6065 - protein, 2222 aa, synthetic construct
MPAAKRVKLDGGDKKYSIGLDIGTNSVGWAVITDEYKVPSKKFKVLGNTDRHSIKKNLIGALLFDSGETAEATRLKRTARRRYTRRKNRICYLQEIFSNEMAKVDDSFFHRLEESFLVEEDKKHERHPIFGNIVDEVAYHEKYPTIYHLRKKLVDSTDKADLRLIYLALAHMIKFRGHFLIEGDLNPDNSDVDKLFIQLVQTYNQLFEENPINASGVDAKAILSARLSKSRRLENLIAQLPGEKKNGLFGNLIALSLGLTPNFKSNFDLAEDAKLQLSKDTYDDDLDNLLAQIGDQYADLFLAAKNLSDAILLSDILRVNTEITKAPLSASMIKRYDEHHQDLTLLKALVRQQLPEKYKEIFFDQSKNGYAGYIDGGASQEEFYKFIKPILEKMDGTEELLVKLNREDLLRKQRTFDNGSIPHQIHLGELHAILRRQEDFYPFLKDNREKIEKILTFRIPYYVGPLARGNSRFAWMTRKSEETITPWNFEEVVDKGASAQSFIERMTNFDKNLPNEKVLPKHSLLYEYFTVYNELTKVKYVTEGMRKPAFLSGEQKKAIVDLLFKTNRKVTVKQLKEDYFKKIECFDSVEISGVEDRFNASLGTYHDLLKIIKDKDFLDNEENEDILEDIVLTLTLFEDREMIEERLKTYAHLFDDKVMKQLKRRRYTGWGRLSRKLINGIRDKQSGKTILDFLKSDGFANRNFMQLIHDDSLTFKEDIQKAQVSGQGDSLHEHIANLAGSPAIKKGILQTVKVVDELVKVMGRHKPENIVIEMARENQTTQKGQKNSRERMKRIEEGIKELGSQILKEHPVENTQLQNEKLYLYYLQNGRDMYVDQELDINRLSDYDVDHIVPQSFLKDDSIDNKVLTRSDKARGKSDNVPSEEVVKKMKNYWRQLLNAKLITQRKFDNLTKAERGGLSELDKAGFIKRQLVETRQITKHVAQILDSRMNTKYDENDKLIREVKVITLKSKLVSDFRKDFQFYKVREINNYHHAHDAYLNAVVGTALIKKYPKLESEFVYGDYKVYDVRKMIAKSEQEIGKATAKYFFYSNIMNFFKTEITLANGEIRKRPLIETNGETGEIVWDKGRDFATVRKVLSMPQVNIVKKTEVQTGGFSKESILPKRNSDKLIARKKDWDPKKYGGFDSPTVAYSVLVVAKVEKGKSKKLKSVKELLGITIMERSSFEKNPIDFLEAKGYKEVKKDLIIKLPKYSLFELENGRKRMLASAGELQKGNELALPSKYVNFLYLASHYEKLKGSPEDNEQKQLFVEQHKHYLDEIIEQISEFSKRVILADANLDKVLSAYNKHRDKPIREQAENIIHLFTLTNLGAPAAFKYFDTTIDRKRYTSTKEVLDATLIHQSITGLYETRIDLSQLGGDGGGGSGGSGGSGGSGGSGGTLGDQGSRGSDPLPEPRVTLTVEGIPTEFLVNTGAEHSVLTKPMGKMGSKRTVVAGATGSKVYPWTTKRLLKIGQKQVTHSFLVIPECPAPLLGRDLLTKLKAQIQFSTEGPQVTWEDRPAMCLVLNLEEEYRLHEKPVPPSIDPSWLQLFPMVWAEKAGMGLANQVPPVVVELKSDASPVAVRQYPMSKEAREGIRPHIQRFLDLGILVPCQSPWNTPLLPVKKPGTNDYRPVQDLREVNKRVQDIHPTVPNPYNLLSSLPPSHTWYSVLDLKDAFFCLKLHPNSQPLFAFEWRDPEKGNTGQLTWTRLPQGFKNSPTLFNEALHRDLASFRALNPQVVMLQYVDDLLVAAPTYRDCKEGTRRLLQELSKLGYRVSAKKAQLCREEVTYLGYLLKGGKRWLTPARKATVMKIPTPTTPRQVREFLGKAGFCRLFIPGFASLAAPLYPLTRPKVPFTWTEAHQEAFGRIKEALLSAPALALPDLTKPFALYVDEKEGVARGVLTQTLGPWRRPVAYLSKKLDPVASGWPTCLKAIAAVALLLKDADKLTLGQNVLVIAPHNLESIVRQPPDRWMTNARMTHYQSLLLNERVSFAPPAILNPATLLPVESDDTPIHICSEILAEETGTRPDLRDQPLPGVPAWYTDGSSFIMDGRRQAGAAIVDNKRTVWASNLPEGTSAQKAELIALTQALRLAEGKSINIYTDSRYAFATAHVHGAIYKQRGWLTSAGKDIKNKEEILALLEAIHLPKRVAIIHCPGHQRGTDPVATGNRKADEAAKQAAQSTRILTETTKNAGKRTADGSEFEKRTADGSEFESPKKKAKVE

SEQ ID NO: 6066 - protein, 2100 aa, synthetic construct
MPAAKRVKLDGGDKKYSIGLDIGTNSVGWAVITDEYKVPSKKFKVLGNTDRHSIKKNLIGALLFDSGETAEATRLKRTARRRYTRRKNRICYLQEIFSNEMAKVDDSFFHRLEESFLVEEDKKHERHPIFGNIVDEVAYHEKYPTIYHLRKKLVDSTDKADLRLIYLALAHMIKFRGHFLIEGDLNPDNSDVDKLFIQLVQTYNQLFEENPINASGVDAKAILSARLSKSRRLENLIAQLPGEKKNGLFGNLIALSLGLTPNFKSNFDLAEDAKLQLSKDTYDDDLDNLLAQIGDQYADLFLAAKNLSDAILLSDILRVNTEITKAPLSASMIKRYDEHHQDLTLLKALVRQQLPEKYKEIFFDQSKNGYAGYIDGGASQEEFYKFIKPILEKMDGTEELLVKLNREDLLRKQRTFDNGSIPHQIHLGELHAILRRQEDFYPFLKDNREKIEKILTFRIPYYVGPLARGNSRFAWMTRKSEETITPWNFEEVVDKGASAQSFIERMTNFDKNLPNEKVLPKHSLLYEYFTVYNELTKVKYVTEGMRKPAFLSGEQKKAIVDLLFKTNRKVTVKQLKEDYFKKIECFDSVEISGVEDRFNASLGTYHDLLKIIKDKDFLDNEENEDILEDIVLTLTLFEDREMIEERLKTYAHLFDDKVMKQLKRRRYTGWGRLSRKLINGIRDKQSGKTILDFLKSDGFANRNFMQLIHDDSLTFKEDIQKAQVSGQGDSLHEHIANLAGSPAIKKGILQTVKVVDELVKVMGRHKPENIVIEMARENQTTQKGQKNSRERMKRIEEGIKELGSQILKEHPVENTQLQNEKLYLYYLQNGRDMYVDQELDINRLSDYDVDHIVPQSFLKDDSIDNKVLTRSDKARGKSDNVPSEEVVKKMKNYWRQLLNAKLITQRKFDNLTKAERGGLSELDKAGFIKRQLVETRQITKHVAQILDSRMNTKYDENDKLIREVKVITLKSKLVSDFRKDFQFYKVREINNYHHAHDAYLNAVVGTALIKKYPKLESEFVYGDYKVYDVRKMIAKSEQEIGKATAKYFFYSNIMNFFKTEITLANGEIRKRPLIETNGETGEIVWDKGRDFATVRKVLSMPQVNIVKKTEVQTGGFSKESILPKRNSDKLIARKKDWDPKKYGGFDSPTVAYSVLVVAKVEKGKSKKLKSVKELLGITIMERSSFEKNPIDFLEAKGYKEVKKDLIIKLPKYSLFELENGRKRMLASAGELQKGNELALPSKYVNFLYLASHYEKLKGSPEDNEQKQLFVEQHKHYLDEIIEQISEFSKRVILADANLDKVLSAYNKHRDKPIREQAENIIHLFTLTNLGAPAAFKYFDTTIDRKRYTSTKEVLDATLIHQSITGLYETRIDLSQLGGDGGGGSGGSGGSGGSGGSGGTLGIEDEYRLHETSTEPDVSLGSTWLSDFPQAWAETGGMGLAVRQAPLIIPLKATSTPVSIQQYPMSHEARLGIKPHIQRLLDQGILVPCQSPWNTPLLPVKKPGTNDYRPVQDLREVNKRVEDIHPTVPNPYNLLSGLPPSHQWYTVLDLKDAFFCLRLHPTSQPLFAFEWRDPGMGISGQLTWTRLPQGFKNSPTLFNEALHRDLADFRIQHPDLILLQYVDDILLAATSELDCQQGTRALLQTLGDLGYRASAKKAQICQKQVKYLGYLLREGQRWLTEARKETVMGQPVPKTPRQLREFLGTAGFCRLWIPGFAEMAAPLYPLTKPGTLFSWGPDQQKAYQEIKQALLTAPALGLPDLTKPFELFVDEKQGYAKGVLTQKLGPWRRPVAYLSKKLDPVAAGWPPCLRMVAAIAVLTKDAGKLTMGQPLVILAPHAVEALVKQPPDRWLSNARMTHYQAMLLDTDRVQFGPVVALNPATLLPLPEEGAPHDCLEILAETHGTRPDLTDQPIPDADHTWYTDGSSFLQEGQRKAGAAVTTETEVIWAGALPAGTSAQRAELIALTQALKMAEGKRLNVYTDSRYAFATAHIHGEIYRRRGWLTSEGREIKNKSEILALLKALFLPKRLSIIHCLGHQKGDSAEARGNRLADQAAREAAIKTPPDTSTLLAGKRTADGSEFEKRTADGSEFESPKKKAKVE

SEQ ID NO: 6067 - protein, 2100 aa, synthetic construct
MPAAKRVKLDGGDKKYSIGLDIGTNSVGWAVITDEYKVPSKKFKVLGNTDRHSIKKNLIGALLFDSGETAEATRLKRTARRRYTRRKNRICYLQEIFSNEMAKVDDSFFHRLEESFLVEEDKKHERHPIFGNIVDEVAYHEKYPTIYHLRKKLVDSTDKADLRLIYLALAHMIKFRGHFLIEGDLNPDNSDVDKLFIQLVQTYNQLFEENPINASGVDAKAILSARLSKSRRLENLIAQLPGEKKNGLFGNLIALSLGLTPNFKSNFDLAEDAKLQLSKDTYDDDLDNLLAQIGDQYADLFLAAKNLSDAILLSDILRVNTEITKAPLSASMIKRYDEHHQDLTLLKALVRQQLPEKYKEIFFDQSKNGYAGYIDGGASQEEFYKFIKPILEKMDGTEELLVKLNREDLLRKQRTFDNGSIPHQIHLGELHAILRRQEDFYPFLKDNREKIEKILTFRIPYYVGPLARGNSRFAWMTRKSEETITPWNFEEVVDKGASAQSFIERMTNFDKNLPNEKVLPKHSLLYEYFTVYNELTKVKYVTEGMRKPAFLSGEQKKAIVDLLFKTNRKVTVKQLKEDYFKKIECFDSVEISGVEDRFNASLGTYHDLLKIIKDKDFLDNEENEDILEDIVLTLTLFEDREMIEERLKTYAHLFDDKVMKQLKRRRYTGWGRLSRKLINGIRDKQSGKTILDFLKSDGFANRNFMQLIHDDSLTFKEDIQKAQVSGQGDSLHEHIANLAGSPAIKKGILQTVKVVDELVKVMGRHKPENIVIEMARENQTTQKGQKNSRERMKRIEEGIKELGSQILKEHPVENTQLQNEKLYLYYLQNGRDMYVDQELDINRLSDYDVDHIVPQSFLKDDSIDNKVLTRSDKARGKSDNVPSEEVVKKMKNYWRQLLNAKLITQRKFDNLTKAERGGLSELDKAGFIKRQLVETRQITKHVAQILDSRMNTKYDENDKLIREVKVITLKSKLVSDFRKDFQFYKVREINNYHHAHDAYLNAVVGTALIKKYPKLESEFVYGDYKVYDVRKMIAKSEQEIGKATAKYFFYSNIMNFFKTEITLANGEIRKRPLIETNGETGEIVWDKGRDFATVRKVLSMPQVNIVKKTEVQTGGFSKESILPKRNSDKLIARKKDWDPKKYGGFDSPTVAYSVLVVAKVEKGKSKKLKSVKELLGITIMERSSFEKNPIDFLEAKGYKEVKKDLIIKLPKYSLFELENGRKRMLASAGELQKGNELALPSKYVNFLYLASHYEKLKGSPEDNEQKQLFVEQHKHYLDEIIEQISEFSKRVILADANLDKVLSAYNKHRDKPIREQAENIIHLFTLTNLGAPAAFKYFDTTIDRKRYTSTKEVLDATLIHQSITGLYETRIDLSQLGGDGGGGSGGSGGSGGSGGSGGTLNIEDEYRLHETSKEPDVSLGSTWLSDFPQAWAETGGMGLAVRQAPLIIPLKATSTPVSIKQYPMSQEARLGIKPHIQRLLDQGILVPCQSPWNTPLLPVKKPGTNDYRPVQDLREVNKRVEDIHPTVPNPYNLLSGLPPSHQWYTVLDLKDAFFCLRLHPTSQPLFAFEWRDPEMGISGQLTWTRLPQGFKNSPTLFNEALHRDLAGFRIQHPDLILLQYVDDLLLAATSELDCQQGTRALLQTLGDLGYRASAKKAQICQKQVKYLGYLLKEGQRWLTEARKETVMGQPIPKTPRQLREFLGTAGFCRLWIPGFAEMAAPLYPLTKPGTLFNWGPDQQKAFQEIKQALLTAPALGLPDLTKPFELFVDEKQGYAKGVLTQKLGPWRRPVAYLSKKLDPVAAGWPPCLRMVAAIAVLTKDAGKLTMGQPLVILAPHAVEALVKQPPDRWLSNARMTHYQALLLDTDRVQFGPVVALNPATLLPLPEEGLQHDCLDILAEAHGTRSDLMDQPLPDADHTWYTDGSSFLQEGQRKAGAAVTTETEVIWARALPAGTSAQRAELIALTQALKMAEGKKLNVYTDSRYAFATAHIHGEIYRRRGWLTSEGKEIKNKDEILALLKALFLPKRLSIIHCPGHQKGNSAEARGNRMADQAAREVATRETPETSTLLAGKRTADGSEFEKRTADGSEFESPKKKAKVE

SEQ ID NO: 6068 - protein, 2100 aa, synthetic construct
MPAAKRVKLDGGDKKYSIGLDIGTNSVGWAVITDEYKVPSKKFKVLGNTDRHSIKKNLIGALLFDSGETAEATRLKRTARRRYTRRKNRICYLQEIFSNEMAKVDDSFFHRLEESFLVEEDKKHERHPIFGNIVDEVAYHEKYPTIYHLRKKLVDSTDKADLRLIYLALAHMIKFRGHFLIEGDLNPDNSDVDKLFIQLVQTYNQLFEENPINASGVDAKAILSARLSKSRRLENLIAQLPGEKKNGLFGNLIALSLGLTPNFKSNFDLAEDAKLQLSKDTYDDDLDNLLAQIGDQYADLFLAAKNLSDAILLSDILRVNTEITKAPLSASMIKRYDEHHQDLTLLKALVRQQLPEKYKEIFFDQSKNGYAGYIDGGASQEEFYKFIKPILEKMDGTEELLVKLNREDLLRKQRTFDNGSIPHQIHLGELHAILRRQEDFYPFLKDNREKIEKILTFRIPYYVGPLARGNSRFAWMTRKSEETITPWNFEEVVDKGASAQSFIERMTNFDKNLPNEKVLPKHSLLYEYFTVYNELTKVKYVTEGMRKPAFLSGEQKKAIVDLLFKTNRKVTVKQLKEDYFKKIECFDSVEISGVEDRFNASLGTYHDLLKIIKDKDFLDNEENEDILEDIVLTLTLFEDREMIEERLKTYAHLFDDKVMKQLKRRRYTGWGRLSRKLINGIRDKQSGKTILDFLKSDGFANRNFMQLIHDDSLTFKEDIQKAQVSGQGDSLHEHIANLAGSPAIKKGILQTVKVVDELVKVMGRHKPENIVIEMARENQTTQKGQKNSRERMKRIEEGIKELGSQILKEHPVENTQLQNEKLYLYYLQNGRDMYVDQELDINRLSDYDVDHIVPQSFLKDDSIDNKVLTRSDKARGKSDNVPSEEVVKKMKNYWRQLLNAKLITQRKFDNLTKAERGGLSELDKAGFIKRQLVETRQITKHVAQILDSRMNTKYDENDKLIREVKVITLKSKLVSDFRKDFQFYKVREINNYHHAHDAYLNAVVGTALIKKYPKLESEFVYGDYKVYDVRKMIAKSEQEIGKATAKYFFYSNIMNFFKTEITLANGEIRKRPLIETNGETGEIVWDKGRDFATVRKVLSMPQVNIVKKTEVQTGGFSKESILPKRNSDKLIARKKDWDPKKYGGFDSPTVAYSVLVVAKVEKGKSKKLKSVKELLGITIMERSSFEKNPIDFLEAKGYKEVKKDLIIKLPKYSLFELENGRKRMLASAGELQKGNELALPSKYVNFLYLASHYEKLKGSPEDNEQKQLFVEQHKHYLDEIIEQISEFSKRVILADANLDKVLSAYNKHRDKPIREQAENIIHLFTLTNLGAPAAFKYFDTTIDRKRYTSTKEVLDATLIHQSITGLYETRIDLSQLGGDGGGGSGGSGGSGGSGGSGGTLNIEDEHRLHETSKEPDVSLGSTWLSDFPQAWAETGGMGLAVRQAPLIIPLKATSTPVSIKQYPMSQEARLGIKPHIQRLLDQGILVPCQSPWNTPLLPVKKPGTNDYRPVQDLREVNKRVEDIHPTVPNPYNLLSGLPPSHQWYTVLDLKDAFFCLRLHPTSQPLFAFEWRDPEMGISGQLTWTRLPQGFKNSPTLFDEALHRDLADFRIQHPDLILLQYVDDLLLAATSELDCQQGTRALLQTLGNLGYRASAKKAQICQKQVKYLGYLLKEGQRWLTEARKETVMGQPTPKTPRQLREFLGTAGFCRLWIPGFAEMAAPLYPLTKTGTLFNWGPDQQKAYQEIKQALLTAPALGLPDLTKPFELFVDEKQGYAKGVLTQKLGPWRRPVAYLSKKLDPVAAGWPPCLRMVAAIAVLTKDAGKLTMGQPLVILAPHAVEALVKQPPDRWLSNARMTHYQALLLDTDRVQFGPVVALNPATLLPLPEEGLQHNCLDILAEAHGTRPDLTDQPLPDADHTWYTDGSSLLQEGQRKAGAAVTTETEVIWAKALPAGTSAQRAELIALTQALKMAEGKKLNVYTDSRYAFATAHIHGEIYRRRGLLTSEGKEIKNKDEILALLKALFLPKRLSIIHCPGHQKGHSAEARGNRMADQAARKAAITETPDTSTLLAGKRTADGSEFEKRTADGSEFESPKKKAKVE

SEQ ID NO: 6069 - protein, 2094 aa, synthetic construct
MPAAKRVKLDGGDKKYSIGLDIGTNSVGWAVITDEYKVPSKKFKVLGNTDRHSIKKNLIGALLFDSGETAEATRLKRTARRRYTRRKNRICYLQEIFSNEMAKVDDSFFHRLEESFLVEEDKKHERHPIFGNIVDEVAYHEKYPTIYHLRKKLVDSTDKADLRLIYLALAHMIKFRGHFLIEGDLNPDNSDVDKLFIQLVQTYNQLFEENPINASGVDAKAILSARLSKSRRLENLIAQLPGEKKNGLFGNLIALSLGLTPNFKSNFDLAEDAKLQLSKDTYDDDLDNLLAQIGDQYADLFLAAKNLSDAILLSDILRVNTEITKAPLSASMIKRYDEHHQDLTLLKALVRQQLPEKYKEIFFDQSKNGYAGYIDGGASQEEFYKFIKPILEKMDGTEELLVKLNREDLLRKQRTFDNGSIPHQIHLGELHAILRRQEDFYPFLKDNREKIEKILTFRIPYYVGPLARGNSRFAWMTRKSEETITPWNFEEVVDKGASAQSFIERMTNFDKNLPNEKVLPKHSLLYEYFTVYNELTKVKYVTEGMRKPAFLSGEQKKAIVDLLFKTNRKVTVKQLKEDYFKKIECFDSVEISGVEDRFNASLGTYHDLLKIIKDKDFLDNEENEDILEDIVLTLTLFEDREMIEERLKTYAHLFDDKVMKQLKRRRYTGWGRLSRKLINGIRDKQSGKTILDFLKSDGFANRNFMQLIHDDSLTFKEDIQKAQVSGQGDSLHEHIANLAGSPAIKKGILQTVKVVDELVKVMGRHKPENIVIEMARENQTTQKGQKNSRERMKRIEEGIKELGSQILKEHPVENTQLQNEKLYLYYLQNGRDMYVDQELDINRLSDYDVDHIVPQSFLKDDSIDNKVLTRSDKARGKSDNVPSEEVVKKMKNYWRQLLNAKLITQRKFDNLTKAERGGLSELDKAGFIKRQLVETRQITKHVAQILDSRMNTKYDENDKLIREVKVITLKSKLVSDFRKDFQFYKVREINNYHHAHDAYLNAVVGTALIKKYPKLESEFVYGDYKVYDVRKMIAKSEQEIGKATAKYFFYSNIMNFFKTEITLANGEIRKRPLIETNGETGEIVWDKGRDFATVRKVLSMPQVNIVKKTEVQTGGFSKESILPKRNSDKLIARKKDWDPKKYGGFDSPTVAYSVLVVAKVEKGKSKKLKSVKELLGITIMERSSFEKNPIDFLEAKGYKEVKKDLIIKLPKYSLFELENGRKRMLASAGELQKGNELALPSKYVNFLYLASHYEKLKGSPEDNEQKQLFVEQHKHYLDEIIEQISEFSKRVILADANLDKVLSAYNKHRDKPIREQAENIIHLFTLTNLGAPAAFKYFDTTIDRKRYTSTKEVLDATLIHQSITGLYETRIDLSQLGGDGGGGSGGSGGSGGSGGSGGTLQLDDEYRLYSPLVKPDQNIQFWLEQFPQAWAETAGMGLAKQVPPQVIQLKASATPVSVRQYPLSKEAQEGIRPHVQRLIQQGILVPVQSPWNTPLLPVRKPGTNDYRPVQDLREVNKRVQDIHPTVPNPYNLLCALPPQRSWYTVLDLKDAFFCLRLHPTSQPLFAFEWRDPGTGRTGQLTWTRLPQGFKNSPTIFDEALHRDLANFRIQHPQVTLLQYVDDLLLAGATKQDCLEGTKALLLELSDLGYRASAKKAQICRREVTYLGYSLRDGQRWLTEARKKTVVQIPAPTTAKQVREFLGTAGFCRLWIPGFATLAAPLYPLTKEKGEFSWAPEHQKAFDAIKKALLSAPALALPDVTKPFTLYVDERKGVARGVLTQTLGPWRRPVAYLSKKLDPVASGWPVCLKAIAAVAILVKDADKLTLGQNITVIAPHALENIVRQPPDRWMTNARMTHYQSLLLTERVTFAPPAALNPATLLPEETDEPVTHDCHQLLIEETGVRKDLTDIPLTGEVLTWFTDGSSYVVEGKRMAGAAVVDGTRTIWASSLPEGTSAQKAELMALTQALRLAEGKSINIYTDSRYAFATAHVHGAIYKQRGLLTSAGREIKNKEEILSLLEALHLPKRLAIIHCPGHQKAKDPISRGNQMADRVAKQAAQGVNLLAGKRTADGSEFEKRTADGSEFESPKKKAKVE

SEQ ID NO: 6070 - protein, 2094 aa, synthetic construct; identical to SEQ ID NO: 6069

SEQ ID NO: 6071 - protein, 2180 aa, synthetic construct
MPAAKRVKLDGGDKKYSIGLDIGTNSVGWAVITDEYKVPSKKFKVLGNTDRHSIKKNLIGALLFDSGETAEATRLKRTARRRYTRRKNRICYLQEIFSNEMAKVDDSFFHRLEESFLVEEDKKHERHPIFGNIVDEVAYHEKYPTIYHLRKKLVDSTDKADLRLIYLALAHMIKFRGHFLIEGDLNPDNSDVDKLFIQLVQTYNQLFEENPINASGVDAKAILSARLSKSRRLENLIAQLPGEKKNGLFGNLIALSLGLTPNFKSNFDLAEDAKLQLSKDTYDDDLDNLLAQIGDQYADLFLAAKNLSDAILLSDILRVNTEITKAPLSASMIKRYDEHHQDLTLLKALVRQQLPEKYKEIFFDQSKNGYAGYIDGGASQEEFYKFIKPILEKMDGTEELLVKLNREDLLRKQRTFDNGSIPHQIHLGELHAILRRQEDFYPFLKDNREKIEKILTFRIPYYVGPLARGNSRFAWMTRKSEETITPWNFEEVVDKGASAQSFIERMTNFDKNLPNEKVLPKHSLLYEYFTVYNELTKVKYVTEGMRKPAFLSGEQKKAIVDLLFKTNRKVTVKQLKEDYFKKIECFDSVEISGVEDRFNASLGTYHDLLKIIKDKDFLDNEENEDILEDIVLTLTLFEDREMIEERLKTYAHLFDDKVMKQLKRRRYTGWGRLSRKLINGIRDKQSGKTILDFLKSDGFANRNFMQLIHDDSLTFKEDIQKAQVSGQGDSLHEHIANLAGSPAIKKGILQTVKVVDELVKVMGRHKPENIVIEMARENQTTQKGQKNSRERMKRIEEGIKELGSQILKEHPVENTQLQNEKLYLYYLQNGRDMYVDQELDINRLSDYDVDHIVPQSFLKDDSIDNKVLTRSDKARGKSDNVPSEEVVKKMKNYWRQLLNAKLITQRKFDNLTKAERGGLSELDKAGFIKRQLVETRQITKHVAQILDSRMNTKYDENDKLIREVKVITLKSKLVSDFRKDFQFYKVREINNYHHAHDAYLNAVVGTALIKKYPKLESEFVYGDYKVYDVRKMIAKSEQEIGKATAKYFFYSNIMNFFKTEITLANGEIRKRPLIETNGETGEIVWDKGRDFATVRKVLSMPQVNIVKKTEVQTGGFSKESILPKRNSDKLIARKKDWDPKKYGGFDSPTVAYSVLVVAKVEKGKSKKLKSVKELLGITIMERSSFEKNPIDFLEAKGYKEVKKDLIIKLPKYSLFELENGRKRMLASAGELQKGNELALPSKYVNFLYLASHYEKLKGSPEDNEQKQLFVEQHKHYLDEIIEQISEFSKRVILADANLDKVLSAYNKHRDKPIREQAENIIHLFTLTNLGAPAAFKYFDTTIDRKRYTSTKEVLDATLIHQSITGLYETRIDLSQLGGDGGGGSGGSGGSGGSGGSGGMDPLQLLQPLEAEIKGTKLKAHWNSGATITCVPQAFLEEEVPIKNIWIKTIHGEKEQPVYYLTFKIQGRKVEAEVISSPYDYILVSPSDIPWLMKKPLQLTTLVPLQEYEERLLKQTMLTGSYKEKLQSLFLKYDALWQHWENQVGHRRIKPHHIATGTVNPRPQKQYPINPKAKASIQTVINDLLKQGVLIQQNSIMNTPVYPVPKPDGKWRMVLDYREVNKTIPLIAAQNQHSAGILSSIFRGKYKTTLDLSNGFWAHSITPESYWLTAFTWLGQQYCWTRLPQGFLNSPALFNADVVDLLKEVPNVQVYVDDIYISHDDPREHLEQLEKVFSLLLNAGYVVSLKKSEIAQHEVEFLGFNITKEGRGLTETFKQKLLNITPPRDLKQLQSILGLLNFARNFIPNFSELVKPLYNIIATAPGKYITWTTDNSQQLQNIISMLNSAENLEERNPEVRLIMKVNTSPSAGYIRFYNEFAKRPIMYLNYVYTKAEVKFTNTEKLLTTIHKGLIKALDLGMGQEILVYSPIVSMTKIQKTPLPERKALPIRWITWMSYLEDPRIQFHYDKTLPELQQVPTVTDDIIAKIKHPSEFSMVFYTDGSAIKHPNVNKSHNAGMGIAQVQFKPEFTVINTWSIPLGDHTAQLAEVAAVEFACKKALKIDGPVLIVTDSFYVAESVNKELPYWQSNGFFNNKKKPLKHVSKWKSIADCIQLKPDIIIIHEKGHQPTASTFHTEGNNLADKLATQGSYVVNAGKRTADGSEFEKRTADGSEFESPKKKAKVE

SEQ ID NO: 6072 - protein, 2180 aa, synthetic construct
MPAAKRVKLDGGDKKYSIGLDIGTNSVGWAVITDEYKVPSKKFKVLGNTDRHSIKKNLIGALLFDSGETAEATRLKRTARRRYTRRKNRICYLQEIFSNEMAKVDDSFFHRLEESFLVEEDKKHERHPIFGNIVDEVAYHEKYPTIYHLRKKLVDSTDKADLRLIYLALAHMIKFRGHFLIEGDLNPDNSDVDKLFIQLVQTYNQLFEENPINASGVDAKAILSARLSKSRRLENLIAQLPGEKKNGLFGNLIALSLGLTPNFKSNFDLAEDAKLQLSKDTYDDDLDNLLAQIGDQYADLFLAAKNLSDAILLSDILRVNTEITKAPLSASMIKRYDEHHQDLTLLKALVRQQLPEKYKEIFFDQSKNGYAGYIDGGASQEEFYKFIKPILEKMDGTEELLVKLNREDLLRKQRTFDNGSIPHQIHLGELHAILRRQEDFYPFLKDNREKIEKILTFRIPYYVGPLARGNSRFAWMTRKSEETITPWNFEEVVDKGASAQSFIERMTNFDKNLPNEKVLPKHSLLYEYFTVYNELTKVKYVTEGMRKPAFLSGEQKKAIVDLLFKTNRKVTVKQLKEDYFKKIECFDSVEISGVEDRFNASLGTYHDLLKIIKDKDFLDNEENEDILEDIVLTLTLFEDREMIEERLKTYAHLFDDKVMKQLKRRRYTGWGRLSRKLINGIRDKQSGKTILDFLKSDGFANRNFMQLIHDDSLTFKEDIQKAQVSGQGDSLHEHIANLAGSPAIKKGILQTVKVVDELVKVMGRHKPENIVIEMARENQTTQKGQKNSRERMKRIEEGIKELGSQILKEHPVENTQLQNEKLYLYYLQNGRDMYVDQELDINRLSDYDVDHIVPQSFLKDDSIDNKVLTRSDKARGKSDNVPSEEVVKKMKNYWRQLLNAKLITQRKFDNLTKAERGGLSELDKAGFIKRQLVETRQITKHVAQILDSRMNTKYDENDKLIREVKVITLKSKLVSDFRKDFQFYKVREINNYHHAHDAYLNAVVGTALIKKYPKLESEFVYGDYKVYDVRKMIAKSEQEIGKATAKYFFYSNIMNFFKTEITLANGEIRKRPLIETNGETGEIVWDKGRDFATVRKVLSMPQVNIVKKTEVQTGGFSKESILPKRNSDKLIARKKDWDPKKYGGFDSPTVAYSVLVVAKVEKGKSKKLKSVKELLGITIMERSSFEKNPIDFLEAKGYKEVKKDLIIKLPKYSLFELENGRKRMLASAGELQKGNELALPSKYVNFLYLASHYEKLKGSPEDNEQKQLFVEQHKHYLDEIIEQISEFSKRVILADANLDKVLSAYNKHRDKPIREQAENIIHLFTLTNLGAPAAFKYFDTTIDRKRYTSTKEVLDATLIHQSITGLYETRIDLSQLGGDGGGGSGGSGGSGGSGGSGGMDPLQLLQPLEAEIKGTKLKAHWNSGATITCVPQAFLEEEVPIKNIWIKTIHGEKEQPVYYLTFKIQGRKVEAEVISSPYDYILVSPSDIPWLMKKPLQLTTLVPLQEYEERLLKQTMLTGSYKEKLQSLFLKYDALWQHWENQVGHRRIKPHHIATGTVNPRPQKQYPINPKAKASIQTVINDLLKQGVLIQQNSIMNTPVYPVPKPDGKWRMVLDYREVNKTIPLIAAQNQHSAGILSSIFRGKYKTTLDLSNGFWAHSITPESYWLTAFTWLGQQYCWTRLPQGFLNSPALFNADVVDLLKEVPNVQVYVDDIYISHDDPREHLEQLEKVFSLLLNAGYVVSLKKSEIAQHEVEFLGFNITKEGRGLTETFKQKLLNITPPRDLKQLQSILGKLNFARNFIPNFSELVKPLYNIIATAPGKYITWTTDNSQQLQNIISMLNSAENLEERNPEVRLIMKVNTSPSAGYIRFYNEFAKRPIMYLNYVYTKAEVKFTNTEKLLTTIHKGLIKALDLGMGQEILVYSPIVSMTKIQKTPLPERKALPIRWITWMSYLEDPRIQFHYDKTLPELQQVPTVTDDIIAKIKHPSEFSMVFYTDGSAIKHPNVNKSHNAGMGIAQVQFKPEFTVINTWSIPLGDHTAQLAEVAAVEFACKKALKIDGPVLIVTDSFYVAESVNKELPYWQSNGFFNNKKKPLKHVSKWKSIADCIQLKPDIIIIHEKGHQPTASTFHTEGNNLADKLATQGSYVVNAGKRTADGSEFEKRTADGSEFESPKKKAKVE

SEQ ID NO: 6073 - protein, 2098 aa, synthetic construct; identical to SEQ ID NO: 4502

SEQ ID NO: 6074 - protein, 2098 aa, synthetic construct
MPAAKRVKLDGGDKKYSIGLDIGTNSVGWAVITDEYKVPSKKFKVLGNTDRHSIKKNLIGALLFDSGETAEATRLKRTARRRYTRRKNRICYLQEIFSNEMAKVDDSFFHRLEESFLVEEDKKHERHPIFGNIVDEVAYHEKYPTIYHLRKKLVDSTDKADLRLIYLALAHMIKFRGHFLIEGDLNPDNSDVDKLFIQLVQTYNQLFEENPINASGVDAKAILSARLSKSRRLENLIAQLPGEKKNGLFGNLIALSLGLTPNFKSNFDLAEDAKLQLSKDTYDDDLDNLLAQIGDQYADLFLAAKNLSDAILLSDILRVNTEITKAPLSASMIKRYDEHHQDLTLLKALVRQQLPEKYKEIFFDQSKNGYAGYIDGGASQEEFYKFIKPILEKMDGTEELLVKLNREDLLRKQRTFDNGSIPHQIHLGELHAILRRQEDFYPFLKDNREKIEKILTFRIPYYVGPLARGNSRFAWMTRKSEETITPWNFEEVVDKGASAQSFIERMTNFDKNLPNEKVLPKHSLLYEYFTVYNELTKVKYVTEGMRKPAFLSGEQKKAIVDLLFKTNRKVTVKQLKEDYFKKIECFDSVEISGVEDRFNASLGTYHDLLKIIKDKDFLDNEENEDILEDIVLTLTLFEDREMIEERLKTYAHLFDDKVMKQLKRRRYTGWGRLSRKLINGIRDKQSGKTILDFLKSDGFANRNFMQLIHDDSLTFKEDIQKAQVSGQGDSLHEHIANLAGSPAIKKGILQTVKVVDELVKVMGRHKPENIVIEMARENQTTQKGQKNSRERMKRIEEGIKELGSQILKEHPVENTQLQNEKLYLYYLQNGRDMYVDQELDINRLSDYDVDHIVPQSFLKDDSIDNKVLTRSDKARGKSDNVPSEEVVKKMKNYWRQLLNAKLITQRKFDNLTKAERGGLSELDKAGFIKRQLVETRQITKHVAQILDSRMNTKYDENDKLIREVKVITLKSKLVSDFRKDFQFYKVREINNYHHAHDAYLNAVVGTALIKKYPKLESEFVYGDYKVYDVRKMIAKSEQEIGKATAKYFFYSNIMNFFKTEITLANGEIRKRPLIETNGETGEIVWDKGRDFATVRKVLSMPQVNIVKKTEVQTGGFSKESILPKRNSDKLIARKKDWDPKKYGGFDSPTVAYSVLVVAKVEKGKSKKLKSVKELLGITIMERSSFEKNPIDFLEAKGYKEVKKDLIIKLPKYSLFELENGRKRMLASAGELQKGNELALPSKYVNFLYLASHYEKLKGSPEDNEQKQLFVEQHKHYLDEIIEQISEFSKRVILADANLDKVLSAYNKHRDKPIREQAENIIHLFTLTNLGAPAAFKYFDTTIDRKRYTSTKEVLDATLIHQSITGLYETRIDLSQLGGDGGGGSGGSGGSGGSGGSGGVLNLEEEYRLHEKPVPSSIDPSWLQLFPTVWAERAGMGLANQVPPVVVELRSGASPVAVRQYPMSKEAREGIRPHIQRFLDLGVLVPCQSPWNTPLLPVKKPGTNDYRPVQDLREINKRVQDIHPTVPNPYNLLSSLPPSHTWYSVLDLKDAFFCLKLHPNSQPLFAFEWRDPEKGNTGQLTWTRLPQGFKNSPTLFNEALHRDLAPFRALNPQVVLLQYVDDLLVAAPTYRDCKEGTQKLLQELSKLGYRVSAKKAQLCQKEVTYLGYLLKEGKRWLTPARKATVMKIPPPTTPRQVREFLGKAGFCRLFIPGFASLAAPLYPLTKPSIPFIWTEEHQKAFDRIKEALLSAPALALPDLTKPFTLYVDERAGVARGVLTQTLGPWRRPVAYLSKKLDPVASGWPTCLKAVAAVALLLKDADKLTLGQNVTVIASHSLESIVRQPPDRWMTNARMTHYQSLLLNERVSFAPPAVLNPATLLPVESEATPVHRCSEILAEETGTRRDLKDQPLPGVPAWYTDGSSFIAEGKRRAGAAIVDGKRTVWASSLPEGTSAQKAELVALTQALRLAEGKDINIYTDSRYAFATAHIHGAIYKQRGWLTSAGKDIKNKEEILALLEAIHLPKRVAIIHCPGHQKGNDPVATGNRRADEAAKQAALSTRVLAETTKPAGKRTADGSEFEKRTADGSEFESPKKKAKVE

SEQ ID NO: 6075 - protein, 2100 aa, synthetic construct
MPAAKRVKLDGGDKKYSIGLDIGTNSVGWAVITDEYKVPSKKFKVLGNTDRHSIKKNLIGALLFDSGETAEATRLKRTARRRYTRRKNRICYLQEIFSNEMAKVDDSFFHRLEESFLVEEDKKHERHPIFGNIVDEVAYHEKYPTIYHLRKKLVDSTDKADLRLIYLALAHMIKFRGHFLIEGDLNPDNSDVDKLFIQLVQTYNQLFEENPINASGVDAKAILSARLSKSRRLENLIAQLPGEKKNGLFGNLIALSLGLTPNFKSNFDLAEDAKLQLSKDTYDDDLDNLLAQIGDQYADLFLAAKNLSDAILLSDILRVNTEITKAPLSASMIKRYDEHHQDLTLLKALVRQQLPEKYKEIFFDQSKNGYAGYIDGGASQEEFYKFIKPILEKMDGTEELLVKLNREDLLRKQRTFDNGSIPHQIHLGELHAILRRQEDFYPFLKDNREKIEKILTFRIPYYVGPLARGNSRFAWMTRKSEETITPWNFEEVVDKGASAQSFIERMTNFDKNLPNEKVLPKHSLLYEYFTVYNELTKVKYVTEGMRKPAFLSGEQKKAIVDLLFKTNRKVTVKQLKEDYFKKIECFDSVEISGVEDRFNASLGTYHDLLKIIKDKDFLDNEENEDILEDIVLTLTLFEDREMIEERLKTYAHLFDDKVMKQLKRRRYTGWGRLSRKLINGIRDKQSGKTILDFLKSDGFANRNFMQLIHDDSLTFKEDIQKAQVSGQGDSLHEHIANLAGSPAIKKGILQTVKVVDELVKVMGRHKPENIVIEMARENQTTQKGQKNSRERMKRIEEGIKELGSQILKEHPVENTQLQNEKLYLYYLQNGRDMYVDQELDINRLSDYDVDHIVPQSFLKDDSIDNKVLTRSDKARGKSDNVPSEEVVKKMKNYWRQLLNAKLITQRKFDNLTKAERGGLSELDKAGFIKRQLVETRQITKHVAQILDSRMNTKYDENDKLIREVKVITLKSKLVSDFRKDFQFYKVREINNYHHAHDAYLNAVVGTALIKKYPKLESEFVYGDYKVYDVRKMIAKSEQEIGKATAKYFFYSNIMNFFKTEITLANGEIRKRPLIETNGETGEIVWDKGRDFATVRKVLSMPQVNIVKKTEVQTGGFSKESILPKRNSDKLIARKKDWDPKKYGGFDSPTVAYSVLVVAKVEKGKSKKLKSVKELLGITIMERSSFEKNPIDFLEAKGYKEVKKDLIIKLPKYSLFELENGRKRMLASAGELQKGNELALPSKYVNFLYLASHYEKLKGSPEDNEQKQLFVEQHKHYLDEIIEQISEFSKRVILADANLDKVLSAYNKHRDKPIREQAENIIHLFTLTNLGAPAAFKYFDTTIDRKRYTSTKEVLDATLIHQSITGLYETRIDLSQLGGDGGGGSGGSGGSGGSGGSGGTLNIEDEYRLHETSKEPDVPLGSTWLSDFPQAWAETGGMGLAVRQAPLIIPLKATSTPVSIKQYPMSQEARLGIKPHIQRLLDQGILVPCQSPWNTPLLPVKKPGTNDYRPVQDLREVNKRVEDIHPTVPNPYNLLSGLPPSHQWYTVLDLKDAFFCLRLHPTSQPLFAFEWRDPEMGISGQLTWTRLPQGFKNSPTLFNEALHRDLADFRIQHPDLILLQYVDDLLLAATSEQDCQRGTRALLQTLGNLGYRASAKKAQICQKQVKYLGYLLKEGQRWLTEARKETVMGQPTPKTPRQLREFLGKAGFCRLFIPGFAEMAAPLYPLTKPGTLFNWGPDQQKAYQEIKQALLTAPALGLPDLTKPFELFVDEKQGYAKGVLTQKLGPWRRPVAYLSKKLDPVAAGWPPCLRMVAAIAVLTKDAGKLTMGQPLVILAPHAVEALVKQPPDRWLSNARMTHYQAMLLDTDRVQFGPVVALNPATLLPLPEKEAPHDCLEILAETHGTRPDLTDQPIPDADYTWYTDGSSFLQEGQRRAGAAVTTETEVIWARALPAGTSAQRAELIALTQALKMAEGKKLNVYTDSRYAFATAHVHGEIYRRRGWLTSEGREIKNKNEILALLKALFLPKRLSIIHCPGHQKGNSAEARGNRMADQAAREAAMKAVLETSTLLAGKRTADGSEFEKRTADGSEFESPKKKAKVE

SEQ ID NO: 6076 - protein, 2105 aa, synthetic construct
MPAAKRVKLDGGDKKYSIGLDIGTNSVGWAVITDEYKVPSKKFKVLGNTDRHSIKKNLIGALLFDSGETAEATRLKRTARRRYTRRKNRICYLQEIFSNEMAKVDDSFFHRLEESFLVEEDKKHERHPIFGNIVDEVAYHEKYPTIYHLRKKLVDSTDKADLRLIYLALAHMIKFRGHFLIEGDLNPDNSDVDKLFIQLVQTYNQLFEENPINASGVDAKAILSARLSKSRRLENLIAQLPGEKKNGLFGNLIALSLGLTPNFKSNFDLAEDAKLQLSKDTYDDDLDNLLAQIGDQYADLFLAAKNLSDAILLSDILRVNTEITKAPLSASMIKRYDEHHQDLTLLKALVRQQLPEKYKEIFFDQSKNGYAGYIDGGASQEEFYKFIKPILEKMDGTEELLVKLNREDLLRKQRTFDNGSIPHQIHLGELHAILRRQEDFYPFLKDNREKIEKILTFRIPYYVGPLARGNSRFAWMTRKSEETITPWNFEEVVDKGASAQSFIERMTNFDKNLPNEKVLPKHSLLYEYFTVYNELTKVKYVTEGMRKPAFLSGEQKKAIVDLLFKTNRKVTVKQLKEDYFKKIECFDSVEISGVEDRFNASLGTYHDLLKIIKDKDFLDNEENEDILEDIVLTLTLFEDREMIEERLKTYAHLFDDKVMKQLKRRRYTGWGRLSRKLINGIRDKQSGKTILDFLKSDGFANRNFMQLIHDDSLTFKEDIQKAQVSGQGDSLHEHIANLAGSPAIKKGILQTVKVVDELVKVMGRHKPENIVIEMARENQTTQKGQKNSRERMKRIEEGIKELGSQILKEHPVENTQLQNEKLYLYYLQNGRDMYVDQELDINRLSDYDVDHIVPQSFLKDDSIDNKVLTRSDKARGKSDNVPSEEVVKKMKNYWRQLLNAKLITQRKFDNLTKAERGGLSELDKAGFIKRQLVETRQITKHVAQILDSRMNTKYDENDKLIREVKVITLKSKLVSDFRKDFQFYKVREINNYHHAHDAYLNAVVGTALIKKYPKLESEFVYGDYKVYDVRKMIAKSEQEIGKATAKYFFYSNIMNFFKTEITLANGEIRKRPLIETNGETGEIVWDKGRDFATVRKVLSMPQVNIVKKTEVQTGGFSKESILPKRNSDKLIARKKDWDPKKYGGFDSPTVAYSVLVVAKVEKGKSKKLKSVKELLGITIMERSSFEKNPIDFLEAKGYKEVKKDLIIKLPKYSLFELENGRKRMLASAGELQKGNELALPSKYVNFLYLASHYEKLKGSPEDNEQKQLFVEQHKHYLDEIIEQISEFSKRVILADANLDKVLSAYNKHRDKPIREQAENIIHLFTLTNLGAPAAFKYFDTTIDRKRYTSTKEVLDATLIHQSITGLYETRIDLSQLGGDGGGGSGGSGGSGGSGGSGGSGGTAPLEEEYRLFLEAPIQNVTLLEQWKREIPKVWAEINPPGLASTQAPIHVQLLSTALPVRVRQYPITLEAKRSLRETIRKFRAAGILRPVHSPWNTPLLPVRKSGTSEYRMVQDLREVNKRVETIHPTVPNPYTLLSLLPPDRIWYSVLDLKDAFFCIPLAPESQLIFAFEWADAEEGESGQLTWTRLPQGFKNSPTLFDEALNRDLQGFRLDHPSVSLLQYVDDLLIAADTQAACLSATRDLLMTLAELGYRVSGKKAQLCQEEVTYLGFKIHKGSRSLSNSRTQAILQIPVPKTKRQVREFLGTIGYCRLWIPGFAELAQPLYAATRGGNDPLVWGEKEEEAFQSLKLALTQPPALALPSLDKPFQLFVEETSGAAKGVLTQALGPWKRPVAYLSKRLDPVAAGWPRCLRAIAAAALLTREASKLTFGQDIEITSSHNLESLLRSPPDKWLTNARITQYQVLLLDPPRVRFKQTAALNPATLLPETDDTLPIHHCLDTLDSLTSTRPDLTDQPLAQAEATLFTDGSSYIRDGKRYAGAAVVTLDSVIWAEPLPIGTSAQKAELIALTKALEWSKDKSVNIYTDSRYAFATLHVHGMIYRERGLLTAGGKAIKNAPEILALLTAVWLPKRVAVMHCKGHQKDDAPTSTGNRRADEVAREVAIRPLSTQATISAGKRTADGSEFEKRTADGSEFESPKKKAKVE

SEQ ID NO: 6077 - protein, 2105 aa, synthetic construct
MPAAKRVKLDGGDKKYSIGLDIGTNSVGWAVITDEYKVPSKKFKVLGNTDRHSIKKNLIGALLFDSGETAEATRLKRTARRRYTRRKNRICYLQEIFSNEMAKVDDSFFHRLEESFLVEEDKKHERHPIFGNIVDEVAYHEKYPTIYHLRKKLVDSTDKADLRLIYLALAHMIKFRGHFLIEGDLNPDNSDVDKLFIQLVQTYNQLFEENPINASGVDAKAILSARLSKSRRLENLIAQLPGEKKNGLFGNLIALSLGLTPNFKSNFDLAEDAKLQLSKDTYDDDLDNLLAQIGDQYADLFLAAKNLSDAILLSDILRVNTEITKAPLSASMIKRYDEHHQDLTLLKALVRQQLPEKYKEIFFDQSKNGYAGYIDGGASQEEFYKFIKPILEKMDGTEELLVKLNREDLLRKQRTFDNGSIPHQIHLGELHAILRRQEDFYPFLKDNREKIEKILTFRIPYYVGPLARGNSRFAWMTRKSEETITPWNFEEVVDKGASAQSFIERMTNFDKNLPNEKVLPKHSLLYEYFTVYNELTKVKYVTEGMRKPAFLSGEQKKAIVDLLFKTNRKVTVKQLKEDYFKKIECFDSVEISGVEDRFNASLGTYHDLLKIIKDKDFLDNEENEDILEDIVLTLTLFEDREMIEERLKTYAHLFDDKVMKQLKRRRYTGWGRLSRKLINGIRDKQSGKTILDFLKSDGFANRNFMQLIHDDSLTFKEDIQKAQVSGQGDSLHEHIANLAGSPAIKKGILQTVKVVDELVKVMGRHKPENIVIEMARENQTTQKGQKNSRERMKRIEEGIKELGSQILKEHPVENTQLQNEKLYLYYLQNGRDMYVDQELDINRLSDYDVDHIVPQSFLKDDSIDNKVLTRSDKARGKSDNVPSEEVVKKMKNYWRQLLNAKLITQRKFDNLTKAERGGLSELDKAGFIKRQLVETRQITKHVAQILDSRMNTKYDENDKLIREVKVITLKSKLVSDFRKDFQFYKVREINNYHHAHDAYLNAVVGTALIKKYPKLESEFVYGDYKVYDVRKMIAKSEQEIGKATAKYFFYSNIMNFFKTEITLANGEIRKRPLIETNGETGEIVWDKGRDFATVRKVLSMPQVNIVKKTEVQTGGFSKESILPKRNSDKLIARKKDWDPKKYGGFDSPTVAYSVLVVAKVEKGKSKKLKSVKELLGITIMERSSFEKNPIDFLEAKGYKEVKKDLIIKLPKYSLFELENGRKRMLASAGELQKGNELALPSKYVNFLYLASHYEKLKGSPEDNEQKQLFVEQHKHYLDEIIEQISEFSKRVILADANLDKVLSAYNKHRDKPIREQAENIIHLFTLTNLGAPAAFKYFDTTIDRKRYTSTKEVLDATLIHQSITGLYETRIDLSQLGGDGGGGSGGSGGSGGSGGSGGSGGTAPLEEEYRLFLEAPIQNVTLLEQWKREIPKVWAEINPPGLASTQAPIHVQLLSTALPVRVRQYPITLEAKRSLRETIRKFRAAGILRPVHSPWNTPLLPVRKSGTSEYRMVQDLREVNKRVETIHPTVPNPYTLLSLLPPDRIWYSVLDLKDAFFCIPLAPESQLIFAFEWADAEEGESGQLTWTRLPQGFKNSPTLFNEALNRDLQGFRLDHPSVSLLQYVDDLLIAADTQAACLSATRDLLMTLAELGYRVSGKKAQLCQEEVTYLGFKIHKGSRSLSNSRTQAILQIPVPKTKRQVREFLGTIGYCRLWIPGFAELAQPLYAATRPGNDPLVWGEKEEEAFQSLKLALTQPPALALPSLDKPFQLFVEETSGAAKGVLTQALGPWKRPVAYLSKRLDPVAAGWPRCLRAIAAAALLTREASKLTFGQDIEITSSHNLESLLRSPPDKWLTNARITQYQVLLLDPPRVRFKQTAALNPATLLPETDDTLPIHHCLDTLDSLTSTRPDLTDQPLAQAEATLFTDGSSYIRDGKRYAGAAVVTLDSVIWAEPLPIGTSAQKAELIALTKALEWSKDKSVNIYTDSRYAFATLHVHGMIYRERGWLTAGGKAIKNAPEILALLTAVWLPKRVAVMHCKGHQKDDAPTSTGNRRADEVAREVAIRPLSTQATISAGKRTADGSEFEKRTADGSEFESPKKKAKVE

SEQ ID NO: 6078 - protein, 2105 aa, synthetic construct
MPAAKRVKLDGGDKKYSIGLDIGTNSVGWAVITDEYKVPSKKFKVLGNTDRHSIKKNLIGALLFDSGETAEATRLKRTARRRYTRRKNRICYLQEIFSNEMAKVDDSFFHRLEESFLVEEDKKHERHPIFGNIVDEVAYHEKYPTIYHLRKKLVDSTDKADLRLIYLALAHMIKFRGHFLIEGDLNPDNSDVDKLFIQLVQTYNQLFEENPINASGVDAKAILSARLSKSRRLENLIAQLPGEKKNGLFGNLIALSLGLTPNFKSNFDLAEDAKLQLSKDTYDDDLDNLLAQIGDQYADLFLAAKNLSDAILLSDILRVNTEITKAPLSASMIKRYDEHHQDLTLLKALVRQQLPEKYKEIFFDQSKNGYAGYIDGGASQEEFYKFIKPILEKMDGTEELLVKLNREDLLRKQRTFDNGSIPHQIHLGELHAILRRQEDFYPFLKDNREKIEKILTFRIPYYVGPLARGNSRFAWMTRKSEETITPWNFEEVVDKGASAQSFIERMTNFDKNLPNEKVLPKHSLLYEYFTVYNELTKVKYVTEGMRKPAFLSGEQKKAIVDLLFKTNRKVTVKQLKEDYFKKIECFDSVEISGVEDRFNASLGTYHDLLKIIKDKDFLDNEENEDILEDIVLTLTLFEDREMIEERLKTYAHLFDDKVMKQLKRRRYTGWGRLSRKLINGIRDKQSGKTILDFLKSDGFANRNFMQLIHDDSLTFKEDIQKAQVSGQGDSLHEHIANLAGSPAIKKGILQTVKVVDELVKVMGRHKPENIVIEMARENQTTQKGQKNSRERMKRIEEGIKELGSQILKEHPVENTQLQNEKLYLYYLQNGRDMYVDQELDINRLSDYDVDHIVPQSFLKDDSIDNKVLTRSDKARGKSDNVPSEEVVKKMKNYWRQLLNAKLITQRKFDNLTKAERGGLSELDKAGFIKRQLVETRQITKHVAQILDSRMNTKYDENDKLIREVKVITLKSKLVSDFRKDFQFYKVREINNYHHAHDAYLNAVVGTALIKKYPKLESEFVYGDYKVYDVRKMIAKSEQEIGKATAKYFFYSNIMNFFKTEITLANGEIRKRPLIETNGETGEIVWDKGRDFATVRKVLSMPQVNIVKKTEVQTGGFSKESILPKRNSDKLIARKKDWDPKKYGGFDSPTVAYSVLVVAKVEKGKSKKLKSVKELLGITIMERSSFEKNPIDFLEAKGYKEVKKDLIIKLPKYSLFELENGRKRMLASAGELQKGNELALPSKYVNFLYLASHYEKLKGSPEDNEQKQLFVEQHKHYLDEIIEQISEFSKRVILADANLDKVLSAYNKHRDKPIREQAENIIHLFTLTNLGAPAAFKYFDTTIDRKRYTSTKEVLDATLIHQSITGLYETRIDLSQLGGDGGGGSGGSGGSGGSGGSGGSGGTAPLEEEYRLFLEAPIQNVTLLEQWKREIPKVWAEINPPGLASTQAPIHVQLLSTALPVRVRQYPITLEAKRSLRETIRKFRAAGILRPVHSPWNTPLLPVRKSGTSEYRMVQDLREVNKRVETIHPTVPNPYTLLSLLPPDRIWYSVLDLKDAFFCIPLAPESQLIFAFEWADAEEGESGQLTWTRLPQGFKNSPTLFNEALNRDLQGFRLDHPSVSLLQYVDDLLIAADTQAACLSATRDLLMTLAELGYRVSGKKAQLCQEEVTYLGFKIHKGSRSLSNSRTQAILQIPVPKTKRQVREFLGKIGYCRLFIPGFAELAQPLYAATRPGNDPLVWGEKEEEAFQSLKLALTQPPALALPSLDKPFQLFVEETSGAAKGVLTQALGPWKRPVAYLSKRLDPVAAGWPRCLRAIAAAALLTREASKLTFGQDIEITSSHNLESLLRSPPDKWLTNARITQYQVLLLDPPRVRFKQTAALNPATLLPETDDTLPIHHCLDTLDSLTSTRPDLTDQPLAQAEATLFTDGSSYIRDGKRYAGAAVVTLDSVIWAEPLPIGTSAQKAELIALTKALEWSKDKSVNIYTDSRYAFATLHVHGMIYRERGWLTAGGKAIKNAPEILALLTAVWLPKRVAVMHCKGHQKDDAPTSTGNRRADEVAREVAIRPLSTQATISAGKRTADGSEFEKRTADGSEFESPKKKAKVE

SEQ ID NO: 6079 - protein, 2109 aa, synthetic construct
MPAAKRVKLDGGDKKYSIGLDIGTNSVGWAVITDEYKVPSKKFKVLGNTDRHSIKKNLIGALLFDSGETAEATRLKRTARRRYTRRKNRICYLQEIFSNEMAKVDDSFFHRLEESFLVEEDKKHERHPIFGNIVDEVAYHEKYPTIYHLRKKLVDSTDKADLRLIYLALAHMIKFRGHFLIEGDLNPDNSDVDKLFIQLVQTYNQLFEENPINASGVDAKAILSARLSKSRRLENLIAQLPGEKKNGLFGNLIALSLGLTPNFKSNFDLAEDAKLQLSKDTYDDDLDNLLAQIGDQYADLFLAAKNLSDAILLSDILRVNTEITKAPLSASMIKRYDEHHQDLTLLKALVRQQLPEKYKEIFFDQSKNGYAGYIDGGASQEEFYKFIKPILEKMDGTEELLVKLNREDLLRKQRTFDNGSIPHQIHLGELHAILRRQEDFYPFLKDNREKIEKILTFRIPYYVGPLARGNSRFAWMTRKSEETITPWNFEEVVDKGASAQSFIERMTNFDKNLPNEKVLPKHSLLYEYFTVYNELTKVKYVTEGMRKPAFLSGEQKKAIVDLLFKTNRKVTVKQLKEDYFKKIECFDSVEISGVEDRFNASLGTYHDLLKIIKDKDFLDNEENEDILEDIVLTLTLFEDREMIEERLKTYAHLFDDKVMKQLKRRRYTGWGRLSRKLINGIRDKQSGKTILDFLKSDGFANRNFMQLIHDDSLTFKEDIQKAQVSGQGDSLHEHIANLAGSPAIKKGILQTVKVVDELVKVMGRHKPENIVIEMARENQTTQKGQKNSRERMKRIEEGIKELGSQILKEHPVENTQLQNEKLYLYYLQNGRDMYVDQELDINRLSDYDVDHIVPQSFLKDDSIDNKVLTRSDKARGKSDNVPSEEVVKKMKNYWRQLLNAKLITQRKFDNLTKAERGGLSELDKAGFIKRQLVETRQITKHVAQILDSRMNTKYDENDKLIREVKVITLKSKLVSDFRKDFQFYKVREINNYHHAHDAYLNAVVGTALIKKYPKLESEFVYGDYKVYDVRKMIAKSEQEIGKATAKYFFYSNIMNFFKTEITLANGEIRKRPLIETNGETGEIVWDKGRDFATVRKVLSMPQVNIVKKTEVQTGGFSKESILPKRNSDKLIARKKDWDPKKYGGFDSPTVAYSVLVVAKVEKGKSKKLKSVKELLGITIMERSSFEKNPIDFLEAKGYKEVKKDLIIKLPKYSLFELENGRKRMLASAGELQKGNELALPSKYVNFLYLASHYEKLKGSPEDNEQKQLFVEQHKHYLDEIIEQISEFSKRVILADANLDKVLSAYNKHRDKPIREQAENIIHLFTLTNLGAPAAFKYFDTTIDRKRYTSTKEVLDATLIHQSITGLYETRIDLSQLGGDGGGGSGGSGGSGGSGGSGGSGGTVSLQDEHRLFDIPVTTSLPDVWLQDFPQAWAETGGLGRAKCQAPIIIDLKPTAVPVSIKQYPMSLEAHMGIRQHIIKFLELGVLRPCRSPWNTPLLPVKKPGTQDYRPVQDLREINKRTVDIHPTVPNPYNLLSTLKPDYSWYTVLDLKDAFFCLPLAPQSQELFAFEWKDPERGISGQLTWTRLPQGFKNSPTLFNEALHRDLTDFRTQHPEVTLLQYVDDLLLAAPTKKACTQGTRHLLQELGEKGYRASAKKAQICQTKVTYLGYILSEGKRWLTPGRIETVARIPPPRNPREVREFLGTAGFCRLWIPGFAELAAPLYALTKPSTPFTWQTEHQLAFEALKKALLSAPALGLPDTSKPFTLFLDERQGIAKGVLTQKLGPWKRPVAYLSKKLDPVAAGWPPCLRIMAATAMLVKDSAKLTLGQPLTVITPHTLEAIVRQPPDRWITNARLTHYQALLLDTDRVQFGPPVTLNPATLLPVPENQPSPHDCRQVLAETHGTREDLKDQELPDADHTWYTDGSSYLDSGTRRAGAAVVDGHNTIWAQSLPPGTSAQKAELIALTKALELSKGKKANIYTDSRYAFATAHTHGSIYERRGWLTSEGKEIKNKAEIIALLKALFLPQEVAIIHCPGHQKGQDPVAVGNRQADRVARQAAMAEVLTLATEPDNTSHITAGKRTADGSEFEKRTADGSEFESPKKKAKVE

SEQ ID NO: 6080 - protein, 2094 aa, synthetic construct
MPAAKRVKLDGGDKKYSIGLDIGTNSVGWAVITDEYKVPSKKFKVLGNTDRHSIKKNLIGALLFDSGETAEATRLKRTARRRYTRRKNRICYLQEIFSNEMAKVDDSFFHRLEESFLVEEDKKHERHPIFGNIVDEVAYHEKYPTIYHLRKKLVDSTDKADLRLIYLALAHMIKFRGHFLIEGDLNPDNSDVDKLFIQLVQTYNQLFEENPINASGVDAKAILSARLSKSRRLENLIAQLPGEKKNGLFGNLIALSLGLTPNFKSNFDLAEDAKLQLSKDTYDDDLDNLLAQIGDQYADLFLAAKNLSDAILLSDILRVNTEITKAPLSASMIKRYDEHHQDLTLLKALVRQQLPEKYKEIFFDQSKNGYAGYIDGGASQEEFYKFIKPILEKMDGTEELLVKLNREDLLRKQRTFDNGSIPHQIHLGELHAILRRQEDFYPFLKDNREKIEKILTFRIPYYVGPLARGNSRFAWMTRKSEETITPWNFEEVVDKGASAQSFIERMTNFDKNLPNEKVLPKHSLLYEYFTVYNELTKVKYVTEGMRKPAFLSGEQKKAIVDLLFKTNRKVTVKQLKEDYFKKIECFDSVEISGVEDRFNASLGTYHDLLKIIKDKDFLDNEENEDILEDIVLTLTLFEDREMIEERLKTYAHLFDDKVMKQLKRRRYTGWGRLSRKLINGIRDKQSGKTILDFLKSDGFANRNFMQLIHDDSLTFKEDIQKAQVSGQGDSLHEHIANLAGSPAIKKGILQTVKVVDELVKVMGRHKPENIVIEMARENQTTQKGQKNSRERMKRIEEGIKELGSQILKEHPVENTQLQNEKLYLYYLQNGRDMYVDQELDINRLSDYDVDHIVPQSFLKDDSIDNKVLTRSDKARGKSDNVPSEEVVKKMKNYWRQLLNAKLITQRKFDNLTKAERGGLSELDKAGFIKRQLVETRQITKHVAQILDSRMNTKYDENDKLIREVKVITLKSKLVSDFRKDFQFYKVREINNYHHAHDAYLNAVVGTALIKKYPKLESEFVYGDYKVYDVRKMIAKSEQEIGKATAKYFFYSNIMNFFKTEITLANGEIRKRPLIETNGETGEIVWDKGRDFATVRKVLSMPQVNIVKKTEVQTGGFSKESILPKRNSDKLIARKKDWDPKKYGGFDSPTVAYSVLVVAKVEKGKSKKLKSVKELLGITIMERSSFEKNPIDFLEAKGYKEVKKDLIIKLPKYSLFELENGRKRMLASAGELQKGNELALPSKYVNFLYLASHYEKLKGSPEDNEQKQLFVEQHKHYLDEIIEQISEFSKRVILADANLDKVLSAYNKHRDKPIREQAENIIHLFTLTNLGAPAAFKYFDTTIDRKRYTSTKEVLDATLIHQSITGLYETRIDLSQLGGDGGGGSGGSGGSGGSGGSGGSGGVPWILKKPLELTIKLDLEEQQGTLLNNSILSKKGKEELKQLFEKYSALWQSWENQVGHRRIRPHKIATGTVKPTPQKQYHINPKAKPDIQIVINDLLKQGVLIQKESTMNTPVYPVPKPNGRWRMVLDYRAVNKVTPLIAVQNQHSYGILGSLFKGRYKTTIDLSNGFWAHPIVPEDYWITAFTWQGKQYCWTVLPQGFLNSPGLFTGDVVDLLQGIPNVEVYVDDVYISHDSEKEHLEYLDILFNRLKEAGYIISLKKSNIANSIVDFLGFQITNEGRGLTDTFKEKLENITAPTTLKQLQSILGLLNFARNFIPDFTELIAPLYALIPKSTKNYVPWQIEHSTTLETLITKLNGAEYLQGRKGDKTLIMKVNASYTTGYIRYYNEGEKKPISYVSIVFSKTELKFTELEKLLTTVHKGLLKALDLSMGQNIHVYSPIVSMQNIQKTPQTAKKALASRWLSWLSYLEDPRIRFFYDPQMPALKDLPAVDTGKDNKKHPSNFQHIFYTDGSAITSPTKEGHLNAGMGIVYFINKDGNLQKQQEWSISLGNHTAQFAEIAAFEFALKKCLPLGGNILVVTDSNYVAKAYNEELDVWASNGFVNNRKKPLKHISKWKSVADLKRLRPDVVVTHEPGHQKLDSSPHAYGNNLADQLATQASFKVHAGKRTADGSEFEKRTADGSEFESPKKKAKVE

SEQ ID NO: 6081 - protein, 2180 aa, synthetic construct
MPAAKRVKLDGGDKKYSIGLDIGTNSVGWAVITDEYKVPSKKFKVLGNTDRHSIKKNLIGALLFDSGETAEATRLKRTARRRYTRRKNRICYLQEIFSNEMAKVDDSFFHRLEESFLVEEDKKHERHPIFGNIVDEVAYHEKYPTIYHLRKKLVDSTDKADLRLIYLALAHMIKFRGHFLIEGDLNPDNSDVDKLFIQLVQTYNQLFEENPINASGVDAKAILSARLSKSRRLENLIAQLPGEKKNGLFGNLIALSLGLTPNFKSNFDLAEDAKLQLSKDTYDDDLDNLLAQIGDQYADLFLAAKNLSDAILLSDILRVNTEITKAPLSASMIKRYDEHHQDLTLLKALVRQQLPEKYKEIFFDQSKNGYAGYIDGGASQEEFYKFIKPILEKMDGTEELLVKLNREDLLRKQRTFDNGSIPHQIHLGELHAILRRQEDFYPFLKDNREKIEKILTFRIPYYVGPLARGNSRFAWMTRKSEETITPWNFEEVVDKGASAQSFIERMTNFDKNLPNEKVLPKHSLLYEYFTVYNELTKVKYVTEGMRKPAFLSGEQKKAIVDLLFKTNRKVTVKQLKEDYFKKIECFDSVEISGVEDRFNASLGTYHDLLKIIKDKDFLDNEENEDILEDIVLTLTLFEDREMIEERLKTYAHLFDDKVMKQLKRRRYTGWGRLSRKLINGIRDKQSGKTILDFLKSDGFANRNFMQLIHDDSLTFKEDIQKAQVSGQGDSLHEHIANLAGSPAIKKGILQTVKVVDELVKVMGRHKPENIVIEMARENQTTQKGQKNSRERMKRIEEGIKELGSQILKEHPVENTQLQNEKLYLYYLQNGRDMYVDQELDINRLSDYDVDHIVPQSFLKDDSIDNKVLTRSDKARGKSDNVPSEEVVKKMKNYWRQLLNAKLITQRKFDNLTKAERGGLSELDKAGFIKRQLVETRQITKHVAQILDSRMNTKYDENDKLIREVKVITLKSKLVSDFRKDFQFYKVREINNYHHAHDAYLNAVVGTALIKKYPKLESEFVYGDYKVYDVRKMIAKSEQEIGKATAKYFFYSNIMNFFKTEITLANGEIRKRPLIETNGETGEIVWDKGRDFATVRKVLSMPQVNIVKKTEVQTGGFSKESILPKRNSDKLIARKKDWDPKKYGGFDSPTVAYSVLVVAKVEKGKSKKLKSVKELLGITIMERSSFEKNPIDFLEAKGYKEVKKDLIIKLPKYSLFELENGRKRMLASAGELQKGNELALPSKYVNFLYLASHYEKLKGSPEDNEQKQLFVEQHKHYLDEIIEQISEFSKRVILADANLDKVLSAYNKHRDKPIREQAENIIHLFTLTNLGAPAAFKYFDTTIDRKRYTSTKEVLDATLIHQSITGLYETRIDLSQLGGDGGGGSGGSGGSGGSGGSGGSGGMDLLKPLTVERKGVKIKGYWNSQADITCVPKDLLQGEEPVRQQNVTTIHGTQEGDVYYVNLKIDGRRINTEVIGTTLDYAIITPGDVPWILKKPLELTIKLDLEEQQGTLLNNSILSKKGKEELKQLFEKYSALWQSWENQVGHRRIRPHKIATGTVKPTPQKQYHINPKAKPDIQIVINDLLKQGVLIQKESTMNTPVYPVPKPNGRWRMVLDYRAVNKVTPLIAVQNQHSYGILGSLFKGRYKTTIDLSNGFWAHPIVPEDYWITAFTWQGKQYCWTVLPQGFLNSPGLFNGDVVDLLQGIPNVEVYVDDVYISHDSEKEHLEYLDILFNRLKEAGYIISLKKSNIANSIVDFLGFQITNEGRGLTDTFKEKLENITAPTTLKQLQSILGLLNFARNFIPDFTELIAPLYALIPKSPKNYVPWQIEHSTTLETLITKLNGAEYLQGRKGDKTLIMKVNASYTTGYIRYYNEGEKKPISYVSIVFSKTELKFTELEKLLTTVHKGLLKALDLSMGQNIHVYSPIVSMQNIQKTPQTAKKALASRWLSWLSYLEDPRIRFFYDPQMPALKDLPAVDTGKDNKKHPSNFQHIFYTDGSAITSPTKEGHLNAGMGIVYFINKDGNLQKQQEWSISLGNHTAQFAEIAAFEFALKKCLPLGGNILVVTDSNYVAKAYNEELDVWASNGFVNNRKKPLKHISKWKSVADLKRLRPDVVVTHEPGHQKLDSSPHAYGNNLADQLATQASFKVHAGKRTADGSEFEKRTADGSEFESPKKKAKVE

SEQ ID NO: 6082 - protein, 2102 aa, synthetic construct
MPAAKRVKLDGGDKKYSIGLDIGTNSVGWAVITDEYKVPSKKFKVLGNTDRHSIKKNLIGALLFDSGETAEATRLKRTARRRYTRRKNRICYLQEIFSNEMAKVDDSFFHRLEESFLVEEDKKHERHPIFGNIVDEVAYHEKYPTIYHLRKKLVDSTDKADLRLIYLALAHMIKFRGHFLIEGDLNPDNSDVDKLFIQLVQTYNQLFEENPINASGVDAKAILSARLSKSRRLENLIAQLPGEKKNGLFGNLIALSLGLTPNFKSNFDLAEDAKLQLSKDTYDDDLDNLLAQIGDQYADLFLAAKNLSDAILLSDILRVNTEITKAPLSASMIKRYDEHHQDLTLLKALVRQQLPEKYKEIFFDQSKNGYAGYIDGGASQEEFYKFIKPILEKMDGTEELLVKLNREDLLRKQRTFDNGSIPHQIHLGELHAILRRQEDFYPFLKDNREKIEKILTFRIPYYVGPLARGNSRFAWMTRKSEETITPWNFEEVVDKGASAQSFIERMTNFDKNLPNEKVLPKHSLLYEYFTVYNELTKVKYVTEGMRKPAFLSGEQKKAIVDLLFKTNRKVTVKQLKEDYFKKIECFDSVEISGVEDRFNASLGTYHDLLKIIKDKDFLDNEENEDILEDIVLTLTLFEDREMIEERLKTYAHLFDDKVMKQLKRRRYTGWGRLSRKLINGIRDKQSGKTILDFLKSDGFANRNFMQLIHDDSLTFKEDIQKAQVSGQGDSLHEHIANLAGSPAIKKGILQTVKVVDELVKVMGRHKPENIVIEMARENQTTQKGQKNSRERMKRIEEGIKELGSQILKEHPVENTQLQNEKLYLYYLQNGRDMYVDQELDINRLSDYDVDHIVPQSFLKDDSIDNKVLTRSDKARGKSDNVPSEEVVKKMKNYWRQLLNAKLITQRKFDNLTKAERGGLSELDKAGFIKRQLVETRQITKHVAQILDSRMNTKYDENDKLIREVKVITLKSKLVSDFRKDFQFYKVREINNYHHAHDAYLNAVVGTALIKKYPKLESEFVYGDYKVYDVRKMIAKSEQEIGKATAKYFFYSNIMNFFKTEITLANGEIRKRPLIETNGETGEIVWDKGRDFATVRKVLSMPQVNIVKKTEVQTGGFSKESILPKRNSDKLIARKKDWDPKKYGGFDSPTVAYSVLVVAKVEKGKSKKLKSVKELLGITIMERSSFEKNPIDFLEAKGYKEVKKDLIIKLPKYSLFELENGRKRMLASAGELQKGNELALPSKYVNFLYLASHYEKLKGSPEDNEQKQLFVEQHKHYLDEIIEQISEFSKRVILADANLDKVLSAYNKHRDKPIREQAENIIHLFTLTNLGAPAAFKYFDTTIDRKRYTSTKEVLDATLIHQSITGLYETRIDLSQLGGDGGGGSGGSGGSGGSGGSGGSGGTLQLEEEYRLFEPESTQKQEMDIWLKNFPQAWAETGGMGTAHCQAPVLIQLKATATPISIRQYPMPHEAYQGIKPHIRRMLDQGILKPCQSPWNTPLLPVKKPGTEDYRPVQDLREVNKRVEDIHPTVPNPYNLLSTLPPSHPWYTVLDLKDAFFCLRLHSESQLLFAFEWRDPEIGLSGQLTWTRLPQGFKNSPTLFNEALHSDLADFRVRYPALVLLQYVDDLLLAAATRTECLEGTKALLETLGNKGYRASAKKAQICLQEVTYLGYSLKDGQRWLTKARKEAILSIPVPKNSRQVREFLGKAGYCRLFIPGFAELAAPLYPLTRPGTLFQWGTEQQLAFEDIKKALLSSPALGLPDITKPFELFIDENSGFAKGVLVQKLGPWKRPVAYLSKKLDTVASGWPPCLRMVAAIAILVKDAGKLTLGQPLTILTSHPVEALVRQPPNKWLSNARMTHYQAMLLDAERVHFGPTVSLNPATLLPLPSGGNHHDCLQILAETHGTRPDLTDQPLPDADLTWYTDGSSFIRNGEREAGAAVTTESEVIWAAPLPPGTSAQRAELIALTQALKMAEGKKLTVYTDSRYAFATTHVHGEIYRRRGWLTSEGKEIKNKNEILALLEALFLPKRLSIIHCPGHQKGDSPQAKGNRLADDTAKKAATETHSSLTVLPAGKRTADGSEFEKRTADGSEFESPKKKAKVE

SEQ ID NO: 6083 - protein, 2094 aa, synthetic construct
MPAAKRVKLDGGDKKYSIGLDIGTNSVGWAVITDEYKVPSKKFKVLGNTDRHSIKKNLIGALLFDSGETAEATRLKRTARRRYTRRKNRICYLQEIFSNEMAKVDDSFFHRLEESFLVEEDKKHERHPIFGNIVDEVAYHEKYPTIYHLRKKLVDSTDKADLRLIYLALAHMIKFRGHFLIEGDLNPDNSDVDKLFIQLVQTYNQLFEENPINASGVDAKAILSARLSKSRRLENLIAQLPGEKKNGLFGNLIALSLGLTPNFKSNFDLAEDAKLQLSKDTYDDDLDNLLAQIGDQYADLFLAAKNLSDAILLSDILRVNTEITKAPLSASMIKRYDEHHQDLTLLKALVRQQLPEKYKEIFFDQSKNGYAGYIDGGASQEEFYKFIKPILEKMDGTEELLVKLNREDLLRKQRTFDNGSIPHQIHLGELHAILRRQEDFYPFLKDNREKIEKILTFRIPYYVGPLARGNSRFAWMTRKSEETITPWNFEEVVDKGASAQSFIERMTNFDKNLPNEKVLPKHSLLYEYFTVYNELTKVKYVTEGMRKPAFLSGEQKKAIVDLLFKTNRKVTVKQLKEDYFKKIECFDSVEISGVEDRFNASLGTYHDLLKIIKDKDFLDNEENEDILEDIVLTLTLFEDREMIEERLKTYAHLFDDKVMKQLKRRRYTGWGRLSRKLINGIRDKQSGKTILDFLKSDGFANRNFMQLIHDDSLTFKEDIQKAQVSGQGDSLHEHIANLAGSPAIKKGILQTVKVVDELVKVMGRHKPENIVIEMARENQTTQKGQKNSRERMKRIEEGIKELGSQILKEHPVENTQLQNEKLYLYYLQNGRDMYVDQELDINRLSDYDVDHIVPQSFLKDDSIDNKVLTRSDKARGKSDNVPSEEVVKKMKNYWRQLLNAKLITQRKFDNLTKAERGGLSELDKAGFIKRQLVETRQITKHVAQILDSRMNTKYDENDKLIREVKVITLKSKLVSDFRKDFQFYKVREINNYHHAHDAYLNAVVGTALIKKYPKLESEFVYGDYKVYDVRKMIAKSEQEIGKATAKYFFYSNIMNFFKTEITLANGEIRKRPLIETNGETGEIVWDKGRDFATVRKVLSMPQVNIVKKTEVQTGGFSKESILPKRNSDKLIARKKDWDPKKYGGFDSPTVAYSVLVVAKVEKGKSKKLKSVKELLGITIMERSSFEKNPIDFLEAKGYKEVKKDLIIKLPKYSLFELENGRKRMLASAGELQKGNELALPSKYVNFLYLASHYEKLKGSPEDNEQKQLFVEQHKHYLDEIIEQISEFSKRVILADANLDKVLSAYNKHRDKPIREQAENIIHLFTLTNLGAPAAFKYFDTTIDRKRYTSTKEVLDATLIHQSITGLYETRIDLSQLGGDGGGGSGGSGGSGGSGGSGGSGGVPWLTQQPLQLTILVPLQEYQEKILSKTALPEDQKQQLKTLFVKYDNLWQHWENQVGHRKIRPHNIATGDYPPRPQKQYPINPKAKPSIQIVIDDLLKQGVLTPQNSTMNTPVYPVPKPDGRWRMVLDYREVNKTIPLTAAQNQHSAGILATIVRQKYKTTLDLANGFWAHPITPESYWLTAFTWQGKQYCWTRLPQGFLNSPALFNADVVDLLKEIPNVQVYVDDIYLSHDDPKEHVQQLEKVFQILLQAGYVVSLKKSEIGQKTVEFLGFNITKEGRGLTDTFKTKLLNITPPKDLKQLQSILGLLNFARNFIPNFAELVQPLYNLIAPAKGKYIEWSEENTKQLNMVIEALNTASNLEERLPEQRLVIKVNTSPSAGYVRYYNETGKKPIMYLNYVFSKAELKFSMLEKLLTTMHKALIKAMDLAMGQEILVYSPIVSMTKIQKTPLPERKALPIRWITWMTYLEDPRIQFHYDKTLPELKHIPDVYTSSQSPVKHPSQYEGVFYTDGSAIKSPDPTKSNNAGMGIVHATYKPEYQVLNQWSIPLGNHTAQMAEIAAVEFACKKALKIPGPVLVITDSFYVAESANKELPYWKSNGFVNNKKKPLKHISKWKSIAECLSMKPDITIQHEKGISLQIPVFILKGNALADKLATQGSYVVNAGKRTADGSEFEKRTADGSEFESPKKKAKVE

SEQ ID NO: 6084 - protein, 2101 aa, synthetic construct
MPAAKRVKLDGGDKKYSIGLDIGTNSVGWAVITDEYKVPSKKFKVLGNTDRHSIKKNLIGALLFDSGETAEATRLKRTARRRYTRRKNRICYLQEIFSNEMAKVDDSFFHRLEESFLVEEDKKHERHPIFGNIVDEVAYHEKYPTIYHLRKKLVDSTDKADLRLIYLALAHMIKFRGHFLIEGDLNPDNSDVDKLFIQLVQTYNQLFEENPINASGVDAKAILSARLSKSRRLENLIAQLPGEKKNGLFGNLIALSLGLTPNFKSNFDLAEDAKLQLSKDTYDDDLDNLLAQIGDQYADLFLAAKNLSDAILLSDILRVNTEITKAPLSASMIKRYDEHHQDLTLLKALVRQQLPEKYKEIFFDQSKNGYAGYIDGGASQEEFYKFIKPILEKMDGTEELLVKLNREDLLRKQRTFDNGSIPHQIHLGELHAILRRQEDFYPFLKDNREKIEKILTFRIPYYVGPLARGNSRFAWMTRKSEETITPWNFEEVVDKGASAQSFIERMTNFDKNLPNEKVLPKHSLLYEYFTVYNELTKVKYVTEGMRKPAFLSGEQKKAIVDLLFKTNRKVTVKQLKEDYFKKIECFDSVEISGVEDRFNASLGTYHDLLKIIKDKDFLDNEENEDILEDIVLTLTLFEDREMIEERLKTYAHLFDDKVMKQLKRRRYTGWGRLSRKLINGIRDKQSGKTILDFLKSDGFANRNFMQLIHDDSLTFKEDIQKAQVSGQGDSLHEHIANLAGSPAIKKGILQTVKVVDELVKVMGRHKPENIVIEMARENQTTQKGQKNSRERMKRIEEGIKELGSQILKEHPVENTQLQNEKLYLYYLQNGRDMYVDQELDINRLSDYDVDHIVPQSFLKDDSIDNKVLTRSDKARGKSDNVPSEEVVKKMKNYWRQLLNAKLITQRKFDNLTKAERGGLSELDKAGFIKRQLVETRQITKHVAQILDSRMNTKYDENDKLIREVKVITLKSKLVSDFRKDFQFYKVREINNYHHAHDAYLNAVVGTALIKKYPKLESEFVYGDYKVYDVRKMIAKSEQEIGKATAKYFFYSNIMNFFKTEITLANGEIRKRPLIETNGETGEIVWDKGRDFATVRKVLSMPQVNIVKKTEVQTGGFSKESILPKRNSDKLIARKKDWDPKKYGGFDSPTVAYSVLVVAKVEKGKSKKLKSVKELLGITIMERSSFEKNPIDFLEAKGYKEVKKDLIIKLPKYSLFELENGRKRMLASAGELQKGNELALPSKYVNFLYLASHYEKLKGSPEDNEQKQLFVEQHKHYLDEIIEQISEFSKRVILADANLDKVLSAYNKHRDKPIREQAENIIHLFTLTNLGAPAAFKYFDTTIDRKRYTSTKEVLDATLIHQSITGLYETRIDLSQLGGDGGGGSGGSGGSGGSGGSGGSGGVLNLEEEYRLHEKPVPSSIDPSWLQLFPTVWAERAGMGLANQVPPVVVELRSGASPVAVRQYPMSKEAREGIRPHIQKFLDLGVLVPCRSPWNTPLLPVKKPGTNDYRPVQDLREINKRVQDIHPTVPNPYNLLSSLPPSYTWYSVLDLKDAFFCLRLHPNSQPLFAFEWKDPEKGNTGQLTWTRLPQGFKNSPTLFNEALHRDLAPFRALNPQVVLLQYVDDLLVAAPTYEDCKKGTQKLLQELSKLGYRVSAKKAQLCQREVTYLGYLLKEGKRWLTPARKATVMKIPVPTTPRQVREFLGKAGFCRLFIPGFASLAAPLYPLTKPSIPFIWTEEHQQAFDHIKKALLSAPALALPDLTKPFTLYIDERAGVARGVLTQTLGPWRRPVAYLSKKLDPVASGWPTCLKAVAAVALLLKDADKLTLGQNVTVIASHSLESIVRQPPDRWMTNARMTHYQSLLLNERVSFAPPAVLNPATLLPVESEATPVHRCSEILAEETGTRRDLEDQPLPGVPTWYTDGSSFITEGKRRAGAPIVDGKRTVWASSLPEGTSAQKAELVALTQALRLAEGKNINIYTDSRYAFATAHIHGAIYKQRGWLTSAGKDIKNKEEILALLEAIHLPRRVAIIHCPGHQRGSNPVATGNRRADEAAKQAALSTRVLAGTTKPAGKRTADGSEFEKRTADGSEFESPKKKAKVE

SEQ ID NO: 6085 - protein, 2020 aa, synthetic construct
MPAAKRVKLDGGDKKYSIGLDIGTNSVGWAVITDEYKVPSKKFKVLGNTDRHSIKKNLIGALLFDSGETAEATRLKRTARRRYTRRKNRICYLQEIFSNEMAKVDDSFFHRLEESFLVEEDKKHERHPIFGNIVDEVAYHEKYPTIYHLRKKLVDSTDKADLRLIYLALAHMIKFRGHFLIEGDLNPDNSDVDKLFIQLVQTYNQLFEENPINASGVDAKAILSARLSKSRRLENLIAQLPGEKKNGLFGNLIALSLGLTPNFKSNFDLAEDAKLQLSKDTYDDDLDNLLAQIGDQYADLFLAAKNLSDAILLSDILRVNTEITKAPLSASMIKRYDEHHQDLTLLKALVRQQLPEKYKEIFFDQSKNGYAGYIDGGASQEEFYKFIKPILEKMDGTEELLVKLNREDLLRKQRTFDNGSIPHQIHLGELHAILRRQEDFYPFLKDNREKIEKILTFRIPYYVGPLARGNSRFAWMTRKSEETITPWNFEEVVDKGASAQSFIERMTNFDKNLPNEKVLPKHSLLYEYFTVYNELTKVKYVTEGMRKPAFLSGEQKKAIVDLLFKTNRKVTVKQLKEDYFKKIECFDSVEISGVEDRFNASLGTYHDLLKIIKDKDFLDNEENEDILEDIVLTLTLFEDREMIEERLKTYAHLFDDKVMKQLKRRRYTGWGRLSRKLINGIRDKQSGKTILDFLKSDGFANRNFMQLIHDDSLTFKEDIQKAQVSGQGDSLHEHIANLAGSPAIKKGILQTVKVVDELVKVMGRHKPENIVIEMARENQTTQKGQKNSRERMKRIEEGIKELGSQILKEHPVENTQLQNEKLYLYYLQNGRDMYVDQELDINRLSDYDVDHIVPQSFLKDDSIDNKVLTRSDKARGKSDNVPSEEVVKKMKNYWRQLLNAKLITQRKFDNLTKAERGGLSELDKAGFIKRQLVETRQITKHVAQILDSRMNTKYDENDKLIREVKVITLKSKLVSDFRKDFQFYKVREINNYHHAHDAYLNAVVGTALIKKYPKLESEFVYGDYKVYDVRKMIAKSEQEIGKATAKYFFYSNIMNFFKTEITLANGEIRKRPLIETNGETGEIVWDKGRDFATVRKVLSMPQVNIVKKTEVQTGGFSKESILPKRNSDKLIARKKDWDPKKYGGFDSPTVAYSVLVVAKVEKGKSKKLKSVKELLGITIMERSSFEKNPIDFLEAKGYKEVKKDLIIKLPKYSLFELENGRKRMLASAGELQKGNELALPSKYVNFLYLASHYEKLKGSPEDNEQKQLFVEQHKHYLDEIIEQISEFSKRVILADANLDKVLSAYNKHRDKPIREQAENIIHLFTLTNLGAPAAFKYFDTTIDRKRYTSTKEVLDATLIHQSITGLYETRIDLSQLGGDGGGGSGGSGGSGGSGGSGGSGGAVLGLEHLPRPPQISQFPLNPERLQALQHLVRKALEAGHIEPYTGPGNNPVFPVKKANGTWRFIHDLRATNSLTIDLSSSSPGPPDLSSLPTTLAHLQTIDLRDAFFQIPLPKQFQPYFAFTVPQQCNYGPGTRYAWKVLPQGFKNSPTLFEMQLAHILQPIRQAFPQCTILQYMDDILLASPSHEDLLLLSEATMASLISHGLPVSENKTQQTPGTIKFLGQIISPNHLTYDAVPTVPIRSRWALPELQALLGEIQWVSKGTPTLRQPLHSLYCALQRHTDPRDQIYLNPSQVQSLVQLRQALSQNCRSRLVQTLPLLGAIMLTLTGTTTVVFQSKEQWPLVWLHAPLPHTSQCPWGQLLASAVLLLDKYTLQSYGLLCQTIHHNISTQTFNQFIQTSDHPSVPILLHHSHRFKNLGAQTGELWNTFLKTAAPLAPVKALMPVFTLSPVIINTAPCLFSDGSTSRAAYILWDKQILSQRSFPLPPPHKSAQRAELLGLLHGLSSARSWRCLNIFLDSKYLYHYLRTLALGTFQGRSSQAPFQALLPRLLSRKVVYLHHVRSHTNLPDPISRLNALTDALLITPVLQLAGKRTADGSEFEKRTADGSEFESPKKKAKVE

SEQ ID NO: 6086 - protein, 2016 aa, synthetic construct
MPAAKRVKLDGGDKKYSIGLDIGTNSVGWAVITDEYKVPSKKFKVLGNTDRHSIKKNLIGALLFDSGETAEATRLKRTARRRYTRRKNRICYLQEIFSNEMAKVDDSFFHRLEESFLVEEDKKHERHPIFGNIVDEVAYHEKYPTIYHLRKKLVDSTDKADLRLIYLALAHMIKFRGHFLIEGDLNPDNSDVDKLFIQLVQTYNQLFEENPINASGVDAKAILSARLSKSRRLENLIAQLPGEKKNGLFGNLIALSLGLTPNFKSNFDLAEDAKLQLSKDTYDDDLDNLLAQIGDQYADLFLAAKNLSDAILLSDILRVNTEITKAPLSASMIKRYDEHHQDLTLLKALVRQQLPEKYKEIFFDQSKNGYAGYIDGGASQEEFYKFIKPILEKMDGTEELLVKLNREDLLRKQRTFDNGSIPHQIHLGELHAILRRQEDFYPFLKDNREKIEKILTFRIPYYVGPLARGNSRFAWMTRKSEETITPWNFEEVVDKGASAQSFIERMTNFDKNLPNEKVLPKHSLLYEYFTVYNELTKVKYVTEGMRKPAFLSGEQKKAIVDLLFKTNRKVTVKQLKEDYFKKIECFDSVEISGVEDRFNASLGTYHDLLKIIKDKDFLDNEENEDILEDIVLTLTLFEDREMIEERLKTYAHLFDDKVMKQLKRRRYTGWGRLSRKLINGIRDKQSGKTILDFLKSDGFANRNFMQLIHDDSLTFKEDIQKAQVSGQGDSLHEHIANLAGSPAIKKGILQTVKVVDELVKVMGRHKPENIVIEMARENQTTQKGQKNSRERMKRIEEGIKELGSQILKEHPVENTQLQNEKLYLYYLQNGRDMYVDQELDINRLSDYDVDHIVPQSFLKDDSIDNKVLTRSDKARGKSDNVPSEEVVKKMKNYWRQLLNAKLITQRKFDNLTKAERGGLSELDKAGFIKRQLVETRQITKHVAQILDSRMNTKYDENDKLIREVKVITLKSKLVSDFRKDFQFYKVREINNYHHAHDAYLNAVVGTALIKKYPKLESEFVYGDYKVYDVRKMIAKSEQEIGKATAKYFFYSNIMNFFKTEITLANGEIRKRPLIETNGETGEIVWDKGRDFATVRKVLSMPQVNIVKKTEVQTGGFSKESILPKRNSDKLIARKKDWDPKKYGGFDSPTVAYSVLVVAKVEKGKSKKLKSVKELLGITIMERSSFEKNPIDFLEAKGYKEVKKDLIIKLPKYSLFELENGRKRMLASAGELQKGNELALPSKYVNFLYLASHYEKLKGSPEDNEQKQLFVEQHKHYLDEIIEQISEFSKRVILADANLDKVLSAYNKHRDKPIREQAENIIHLFTLTNLGAPAAFKYFDTTIDRKRYTSTKEVLDATLIHQSITGLYETRIDLSQLGGDGGGGSGGSGGSGGSGGSGGSGGGLEHLPPPPEVSQFPLNPERLQALTDLVSRALEAKHIEPYQGPGNNPIFPVKKPNGKWRFIHDLRATNSLTRDLASPSPGPPDLTSPPQDLPHLRTIDLTDAFFQIPLPAVFQPYFAFTLPQPNNHGPGTRYSWRVLPQGFKNSPTLFQQQLSHILAPVRKAFPNSLIIQYMDDILLASPALRELTALTDKVTNALTKEGLPMSLEKTQATPGSIHFLGQVISPDCITYETLPSIHVKSIWSLAELQSMLGELQWVSKGTPVLRSSLHQLYLALRGHRDPRDTIELTSTQVQALKTIQKALALNCRSRLVSQLPILALIILRPTGTTAVLFQTKQKWPLVWLHTPHPATSLRPWGQLLANAIITLDKYSLQHYGQICKSFHHNISNQALTYYLHTSDQSSVAILLQHSHRFHNLGAQPSGPWRSLLQVPQIFQNIDVLRPPFIISPVVIDHAPCLFSDGATSKAAFILWDKQVIHQQVLPLPSTCSAQAGELFGLLAGLQKSKPWPALNIFLDSKFLIGHLRRMAWGAFLGPSTQCDLHARLFPLLQGKTVYVHHVRSHTLLQDPISRLNEATDALMLAPLLPLAGKRTADGSEFEKRTADGSEFESPKKKAKVE

SEQ ID NO: 6087 - protein, 2013 aa, synthetic construct
MPAAKRVKLDGGDKKYSIGLDIGTNSVGWAVITDEYKVPSKKFKVLGNTDRHSIKKNLIGALLFDSGETAEATRLKRTARRRYTRRKNRICYLQEIFSNEMAKVDDSFFHRLEESFLVEEDKKHERHPIFGNIVDEVAYHEKYPTIYHLRKKLVDSTDKADLRLIYLALAHMIKFRGHFLIEGDLNPDNSDVDKLFIQLVQTYNQLFEENPINASGVDAKAILSARLSKSRRLENLIAQLPGEKKNGLFGNLIALSLGLTPNFKSNFDLAEDAKLQLSKDTYDDDLDNLLAQIGDQYADLFLAAKNLSDAILLSDILRVNTEITKAPLSASMIKRYDEHHQDLTLLKALVRQQLPEKYKEIFFDQSKNGYAGYIDGGASQEEFYKFIKPILEKMDGTEELLVKLNREDLLRKQRTFDNGSIPHQIHLGELHAILRRQEDFYPFLKDNREKIEKILTFRIPYYVGPLARGNSRFAWMTRKSEETITPWNFEEVVDKGASAQSFIERMTNFDKNLPNEKVLPKHSLLYEYFTVYNELTKVKYVTEGMRKPAFLSGEQKKAIVDLLFKTNRKVTVKQLKEDYFKKIECFDSVEISGVEDRFNASLGTYHDLLKIIKDKDFLDNEENEDILEDIVLTLTLFEDREMIEERLKTYAHLFDDKVMKQLKRRRYTGWGRLSRKLINGIRDKQSGKTILDFLKSDGFANRNFMQLIHDDSLTFKEDIQKAQVSGQGDSLHEHIANLAGSPAIKKGILQTVKVVDELVKVMGRHKPENIVIEMARENQTTQKGQKNSRERMKRIEEGIKELGSQILKEHPVENTQLQNEKLYLYYLQNGRDMYVDQELDINRLSDYDVDHIVPQSFLKDDSIDNKVLTRSDKARGKSDNVPSEEVVKKMKNYWRQLLNAKLITQRKFDNLTKAERGGLSELDKAGFIKRQLVETRQITKHVAQILDSRMNTKYDENDKLIREVKVITLKSKLVSDFRKDFQFYKVREINNYHHAHDAYLNAVVGTALIKKYPKLESEFVYGDYKVYDVRKMIAKSEQEIGKATAKYFFYSNIMNFFKTEITLANGEIRKRPLIETNGETGEIVWDKGRDFATVRKVLSMPQVNIVKKTEVQTGGFSKESILPKRNSDKLIARKKDWDPKKYGGFDSPTVAYSVLVVAKVEKGKSKKLKSVKELLGITIMERSSFEKNPIDFLEAKGYKEVKKDLIIKLPKYSLFELENGRKRMLASAGELQKGNELALPSKYVNFLYLASHYEKLKGSPEDNEQKQLFVEQHKHYLDEIIEQISEFSKRVILADANLDKVLSAYNKHRDKPIREQAENIIHLFTLTNLGAPAAFKYFDTTIDRKRYTSTKEVLDATLIHQSITGLYETRIDLSQLGGDGGGGSGGSGGSGGSGGSGGSGGPLGTSDSPVTHADPIDWKSEEPVWVDQWPLTQEKLSAAQQLVQEQLRLGHIEPSTSAWNSPIFVIKKKSGKWRLLQDLRKVNETMMHMGALQPGLPTPSPIPDKSYIIVIDLKDCFYTIPLAPQDCKRFAFSLPSVNFKEPMQRYQWRVLPQGMTNSPTLCQKFVATAIAPVRQRFPQLYLVHYMDDILLAHTDEHLLYQAFSILKQHLSLNGLVIADEKIQTHFPYNYLGFSLYPRVYNTQLVKLQTDHLKTLNDFQKLLGDINWIRPYLKLPTYTLQPLFDILKGDSDPASPRTLSLEGRTALQSIEEAIRQQQITYCDYQRSWGLYILPTPRAPTGVLYQDKPLRWIYLSATPTKHLLPYYELVAKIIAKGRHEAIQYFGMEPPFICVPYALEQQDWLFQFSDNWSIAFANYPGQITHHYPSDKLLQFASSHAFIFPKIVRRQPIPEATLIFTDGSSNGTAALIINHQTYYAQTSFSSAQVVELFAVHQALLTVPTSFNLFTDSSYVVGALQMIETVPIIGTTSPEVLNLFTLIQQVLHCRQHPCFFGHIRAHSTLPGALVQGNHTADVLTKQVFFQSAGKRTADGSEFEKRTADGSEFESPKKKAKVE

SEQ ID NO: 6088 - protein, 2134 aa, synthetic construct
MPAAKRVKLDGGDKKYSIGLDIGTNSVGWAVITDEYKVPSKKFKVLGNTDRHSIKKNLIGALLFDSGETAEATRLKRTARRRYTRRKNRICYLQEIFSNEMAKVDDSFFHRLEESFLVEEDKKHERHPIFGNIVDEVAYHEKYPTIYHLRKKLVDSTDKADLRLIYLALAHMIKFRGHFLIEGDLNPDNSDVDKLFIQLVQTYNQLFEENPINASGVDAKAILSARLSKSRRLENLIAQLPGEKKNGLFGNLIALSLGLTPNFKSNFDLAEDAKLQLSKDTYDDDLDNLLAQIGDQYADLFLAAKNLSDAILLSDILRVNTEITKAPLSASMIKRYDEHHQDLTLLKALVRQQLPEKYKEIFFDQSKNGYAGYIDGGASQEEFYKFIKPILEKMDGTEELLVKLNREDLLRKQRTFDNGSIPHQIHLGELHAILRRQEDFYPFLKDNREKIEKILTFRIPYYVGPLARGNSRFAWMTRKSEETITPWNFEEVVDKGASAQSFIERMTNFDKNLPNEKVLPKHSLLYEYFTVYNELTKVKYVTEGMRKPAFLSGEQKKAIVDLLFKTNRKVTVKQLKEDYFKKIECFDSVEISGVEDRFNASLGTYHDLLKIIKDKDFLDNEENEDILEDIVLTLTLFEDREMIEERLKTYAHLFDDKVMKQLKRRRYTGWGRLSRKLINGIRDKQSGKTILDFLKSDGFANRNFMQLIHDDSLTFKEDIQKAQVSGQGDSLHEHIANLAGSPAIKKGILQTVKVVDELVKVMGRHKPENIVIEMARENQTTQKGQKNSRERMKRIEEGIKELGSQILKEHPVENTQLQNEKLYLYYLQNGRDMYVDQELDINRLSDYDVDHIVPQSFLKDDSIDNKVLTRSDKARGKSDNVPSEEVVKKMKNYWRQLLNAKLITQRKFDNLTKAERGGLSELDKAGFIKRQLVETRQITKHVAQILDSRMNTKYDENDKLIREVKVITLKSKLVSDFRKDFQFYKVREINNYHHAHDAYLNAVVGTALIKKYPKLESEFVYGDYKVYDVRKMIAKSEQEIGKATAKYFFYSNIMNFFKTEITLANGEIRKRPLIETNGETGEIVWDKGRDFATVRKVLSMPQVNIVKKTEVQTGGFSKESILPKRNSDKLIARKKDWDPKKYGGFDSPTVAYSVLVVAKVEKGKSKKLKSVKELLGITIMERSSFEKNPIDFLEAKGYKEVKKDLIIKLPKYSLFELENGRKRMLASAGELQKGNELALPSKYVNFLYLASHYEKLKGSPEDNEQKQLFVEQHKHYLDEIIEQISEFSKRVILADANLDKVLSAYNKHRDKPIREQAENIIHLFTLTNLGAPAAFKYFDTTIDRKRYTSTKEVLDATLIHQSITGLYETRIDLSQLGGDGGGGSGGSGGSGGSGGSGGSGGLLGRDLLTKLKAQIQFSTEGPQVTWEDRPAMCLVLNLEEEYRLHEKPVPPSIDPSWLQLFPMVWAEKAGMGLANQVPPVVVELKSDASPVAVRQYPMSKEAREGIRPHIQRFLDLGILVPCQSPWNTPLLPVKKPGTNDYRPVQDLREVNKRVQDIHPTVPNPYNLLSSLPPSHTWYSVLDLKDAFFCLKLHPNSQPLFAFEWRDPEKGNTGQLTWTRLPQGFKNSPTLFNEALHRDLASFRALNPQVVMLQYVDDLLVAAPTYRDCKEGTRRLLQELSKLGYRVSAKKAQLCREEVTYLGYLLKGGKRWLTPARKATVMKIPTPTTPRQVREFLGKAGFCRLFIPGFASLAAPLYPLTRPKVPFTWTEAHQEAFGRIKEALLSAPALALPDLTKPFALYVDEKEGVARGVLTQTLGPWRRPVAYLSKKLDPVASGWPTCLKAIAAVALLLKDADKLTLGQNVLVIAPHNLESIVRQPPDRWMTNARMTHYQSLLLNERVSFAPPAILNPATLLPVESDDTPIHICSEILAEETGTRPDLRDQPLPGVPAWYTDGSSFIMDGRRQAGAAIVDNKRTVWASNLPEGTSAQKAELIALTQALRLAEGKSINIYTDSRYAFATAHVHGAIYKQRGWLTSAGKDIKNKEEILALLEAIHLPKRVAIIHCPGHQRGTDPVATGNRKADEAAKQAAQSTRILTETTKNAGKRTADGSEFEKRTADGSEFESPKKKAKVE

SEQ ID NO: 6089 - protein, 2225 aa, synthetic construct
MPAAKRVKLDGGDKKYSIGLDIGTNSVGWAVITDEYKVPSKKFKVLGNTDRHSIKKNLIGALLFDSGETAEATRLKRTARRRYTRRKNRICYLQEIFSNEMAKVDDSFFHRLEESFLVEEDKKHERHPIFGNIVDEVAYHEKYPTIYHLRKKLVDSTDKADLRLIYLALAHMIKFRGHFLIEGDLNPDNSDVDKLFIQLVQTYNQLFEENPINASGVDAKAILSARLSKSRRLENLIAQLPGEKKNGLFGNLIALSLGLTPNFKSNFDLAEDAKLQLSKDTYDDDLDNLLAQIGDQYADLFLAAKNLSDAILLSDILRVNTEITKAPLSASMIKRYDEHHQDLTLLKALVRQQLPEKYKEIFFDQSKNGYAGYIDGGASQEEFYKFIKPILEKMDGTEELLVKLNREDLLRKQRTFDNGSIPHQIHLGELHAILRRQEDFYPFLKDNREKIEKILTFRIPYYVGPLARGNSRFAWMTRKSEETITPWNFEEVVDKGASAQSFIERMTNFDKNLPNEKVLPKHSLLYEYFTVYNELTKVKYVTEGMRKPAFLSGEQKKAIVDLLFKTNRKVTVKQLKEDYFKKIECFDSVEISGVEDRFNASLGTYHDLLKIIKDKDFLDNEENEDILEDIVLTLTLFEDREMIEERLKTYAHLFDDKVMKQLKRRRYTGWGRLSRKLINGIRDKQSGKTILDFLKSDGFANRNFMQLIHDDSLTFKEDIQKAQVSGQGDSLHEHIANLAGSPAIKKGILQTVKVVDELVKVMGRHKPENIVIEMARENQTTQKGQKNSRERMKRIEEGIKELGSQILKEHPVENTQLQNEKLYLYYLQNGRDMYVDQELDINRLSDYDVDHIVPQSFLKDDSIDNKVLTRSDKARGKSDNVPSEEVVKKMKNYWRQLLNAKLITQRKFDNLTKAERGGLSELDKAGFIKRQLVETRQITKHVAQILDSRMNTKYDENDKLIREVKVITLKSKLVSDFRKDFQFYKVREINNYHHAHDAYLNAVVGTALIKKYPKLESEFVYGDYKVYDVRKMIAKSEQEIGKATAKYFFYSNIMNFFKTEITLANGEIRKRPLIETNGETGEIVWDKGRDFATVRKVLSMPQVNIVKKTEVQTGGFSKESILPKRNSDKLIARKKDWDPKKYGGFDSPTVAYSVLVVAKVEKGKSKKLKSVKELLGITIMERSSFEKNPIDFLEAKGYKEVKKDLIIKLPKYSLFELENGRKRMLASAGELQKGNELALPSKYVNFLYLASHYEKLKGSPEDNEQKQLFVEQHKHYLDEIIEQISEFSKRVILADANLDKVLSAYNKHRDKPIREQAENIIHLFTLTNLGAPAAFKYFDTTIDRKRYTSTKEVLDATLIHQSITGLYETRIDLSQLGGDGGGGSGGSGGSGGSGGSGGSGGTLGDQGSRGSDPLPEPRVTLTVEGIPTEFLVNTGAEHSVLTKPMGKMGSKRTVVAGATGSKVYPWTTKRLLKIGQKQVTHSFLVIPECPAPLLGRDLLTKLKAQIQFSTEGPQVTWEDRPAMCLVLNLEEEYRLHEKPVPPSIDPSWLQLFPMVWAEKAGMGLANQVPPVVVELKSDASPVAVRQYPMSKEAREGIRPHIQRFLDLGILVPCQSPWNTPLLPVKKPGTNDYRPVQDLREVNKRVQDIHPTVPNPYNLLSSLPPSHTWYSVLDLKDAFFCLKLHPNSQPLFAFEWRDPEKGNTGQLTWTRLPQGFKNSPTLFNEALHRDLASFRALNPQVVMLQYVDDLLVAAPTYRDCKEGTRRLLQELSKLGYRVSAKKAQLCREEVTYLGYLLKGGKRWLTPARKATVMKIPTPTTPRQVREFLGKAGFCRLFIPGFASLAAPLYPLTRPKVPFTWTEAHQEAFGRIKEALLSAPALALPDLTKPFALYVDEKEGVARGVLTQTLGPWRRPVAYLSKKLDPVASGWPTCLKAIAAVALLLKDADKLTLGQNVLVIAPHNLESIVRQPPDRWMTNARMTHYQSLLLNERVSFAPPAILNPATLLPVESDDTPIHICSEILAEETGTRPDLRDQPLPGVPAWYTDGSSFIMDGRRQAGAAIVDNKRTVWASNLPEGTSAQKAELIALTQALRLAEGKSINIYTDSRYAFATAHVHGAIYKQRGWLTSAGKDIKNKEEILALLEAIHLPKRVAIIHCPGHQRGTDPVATGNRKADEAAKQAAQSTRILTETTKNAGKRTADGSEFEKRTADGSEFESPKKKAKVE

SEQ ID NO: 6090 - protein, 2103 aa, synthetic construct; identical to SEQ ID NO: 4503

SEQ ID NO: 6091 - protein, 2103 aa, synthetic construct; identical to SEQ ID NO: 4503

SEQ ID NO: 6092 - protein, 2103 aa, synthetic construct
MPAAKRVKLDGGDKKYSIGLDIGTNSVGWAVITDEYKVPSKKFKVLGNTDRHSIKKNLIGALLFDSGETAEATRLKRTARRRYTRRKNRICYLQEIFSNEMAKVDDSFFHRLEESFLVEEDKKHERHPIFGNIVDEVAYHEKYPTIYHLRKKLVDSTDKADLRLIYLALAHMIKFRGHFLIEGDLNPDNSDVDKLFIQLVQTYNQLFEENPINASGVDAKAILSARLSKSRRLENLIAQLPGEKKNGLFGNLIALSLGLTPNFKSNFDLAEDAKLQLSKDTYDDDLDNLLAQIGDQYADLFLAAKNLSDAILLSDILRVNTEITKAPLSASMIKRYDEHHQDLTLLKALVRQQLPEKYKEIFFDQSKNGYAGYIDGGASQEEFYKFIKPILEKMDGTEELLVKLNREDLLRKQRTFDNGSIPHQIHLGELHAILRRQEDFYPFLKDNREKIEKILTFRIPYYVGPLARGNSRFAWMTRKSEETITPWNFEEVVDKGASAQSFIERMTNFDKNLPNEKVLPKHSLLYEYFTVYNELTKVKYVTEGMRKPAFLSGEQKKAIVDLLFKTNRKVTVKQLKEDYFKKIECFDSVEISGVEDRFNASLGTYHDLLKIIKDKDFLDNEENEDILEDIVLTLTLFEDREMIEERLKTYAHLFDDKVMKQLKRRRYTGWGRLSRKLINGIRDKQSGKTILDFLKSDGFANRNFMQLIHDDSLTFKEDIQKAQVSGQGDSLHEHIANLAGSPAIKKGILQTVKVVDELVKVMGRHKPENIVIEMARENQTTQKGQKNSRERMKRIEEGIKELGSQILKEHPVENTQLQNEKLYLYYLQNGRDMYVDQELDINRLSDYDVDHIVPQSFLKDDSIDNKVLTRSDKARGKSDNVPSEEVVKKMKNYWRQLLNAKLITQRKFDNLTKAERGGLSELDKAGFIKRQLVETRQITKHVAQILDSRMNTKYDENDKLIREVKVITLKSKLVSDFRKDFQFYKVREINNYHHAHDAYLNAVVGTALIKKYPKLESEFVYGDYKVYDVRKMIAKSEQEIGKATAKYFFYSNIMNFFKTEITLANGEIRKRPLIETNGETGEIVWDKGRDFATVRKVLSMPQVNIVKKTEVQTGGFSKESILPKRNSDKLIARKKDWDPKKYGGFDSPTVAYSVLVVAKVEKGKSKKLKSVKELLGITIMERSSFEKNPIDFLEAKGYKEVKKDLIIKLPKYSLFELENGRKRMLASAGELQKGNELALPSKYVNFLYLASHYEKLKGSPEDNEQKQLFVEQHKHYLDEIIEQISEFSKRVILADANLDKVLSAYNKHRDKPIREQAENIIHLFTLTNLGAPAAFKYFDTTIDRKRYTSTKEVLDATLIHQSITGLYETRIDLSQLGGDGGGGSGGSGGSGGSGGSGGSGGTLGIEDEYRLHETSTEPDVSLGSTWLSDFPQAWAETGGMGLAVRQAPLIIPLKATSTPVSIQQYPMSHEARLGIKPHIQRLLDQGILVPCQSPWNTPLLPVKKPGTNDYRPVQDLREVNKRVEDIHPTVPNPYNLLSGLPPSHQWYTVLDLKDAFFCLRLHPTSQPLFAFEWRDPGMGISGQLTWTRLPQGFKNSPTLFDEALHRDLADFRIQHPDLILLQYVDDILLAATSELDCQQGTRALLQTLGDLGYRASAKKAQICQKQVKYLGYLLREGQRWLTEARKETVMGQPVPKTPRQLREFLGTAGFCRLWIPGFAEMAAPLYPLTKTGTLFSWGPDQQKAYQEIKQALLTAPALGLPDLTKPFELFVDEKQGYAKGVLTQKLGPWRRPVAYLSKKLDPVAAGWPPCLRMVAAIAVLTKDAGKLTMGQPLVILAPHAVEALVKQPPDRWLSNARMTHYQAMLLDTDRVQFGPVVALNPATLLPLPEEGAPHDCLEILAETHGTRPDLTDQPIPDADHTWYTDGSSFLQEGQRKAGAAVTTETEVIWAGALPAGTSAQRAELIALTQALKMAEGKRLNVYTDSRYAFATAHIHGEIYRRRGLLTSEGREIKNKSEILALLKALFLPKRLSIIHCLGHQKGDSAEARGNRLADQAAREAAIKTPPDTSTLLAGKRTADGSEFEKRTADGSEFESPKKKAKVE

SEQ ID NO: 6093 - protein, 2103 aa, synthetic construct
MPAAKRVKLDGGDKKYSIGLDIGTNSVGWAVITDEYKVPSKKFKVLGNTDRHSIKKNLIGALLFDSGETAEATRLKRTARRRYTRRKNRICYLQEIFSNEMAKVDDSFFHRLEESFLVEEDKKHERHPIFGNIVDEVAYHEKYPTIYHLRKKLVDSTDKADLRLIYLALAHMIKFRGHFLIEGDLNPDNSDVDKLFIQLVQTYNQLFEENPINASGVDAKAILSARLSKSRRLENLIAQLPGEKKNGLFGNLIALSLGLTPNFKSNFDLAEDAKLQLSKDTYDDDLDNLLAQIGDQYADLFLAAKNLSDAILLSDILRVNTEITKAPLSASMIKRYDEHHQDLTLLKALVRQQLPEKYKEIFFDQSKNGYAGYIDGGASQEEFYKFIKPILEKMDGTEELLVKLNREDLLRKQRTFDNGSIPHQIHLGELHAILRRQEDFYPFLKDNREKIEKILTFRIPYYVGPLARGNSRFAWMTRKSEETITPWNFEEVVDKGASAQSFIERMTNFDKNLPNEKVLPKHSLLYEYFTVYNELTKVKYVTEGMRKPAFLSGEQKKAIVDLLFKTNRKVTVKQLKEDYFKKIECFDSVEISGVEDRFNASLGTYHDLLKIIKDKDFLDNEENEDILEDIVLTLTLFEDREMIEERLKTYAHLFDDKVMKQLKRRRYTGWGRLSRKLINGIRDKQSGKTILDFLKSDGFANRNFMQLIHDDSLTFKEDIQKAQVSGQGDSLHEHIANLAGSPAIKKGILQTVKVVDELVKVMGRHKPENIVIEMARENQTTQKGQKNSRERMKRIEEGIKELGSQILKEHPVENTQLQNEKLYLYYLQNGRDMYVDQELDINRLSDYDVDHIVPQSFLKDDSIDNKVLTRSDKARGKSDNVPSEEVVKKMKNYWRQLLNAKLITQRKFDNLTKAERGGLSELDKAGFIKRQLVETRQITKHVAQILDSRMNTKYDENDKLIREVKVITLKSKLVSDFRKDFQFYKVREINNYHHAHDAYLNAVVGTALIKKYPKLESEFVYGDYKVYDVRKMIAKSEQEIGKATAKYFFYSNIMNFFKTEITLANGEIRKRPLIETNGETGEIVWDKGRDFATVRKVLSMPQVNIVKKTEVQTGGFSKESILPKRNSDKLIARKKDWDPKKYGGFDSPTVAYSVLVVAKVEKGKSKKLKSVKELLGITIMERSSFEKNPIDFLEAKGYKEVKKDLIIKLPKYSLFELENGRKRMLASAGELQKGNELALPSKYVNFLYLASHYEKLKGSPEDNEQKQLFVEQHKHYLDEIIEQISEFSKRVILADANLDKVLSAYNKHRDKPIREQAENIIHLFTLTNLGAPAAFKYFDTTIDRKRYTSTKEVLDATLIHQSITGLYETRIDLSQLGGDGGGGSGGSGGSGGSGGSGGSGGTLGIEDEYRLHETSTEPDVSLGSTWLSDFPQAWAETGGMGLAVRQAPLIIPLKATSTPVSIQQYPMSHEARLGIKPHIQRLLDQGILVPCQSPWNTPLLPVKKPGTNDYRPVQDLREVNKRVEDIHPTVPNPYNLLSGLPPSHQWYTVLDLKDAFFCLRLHPTSQPLFAFEWRDPGMGISGQLTWTRLPQGFKNSPTLFNEALHRDLADFRIQHPDLILLQYVDDILLAATSELDCQQGTRALLQTLGDLGYRASAKKAQICQKQVKYLGYLLREGQRWLTEARKETVMGQPVPKTPRQLREFLGTAGFCRLWIPGFAEMAAPLYPLTKPGTLFSWGPDQQKAYQEIKQALLTAPALGLPDLTKPFELFVDEKQGYAKGVLTQKLGPWRRPVAYLSKKLDPVAAGWPPCLRMVAAIAVLTKDAGKLTMGQPLVILAPHAVEALVKQPPDRWLSNARMTHYQAMLLDTDRVQFGPVVALNPATLLPLPEEGAPHDCLEILAETHGTRPDLTDQPIPDADHTWYTDGSSFLQEGQRKAGAAVTTETEVIWAGALPAGTSAQRAELIALTQALKMAEGKRLNVYTDSRYAFATAHIHGEIYRRRGWLTSEGREIKNKSEILALLKALFLPKRLSIIHCLGHQKGDSAEARGNRLADQAAREAAIKTPPDTSTLLAGKRTADGSEFEKRTADGSEFESPKKKAKVE

SEQ ID NO: 6094 - protein, 2103 aa, synthetic construct
MPAAKRVKLDGGDKKYSIGLDIGTNSVGWAVITDEYKVPSKKFKVLGNTDRHSIKKNLIGALLFDSGETAEATRLKRTARRRYTRRKNRICYLQEIFSNEMAKVDDSFFHRLEESFLVEEDKKHERHPIFGNIVDEVAYHEKYPTIYHLRKKLVDSTDKADLRLIYLALAHMIKFRGHFLIEGDLNPDNSDVDKLFIQLVQTYNQLFEENPINASGVDAKAILSARLSKSRRLENLIAQLPGEKKNGLFGNLIALSLGLTPNFKSNFDLAEDAKLQLSKDTYDDDLDNLLAQIGDQYADLFLAAKNLSDAILLSDILRVNTEITKAPLSASMIKRYDEHHQDLTLLKALVRQQLPEKYKEIFFDQSKNGYAGYIDGGASQEEFYKFIKPILEKMDGTEELLVKLNREDLLRKQRTFDNGSIPHQIHLGELHAILRRQEDFYPFLKDNREKIEKILTFRIPYYVGPLARGNSRFAWMTRKSEETITPWNFEEVVDKGASAQSFIERMTNFDKNLPNEKVLPKHSLLYEYFTVYNELTKVKYVTEGMRKPAFLSGEQKKAIVDLLFKTNRKVTVKQLKEDYFKKIECFDSVEISGVEDRFNASLGTYHDLLKIIKDKDFLDNEENEDILEDIVLTLTLFEDREMIEERLKTYAHLFDDKVMKQLKRRRYTGWGRLSRKLINGIRDKQSGKTILDFLKSDGFANRNFMQLIHDDSLTFKEDIQKAQVSGQGDSLHEHIANLAGSPAIKKGILQTVKVVDELVKVMGRHKPENIVIEMARENQTTQKGQKNSRERMKRIEEGIKELGSQILKEHPVENTQLQNEKLYLYYLQNGRDMYVDQELDINRLSDYDVDHIVPQSFLKDDSIDNKVLTRSDKARGKSDNVPSEEVVKKMKNYWRQLLNAKLITQRKFDNLTKAERGGLSELDKAGFIKRQLVETRQITKHVAQILDSRMNTKYDENDKLIREVKVITLKSKLVSDFRKDFQFYKVREINNYHHAHDAYLNAVVGTALIKKYPKLESEFVYGDYKVYDVRKMIAKSEQEIGKATAKYFFYSNIMNFFKTEITLANGEIRKRPLIETNGETGEIVWDKGRDFATVRKVLSMPQVNIVKKTEVQTGGFSKESILPKRNSDKLIARKKDWDPKKYGGFDSPTVAYSVLVVAKVEKGKSKKLKSVKELLGITIMERSSFEKNPIDFLEAKGYKEVKKDLIIKLPKYSLFELENGRKRMLASAGELQKGNELALPSKYVNFLYLASHYEKLKGSPEDNEQKQLFVEQHKHYLDEIIEQISEFSKRVILADANLDKVLSAYNKHRDKPIREQAENIIHLFTLTNLGAPAAFKYFDTTIDRKRYTSTKEVLDATLIHQSITGLYETRIDLSQLGGDGGGGSGGSGGSGGSGGSGGSGGTLNIEDEYRLHETSKEPDVSLGSTWLSDFPQAWAETGGMGLAVRQAPLIIPLKATSTPVSIKQYPMSQEARLGIKPHIQRLLDQGILVPCQSPWNTPLLPVKKPGTNDYRPVQDLREVNKRVEDIHPTVPNPYNLLSGLPPSHQWYTVLDLKDAFFCLRLHPTSQPLFAFEWRDPEMGISGQLTWTRLPQGFKNSPTLFNEALHRDLAGFRIQHPDLILLQYVDDLLLAATSELDCQQGTRALLQTLGDLGYRASAKKAQICQKQVKYLGYLLKEGQRWLTEARKETVMGQPIPKTPRQLREFLGTAGFCRLWIPGFAEMAAPLYPLTKPGTLFNWGPDQQKAFQEIKQALLTAPALGLPDLTKPFELFVDEKQGYAKGVLTQKLGPWRRPVAYLSKKLDPVAAGWPPCLRMVAAIAVLTKDAGKLTMGQPLVILAPHAVEALVKQPPDRWLSNARMTHYQALLLDTDRVQFGPVVALNPATLLPLPEEGLQHDCLDILAEAHGTRSDLMDQPLPDADHTWYTDGSSFLQEGQRKAGAAVTTETEVIWARALPAGTSAQRAELIALTQALKMAEGKKLNVYTDSRYAFATAHIHGEIYRRRGWLTSEGKEIKNKDEILALLKALFLPKRLSIIHCPGHQKGNSAEARGNRMADQAAREVATRETPETSTLLAGKRTADGSEFEKRTADGSEFESPKKKAKVE

SEQ ID NO: 6095 - protein, 2103 aa, synthetic construct
MPAAKRVKLDGGDKKYSIGLDIGTNSVGWAVITDEYKVPSKKFKVLGNTDRHSIKKNLIGALLFDSGETAEATRLKRTARRRYTRRKNRICYLQEIFSNEMAKVDDSFFHRLEESFLVEEDKKHERHPIFGNIVDEVAYHEKYPTIYHLRKKLVDSTDKADLRLIYLALAHMIKFRGHFLIEGDLNPDNSDVDKLFIQLVQTYNQLFEENPINASGVDAKAILSARLSKSRRLENLIAQLPGEKKNGLFGNLIALSLGLTPNFKSNFDLAEDAKLQLSKDTYDDDLDNLLAQIGDQYADLFLAAKNLSDAILLSDILRVNTEITKAPLSASMIKRYDEHHQDLTLLKALVRQQLPEKYKEIFFDQSKNGYAGYIDGGASQEEFYKFIKPILEKMDGTEELLVKLNREDLLRKQRTFDNGSIPHQIHLGELHAILRRQEDFYPFLKDNREKIEKILTFRIPYYVGPLARGNSRFAWMTRKSEETITPWNFEEVVDKGASAQSFIERMTNFDKNLPNEKVLPKHSLLYEYFTVYNELTKVKYVTEGMRKPAFLSGEQKKAIVDLLFKTNRKVTVKQLKEDYFKKIECFDSVEISGVEDRFNASLGTYHDLLKIIKDKDFLDNEENEDILEDIVLTLTLFEDREMIEERLKTYAHLFDDKVMKQLKRRRYTGWGRLSRKLINGIRDKQSGKTILDFLKSDGFANRNFMQLIHDDSLTFKEDIQKAQVSGQGDSLHEHIANLAGSPAIKKGILQTVKVVDELVKVMGRHKPENIVIEMARENQTTQKGQKNSRERMKRIEEGIKELGSQILKEHPVENTQLQNEKLYLYYLQNGRDMYVDQELDINRLSDYDVDHIVPQSFLKDDSIDNKVLTRSDKARGKSDNVPSEEVVKKMKNYWRQLLNAKLITQRKFDNLTKAERGGLSELDKAGFIKRQLVETRQITKHVAQILDSRMNTKYDENDKLIREVKVITLKSKLVSDFRKDFQFYKVREINNYHHAHDAYLNAVVGTALIKKYPKLESEFVYGDYKVYDVRKMIAKSEQEIGKATAKYFFYSNIMNFFKTEITLANGEIRKRPLIETNGETGEIVWDKGRDFATVRKVLSMPQVNIVKKTEVQTGGFSKESILPKRNSDKLIARKKDWDPKKYGGFDSPTVAYSVLVVAKVEKGKSKKLKSVKELLGITIMERSSFEKNPIDFLEAKGYKEVKKDLIIKLPKYSLFELENGRKRMLASAGELQKGNELALPSKYVNFLYLASHYEKLKGSPEDNEQKQLFVEQHKHYLDEIIEQISEFSKRVILADANLDKVLSAYNKHRDKPIREQAENIIHLFTLTNLGAPAAFKYFDTTIDRKRYTSTKEVLDATLIHQSITGLYETRIDLSQLGGDGGGGSGGSGGSGGSGGSGGSGGTLNIEDEYRLHETSKGPDVPLGSTWLSDFPQAWAETGGMGLAFRQAPLIISLKATSTPVSIKQYPMSQEARLGIKPHIQRLLDQGILVPCQSPWNTPLLPVKKPGTNDYRPVQDLREVNKRVEDIHPTVPNPYNLLSGLPPSHQWYTVLDLKDAFFCLRLHPTSQSLFAFEWKDPEMGISGQLTWTRLPQGFKNSPTLFNEALHRDLADFRIQHPDLILLQYVDDLLLAATSELDCQQGTRALLQTLGDLGYRASAKKAQICQKQVKYLGYLLKEGQRWLTEARKETVMGQPTPKTPRQLREFLGKAGLCRLFIPGFAEMAAPLYPLTKPGTLFKWGPDQQKAYQEIKQALLTAPALGLPDLTKPFELFVDEKQGYAKGVLTQKLGPWRRPVAYLSKKLDPVAAGWPPCLRMVAAIAVLTKDVGKLTMGQPLVILAPHAVEALVKQPPDRWLSNARMTHYQALLLDTDRVQFGPIVALNPATLLPLPEEGLQHDCLDILAEAHGTRPDLTDQPLPDADHTWYTDGSSFLQEGQRRAGAAVTTETEVIWAKALPAGTSAQRAELIALTQALKMAAGKKLNVYTDSRYAFATAHIHGEIYRRRGWLTSEGKEIKNKDEILALLKALFLPKRLSIIHCPGHQKGNHAEARGNRMADQAAREVATRETPETSTLLAGKRTADGSEFEKRTADGSEFESPKKKAKVE

SEQ ID NO: 6096 - protein, 2103 aa, synthetic construct
MPAAKRVKLDGGDKKYSIGLDIGTNSVGWAVITDEYKVPSKKFKVLGNTDRHSIKKNLIGALLFDSGETAEATRLKRTARRRYTRRKNRICYLQEIFSNEMAKVDDSFFHRLEESFLVEEDKKHERHPIFGNIVDEVAYHEKYPTIYHLRKKLVDSTDKADLRLIYLALAHMIKFRGHFLIEGDLNPDNSDVDKLFIQLVQTYNQLFEENPINASGVDAKAILSARLSKSRRLENLIAQLPGEKKNGLFGNLIALSLGLTPNFKSNFDLAEDAKLQLSKDTYDDDLDNLLAQIGDQYADLFLAAKNLSDAILLSDILRVNTEITKAPLSASMIKRYDEHHQDLTLLKALVRQQLPEKYKEIFFDQSKNGYAGYIDGGASQEEFYKFIKPILEKMDGTEELLVKLNREDLLRKQRTFDNGSIPHQIHLGELHAILRRQEDFYPFLKDNREKIEKILTFRIPYYVGPLARGNSRFAWMTRKSEETITPWNFEEVVDKGASAQSFIERMTNFDKNLPNEKVLPKHSLLYEYFTVYNELTKVKYVTEGMRKPAFLSGEQKKAIVDLLFKTNRKVTVKQLKEDYFKKIECFDSVEISGVEDRFNASLGTYHDLLKIIKDKDFLDNEENEDILEDIVLTLTLFEDREMIEERLKTYAHLFDDKVMKQLKRRRYTGWGRLSRKLINGIRDKQSGKTILDFLKSDGFANRNFMQLIHDDSLTFKEDIQKAQVSGQGDSLHEHIANLAGSPAIKKGILQTVKVVDELVKVMGRHKPENIVIEMARENQTTQKGQKNSRERMKRIEEGIKELGSQILKEHPVENTQLQNEKLYLYYLQNGRDMYVDQELDINRLSDYDVDHIVPQSFLKDDSIDNKVLTRSDKARGKSDNVPSEEVVKKMKNYWRQLLNAKLITQRKFDNLTKAERGGLSELDKAGFIKRQLVETRQITKHVAQILDSRMNTKYDENDKLIREVKVITLKSKLVSDFRKDFQFYKVREINNYHHAHDAYLNAVVGTALIKKYPKLESEFVYGDYKVYDVRKMIAKSEQEIGKATAKYFFYSNIMNFFKTEITLANGEIRKRPLIETNGETGEIVWDKGRDFATVRKVLSMPQVNIVKKTEVQTGGFSKESILPKRNSDKLIARKKDWDPKKYGGFDSPTVAYSVLVVAKVEKGKSKKLKSVKELLGITIMERSSFEKNPIDFLEAKGYKEVKKDLIIKLPKYSLFELENGRKRMLASAGELQKGNELALPSKYVNFLYLASHYEKLKGSPEDNEQKQLFVEQHKHYLDEIIEQISEFSKRVILADANLDKVLSAYNKHRDKPIREQAENIIHLFTLTNLGAPAAFKYFDTTIDRKRYTSTKEVLDATLIHQSITGLYETRIDLSQLGGDGGGGSGGSGGSGGSGGSGGSGGTLNIEDEYRLHETSKGPDVPLGSTWLSDFPQAWAETGGMGLAVRQAPLIIPLKATSTPVSIKQYPMSQEARLGIKPHIQRLLDQGILVPCQSPWNTPLLPVKKPGTNDYRPVQDLREVNKRVEDIHPTVPNPYNLLSGLPPSHQWYTVLDLKDAFFCLRLHPTSQSLFAFEWRDPEMGISGQLTWTRLPQGFKNSPTLFNEALHRDLADFRIQHPDLILLQYVDDLLLAATSELDCQQGTRALLQTLGDLGYRASAKKAQICQKQVKYLGYLLKEGQRWLTEARKETVMGQPTPKTPRQLREFLGTAGFCRLWIPGFAEMAAPLYPLTKPGTLFEWGPDQQKAYQEIKQALLTAPALGLPDLTKPFELFVDEKQGYAKGVLTQKLGPWRRPVAYLSKKLDPVAAGWPPCLRMVAAIAVLTKDAGKLTMGQPLVILAPHAVEALVKQPPDRWLSNARMTHYQALLLDTDRVQFGPIVALNPATLLPLPEEGLQHDCLDILAEAHGTRPDLTDQPLPDADHTWYTDGSSFLQEGQRKAGAAVTTETEVVWAKALPAGTSAQRAELIALTQALKMAEGKKLNVYTDSRYAFATAHIHGEIYRRRGWLTSEGKEIKNKDEILALLKALFLPKRLSIIHCPGHQKGNRAEARGNRMADQAAREVATRETPETSTLLAGKRTADGSEFEKRTADGSEFESPKKKAKVE

SEQ ID NO: 6097 - protein, 2103 aa, synthetic construct
MPAAKRVKLDGGDKKYSIGLDIGTNSVGWAVITDEYKVPSKKFKVLGNTDRHSIKKNLIGALLFDSGETAEATRLKRTARRRYTRRKNRICYLQEIFSNEMAKVDDSFFHRLEESFLVEEDKKHERHPIFGNIVDEVAYHEKYPTIYHLRKKLVDSTDKADLRLIYLALAHMIKFRGHFLIEGDLNPDNSDVDKLFIQLVQTYNQLFEENPINASGVDAKAILSARLSKSRRLENLIAQLPGEKKNGLFGNLIALSLGLTPNFKSNFDLAEDAKLQLSKDTYDDDLDNLLAQIGDQYADLFLAAKNLSDAILLSDILRVNTEITKAPLSASMIKRYDEHHQDLTLLKALVRQQLPEKYKEIFFDQSKNGYAGYIDGGASQEEFYKFIKPILEKMDGTEELLVKLNREDLLRKQRTFDNGSIPHQIHLGELHAILRRQEDFYPFLKDNREKIEKILTFRIPYYVGPLARGNSRFAWMTRKSEETITPWNFEEVVDKGASAQSFIERMTNFDKNLPNEKVLPKHSLLYEYFTVYNELTKVKYVTEGMRKPAFLSGEQKKAIVDLLFKTNRKVTVKQLKEDYFKKIECFDSVEISGVEDRFNASLGTYHDLLKIIKDKDFLDNEENEDILEDIVLTLTLFEDREMIEERLKTYAHLFDDKVMKQLKRRRYTGWGRLSRKLINGIRDKQSGKTILDFLKSDGFANRNFMQLIHDDSLTFKEDIQKAQVSGQGDSLHEHIANLAGSPAIKKGILQTVKVVDELVKVMGRHKPENIVIEMARENQTTQKGQKNSRERMKRIEEGIKELGSQILKEHPVENTQLQNEKLYLYYLQNGRDMYVDQELDINRLSDYDVDHIVPQSFLKDDSIDNKVLTRSDKARGKSDNVPSEEVVKKMKNYWRQLLNAKLITQRKFDNLTKAERGGLSELDKAGFIKRQLVETRQITKHVAQILDSRMNTKYDENDKLIREVKVITLKSKLVSDFRKDFQFYKVREINNYHHAHDAYLNAVVGTALIKKYPKLESEFVYGDYKVYDVRKMIAKSEQEIGKATAKYFFYSNIMNFFKTEITLANGEIRKRPLIETNGETGEIVWDKGRDFATVRKVLSMPQVNIVKKTEVQTGGFSKESILPKRNSDKLIARKKDWDPKKYGGFDSPTVAYSVLVVAKVEKGKSKKLKSVKELLGITIMERSSFEKNPIDFLEAKGYKEVKKDLIIKLPKYSLFELENGRKRMLASAGELQKGNELALPSKYVNFLYLASHYEKLKGSPEDNEQKQLFVEQHKHYLDEIIEQISEFSKRVILADANLDKVLSAYNKHRDKPIREQAENIIHLFTLTNLGAPAAFKYFDTTIDRKRYTSTKEVLDATLIHQSITGLYETRIDLSQLGGDGGGGSGGSGGSGGSGGSGGSGGTLNIEDEHRLHETSKEPDVSLGSTWLSDFPQAWAETGGMGLAVRQAPLIIPLKATSTPVSIKQYPMSQEARLGIKPHIQRLLDQGILVPCQSPWNTPLLPVKKPGTNDYRPVQDLREVNKRVEDIHPTVPNPYNLLSGLPPSHQWYTVLDLKDAFFCLRLHPTSQPLFAFEWRDPEMGISGQLTWTRLPQGFKNSPTLFDEALHRDLADFRIQHPDLILLQYVDDLLLAATSELDCQQGTRALLQTLGNLGYRASAKKAQICQKQVKYLGYLLKEGQRWLTEARKETVMGQPTPKTPRQLREFLGTAGFCRLWIPGFAEMAAPLYPLTKTGTLFNWGPDQQKAYQEIKQALLTAPALGLPDLTKPFELFVDEKQGYAKGVLTQKLGPWRRPVAYLSKKLDPVAAGWPPCLRMVAAIAVLTKDAGKLTMGQPLVILAPHAVEALVKQPPDRWLSNARMTHYQALLLDTDRVQFGPVVALNPATLLPLPEEGLQHNCLDILAEAHGTRPDLTDQPLPDADHTWYTDGSSLLQEGQRKAGAAVTTETEVIWAKALPAGTSAQRAELIALTQALKMAEGKKLNVYTDSRYAFATAHIHGEIYRRRGLLTSEGKEIKNKDEILALLKALFLPKRLSIIHCPGHQKGHSAEARGNRMADQAARKAAITETPDTSTLLAGKRTADGSEFEKRTADGSEFESPKKKAKVE

SEQ ID NO: 6098 - protein, 2103 aa, synthetic construct
MPAAKRVKLDGGDKKYSIGLDIGTNSVGWAVITDEYKVPSKKFKVLGNTDRHSIKKNLIGALLFDSGETAEATRLKRTARRRYTRRKNRICYLQEIFSNEMAKVDDSFFHRLEESFLVEEDKKHERHPIFGNIVDEVAYHEKYPTIYHLRKKLVDSTDKADLRLIYLALAHMIKFRGHFLIEGDLNPDNSDVDKLFIQLVQTYNQLFEENPINASGVDAKAILSARLSKSRRLENLIAQLPGEKKNGLFGNLIALSLGLTPNFKSNFDLAEDAKLQLSKDTYDDDLDNLLAQIGDQYADLFLAAKNLSDAILLSDILRVNTEITKAPLSASMIKRYDEHHQDLTLLKALVRQQLPEKYKEIFFDQSKNGYAGYIDGGASQEEFYKFIKPILEKMDGTEELLVKLNREDLLRKQRTFDNGSIPHQIHLGELHAILRRQEDFYPFLKDNREKIEKILTFRIPYYVGPLARGNSRFAWMTRKSEETITPWNFEEVVDKGASAQSFIERMTNFDKNLPNEKVLPKHSLLYEYFTVYNELTKVKYVTEGMRKPAFLSGEQKKAIVDLLFKTNRKVTVKQLKEDYFKKIECFDSVEISGVEDRFNASLGTYHDLLKIIKDKDFLDNEENEDILEDIVLTLTLFEDREMIEERLKTYAHLFDDKVMKQLKRRRYTGWGRLSRKLINGIRDKQSGKTILDFLKSDGFANRNFMQLIHDDSLTFKEDIQKAQVSGQGDSLHEHIANLAGSPAIKKGILQTVKVVDELVKVMGRHKPENIVIEMARENQTTQKGQKNSRERMKRIEEGIKELGSQILKEHPVENTQLQNEKLYLYYLQNGRDMYVDQELDINRLSDYDVDHIVPQSFLKDDSIDNKVLTRSDKARGKSDNVPSEEVVKKMKNYWRQLLNAKLITQRKFDNLTKAERGGLSELDKAGFIKRQLVETRQITKHVAQILDSRMNTKYDENDKLIREVKVITLKSKLVSDFRKDFQFYKVREINNYHHAHDAYLNAVVGTALIKKYPKLESEFVYGDYKVYDVRKMIAKSEQEIGKATAKYFFYSNIMNFFKTEITLANGEIRKRPLIETNGETGEIVWDKGRDFATVRKVLSMPQVNIVKKTEVQTGGFSKESILPKRNSDKLIARKKDWDPKKYGGFDSPTVAYSVLVVAKVEKGKSKKLKSVKELLGITIMERSSFEKNPIDFLEAKGYKEVKKDLIIKLPKYSLFELENGRKRMLASAGELQKGNELALPSKYVNFLYLASHYEKLKGSPEDNEQKQLFVEQHKHYLDEIIEQISEFSKRVILADANLDKVLSAYNKHRDKPIREQAENIIHLFTLTNLGAPAAFKYFDTTIDRKRYTSTKEVLDATLIHQSITGLYETRIDLSQLGGDGGGGSGGSGGSGGSGGSGGSGGTLNIEDEHRLHETSKEPDVSLGSTWLSDFPQAWAETGGMGLAVRQAPLIIPLKATSTPVSIKQYPMSQEARLGIKPHIQRLLDQGILVPCQSPWNTPLLPVKKPGTNDYRPVQDLREVNKRVEDIHPTVPNPYNLLSGLPPSHQWYTVLDLKDAFFCLRLHPTSQPLFAFEWRDPEMGISGQLTWTRLPQGFKNSPTLFNEALHRDLADFRIQHPDLILLQYVDDLLLAATSELDCQQGTRALLQTLGNLGYRASAKKAQICQKQVKYLGYLLKEGQRWLTEARKETVMGQPTPKTPRQLREFLGTAGFCRLWIPGFAEMAAPLYPLTKPGTLFNWGPDQQKAYQEIKQALLTAPALGLPDLTKPFELFVDEKQGYAKGVLTQKLGPWRRPVAYLSKKLDPVAAGWPPCLRMVAAIAVLTKDAGKLTMGQPLVILAPHAVEALVKQPPDRWLSNARMTHYQALLLDTDRVQFGPVVALNPATLLPLPEEGLQHNCLDILAEAHGTRPDLTDQPLPDADHTWYTDGSSLLQEGQRKAGAAVTTETEVIWAKALPAGTSAQRAELIALTQALKMAEGKKLNVYTDSRYAFATAHIHGEIYRRRGWLTSEGKEIKNKDEILALLKALFLPKRLSIIHCPGHQKGHSAEARGNRMADQAARKAAITETPDTSTLLAGKRTADGSEFEKRTADGSEFESPKKKAKVE

SEQ ID NO: 6099 - protein, 2103 aa, synthetic construct; identical to SEQ ID NO: 6098

SEQ ID NO: 6100 - protein, 2017 aa, synthetic construct
MPAAKRVKLDGGDKKYSIGLDIGTNSVGWAVITDEYKVPSKKFKVLGNTDRHSIKKNLIGALLFDSGETAEATRLKRTARRRYTRRKNRICYLQEIFSNEMAKVDDSFFHRLEESFLVEEDKKHERHPIFGNIVDEVAYHEKYPTIYHLRKKLVDSTDKADLRLIYLALAHMIKFRGHFLIEGDLNPDNSDVDKLFIQLVQTYNQLFEENPINASGVDAKAILSARLSKSRRLENLIAQLPGEKKNGLFGNLIALSLGLTPNFKSNFDLAEDAKLQLSKDTYDDDLDNLLAQIGDQYADLFLAAKNLSDAILLSDILRVNTEITKAPLSASMIKRYDEHHQDLTLLKALVRQQLPEKYKEIFFDQSKNGYAGYIDGGASQEEFYKFIKPILEKMDGTEELLVKLNREDLLRKQRTFDNGSIPHQIHLGELHAILRRQEDFYPFLKDNREKIEKILTFRIPYYVGPLARGNSRFAWMTRKSEETITPWNFEEVVDKGASAQSFIERMTNFDKNLPNEKVLPKHSLLYEYFTVYNELTKVKYVTEGMRKPAFLSGEQKKAIVDLLFKTNRKVTVKQLKEDYFKKIECFDSVEISGVEDRFNASLGTYHDLLKIIKDKDFLDNEENEDILEDIVLTLTLFEDREMIEERLKTYAHLFDDKVMKQLKRRRYTGWGRLSRKLINGIRDKQSGKTILDFLKSDGFANRNFMQLIHDDSLTFKEDIQKAQVSGQGDSLHEHIANLAGSPAIKKGILQTVKVVDELVKVMGRHKPENIVIEMARENQTTQKGQKNSRERMKRIEEGIKELGSQILKEHPVENTQLQNEKLYLYYLQNGRDMYVDQELDINRLSDYDVDHIVPQSFLKDDSIDNKVLTRSDKARGKSDNVPSEEVVKKMKNYWRQLLNAKLITQRKFDNLTKAERGGLSELDKAGFIKRQLVETRQITKHVAQILDSRMNTKYDENDKLIREVKVITLKSKLVSDFRKDFQFYKVREINNYHHAHDAYLNAVVGTALIKKYPKLESEFVYGDYKVYDVRKMIAKSEQEIGKATAKYFFYSNIMNFFKTEITLANGEIRKRPLIETNGETGEIVWDKGRDFATVRKVLSMPQVNIVKKTEVQTGGFSKESILPKRNSDKLIARKKDWDPKKYGGFDSPTVAYSVLVVAKVEKGKSKKLKSVKELLGITIMERSSFEKNPIDFLEAKGYKEVKKDLIIKLPKYSLFELENGRKRMLASAGELQKGNELALPSKYVNFLYLASHYEKLKGSPEDNEQKQLFVEQHKHYLDEIIEQISEFSKRVILADANLDKVLSAYNKHRDKPIREQAENIIHLFTLTNLGAPAAFKYFDTTIDRKRYTSTKEVLDATLIHQSITGLYETRIDLSQLGGDGGGGSGGSGGSGGSGGSGGSGGLTAAIDILAPQQCAEPITWKSDEPVWVDQWPLTNDKLAAAQQLVQEQLEAGHITESSSPWNTPIFVIKKKSGKWRLLQDLRAVNATMVLMGALQPGLPSPVAPPQGYLKIIIDLKDCFFSIPLHPSDQKRFAFSLPSTNFKEPMQRFQWKVLPQGMANSPTLCQKYVATAIHKVRHAWKQMYIIHYMDDILIAGKDGQQVLQCFDQLKQELTAAGLHIAPEKVQLQDPYTYLGFELNGPKITNQKAVIRKDKLQTLNDFQKLLGDINWLRPYLKLTTGDLKPLFDTLKPDSDPNSHRSLSKEALASLEKVETAIAEQFVTHINYSLPLIFLIFNTALTPTGLFWQDNPIMWIHLPASPKKVLLPYYDAIADLIILGRDHSKKYFGIEPSTIIQPYSKSQIDWLMQNTEMWPIACASFVGILDNHYPPNKLIQFCKLHTFVFPQIISKTPLNNALLVFTDGSSTGMAAYTLTDTTIKFQTNLNSAQLVELQALIAVLSAFPNQPLNIYTDSAYLAHSIPLLETVAQIKHISETAKLFLQCQQLIYNRSIPFYIGHVRAHSGLPGPIAQGNQRADLATKIVASNINTAGKRTADGSEFEKRTADGSEFESPKKKAKVE
